United States Patent Application Publication US 2007/0054278 A1 - sequence listing, part 85

SEQ ID NO: 96704 - DNA, 572556 bp, Homo sapiens
  misc_feature (1)...(572556): n = A,T,C or G
aatcacatgatgaagatggaaagagccattgggtgcttgagtccagaaaggcatcctctcgggaggacaaaactgtctcagaggctgaatcaaatcttttggttgggacttaatgcctgtccagtgctgtgggtgatatttatctttagtggcctcatctccttcagggtaaagtggttagcagtggttatcatgagtgtggtgctacaaggtgccaacctatatggctacatcaggtgtaaataggcaacggaaagaatgtaaccagcatgggtccctcatacttggaaagcagtttttaagacaaaacactgaggatgatcagactttgtgaacagagagagaatgcttatgtgctttgttacagtggggagcaaacagagattgttgactctgaacattttagacctcggtccatgatgcaacaaggaatgttggctttgtttttcacttaaaatctttagttaaagcaaagcaaagtagttttcttattaagtttttatatcctttccagtagttggggctagaatgcatgttgtcactgaagacattgtcaacatttgttttatggtgtacataaaatatgcacacagtcatgtcatatcaatatatcccaaactaatgaaagtgtgttcatttacatatgtaatggagacctttgtattttggtccatagaacacagaaggatgttcttagtctatctcaagctctatatgtttacatattacttctgtatattactttccgaagtaagttttgcttccacagtaagagtgagcagcttggctcatgtataccttagaaattattgttaatttttaatatatacttcacgttgacatttcttagacatacgcaagaaagtaaaaaccacatttgggccagtgatgttaactagtttctaaaatgttatttatttttattcgtaacaagccatttacttaagtttatgtaaagggatagtttatgcttaagggatagcagaggttgttgctgttctgtttattgtatagaaaacatggccagattttaatttagaacttcctggaagctcttcagtggactttgagctaatacaatatatcttttgtcaccaaaagagtattattcttatgtcataatgagaacaataatttgcatgcgtggcataataaatgcctaaaagacattttattttatgactctattctttgctataatagggatattgtaaatcatatatttgtataatattggtggtatttattaaagcaatagatgtaatggtaaacaaaaaaatatgaaaacacaaaagagcttctacaaataaaaagaaagccaacagtctagttttaaaatgggcaaaagacttaaatgacacttcataaaagaagatattccaatggctggtaaaaatttgaaagaagttctatgaaatcaaaaccagaatgaaataccagaatggcaggccaggcgcggtggctcatgcctgtaatcccagcactttgggagggccgaggtggtggatcacggaggtcaagagatcaagaccatcctggccaatatgatgaaaccccgtctctattaaaaatacaaaaaaattagctgggtgtggtgatgtgcgcctgtagtcacagctactcgggaggctgaggcaggaggattgctcgaacccgggaggcagaggttgcagtgagccgggatcgcgccactgcactccagcctggtgacagagcgagactccgtctaatagaaaaaaaaaaaaaagaaatatcagaatggtgacaaaaataatggcaaggccacatttcatcaagggtatacaccagaactcatatattgccaatgcgtgatgaatataactgctttagaaatctctgtagtaatatttataatcatgaaacacatgccttccttgtgatctggacattctattttcagtcagataaccaagagaaatgaacacatatgtccatcaaaagacaagaatattcatgttagctttattcataacatcccaaagtttcaaacccaaaaatccattggcataggaacaaataaataacgtgtggtgtattcacacaatgaactatcatgcacagcagtaaaaagtaatgaatgactggtaatgtagcaataagggtacatctcacagacactgcactgagtgagagaagccggaggctaagtggataatactgcatgaccacatgtatgcgaggtgcaagactgggcaaaaccaggcttctgtggccaaagcctgaatagttggttacccagtgtcggcactgacttgaagatggcccagccactgggaattacataattatatatttgttatatataataatccagatgctatacatatgctattcatatacatatggtatacacatgcgaaatagttcactgagccatacttttaagatcggtgcatttttgttgtgtgtgcattatcccttgatagtaccgttttgattgacaagggaaaggcgctttttcaaaatataaaaccacgaaacatcatgtaacccagaagtacagttttgggagtgggagagatgtttctcaaagcagaacctggggcaaccacggagcagcggatgcgcgctgaagggcgcgtgggcagcggggtggttccgcggcctgcggggcgcagcgcgccaccgcgggatctgaaaggcgcttcctggcaacgctgctagggtcccgccgcccccgccgaggtgaagtccaacccgcagctgcgcgggcagcccaggtcttccccagaacctccggagccgaggacccagcgccaagccaggagcaaagcagcgcgccaggctggagctgttccgtcattaccgccacgtctgcgcttcggttgtgagaaccgattcgttaccctaacctcttaggactaagagccagtcttctggtggcgctcgctttcacttactttttatttccctttctattcccgcgagctagggggagaaagtgtaaatcccgcccgcttctccagggctgaaaatggagaggctgaggcggcttggagagtgcgcactgcgcatgctccgcagagcatccccgcaggtcaaccggggcaagggagagacatgaaagcctgtggcttctcctttgaagattcttttttttttttttttttttgagacggagtctcgctctgtcgcccaggctggactgcggactgcagtggcgcaatctcggctcactgcaagctccgcttcccgggttcacgccattctcctgcctcagcctcccgagtagctgggactacaggcgcccgccaccgcgcccggctaattttttgtatttttagtagagacggggtttcaccttgttagccaggatggtctcgatctcctgacctcatgatccacccgcctcggcctcccaaagtgctgggattacaggcgtgagccaccgcgcccggcccctttgaagattcttaaccttgcattttgctttcacacttaacgcctagaaagcttgctttgatttttccccaacctttcagctcatttagctttaaaaaacaaaatctcgttccaggaagaggggaggggctttccaagagaaaatgttcagacgtatcaagttgacctactcaatctaataaatgaagcgaagcattccaaaggccagaggggatcatcttgcattcattcataatagcacgttgaaatatgcaagaaaggaaaagaataaagaacacagggatgtaaaaacagtattgcgttttcttgttcactgattgaattgtaaaaaaaataataacaacaaacaaatctcaggacacttcttgtttactgatattttacaaaatcactcaagtaacagtctatttctattataaacaacttgtgagtattttaactcatgctcaaaaaataaataatatggtaagaagtccaaaactttcatcaactagcccaacaacaaatgtcagctgagcacctactcaggcagacagtatggtatagtgattaggaatgaaacattggagccagctgcctggcttttaacccccagtcctcacctactagctgtgtgatcctggggtaagcgacttaacttctctgtgctttttctctatatgcgaaacggaaataatgttgtgagagttaaaatgagttaatcaatgtaaagccttcctgtcggccctggcccctgttatgtgatcaatgtcagatggttatttttacttatgttcctattactgtgttaagaagggaaacacaaaagaattgtttctacttgcagcattcttgcagcacactcaggcgtggtggctcatgcctgtaatctcagcactttgggaggccgaggcgagcagattacttgaagtcaggagttgcagaagagcctggccaacatggtgaaaccccatctttactaaaaatacaaaaattagccaggcgtggtggtgggtgcctgtaatcccagctactcaggaggatgaggcacgagaatcacttgaacccgggaggtggagattgcagtgagtccagatgacactactgcactccagcctgggcgatagagtgagactcaagtctcttatgtggagacgacataagcaatgaaggaacaataaatcatcatctaactgatttttaaagtgctcagattttggtacagaaaattagagattagggcagagtatgataaaggctcatattcccctgaagcctaaaggagtggtacaggtgttggaagtggaagaatgcaggagcgtcagagtcttcatcaaagaggggaccttatagggcatgtgcacctaagtaggagggatgtgctgggcagaggaggatgagaatgccagaaagagtcctggaaagggggggagctgggtgagttcagcacctcacagagacagaaaggtgatgccagggagatgacagctccattgttgaaaaacaatattgtcattaacaactgcactcccctccacttcatgcctatccagaaacaagggggaacacaccagaggaatacaggcccatgccaccatgcccagctaattctttactattttttgtagagacagggtttttgcacattgcctaggctggtctcgaactcctggggtcaagtgatccgcctgcctcggactcccaaagtgccggggttaccggcttgggccactgtgcctggccgaacaaagctatttgacaatattaaagaaacagttatcacacccttacataattctatgaatagcagttataaaacattttctaagaactttttgggggtgatagaaatgtaaaattcctagtggatttactacactgttgcgattgcaatacttacatggtgcaagactaactttctgaacgattatgacaaatgaaagcgtaaatgccattttcggtttttggaatatgaaaatacatggaatgaggcgcacctcatgcttccaccaaacggaacgtctttggcttcttgccttaggatctttctagctcctacctttaacatgcctttccacctctactgtttattgctatgtgttagtctctcttttctgtaagaaaggcataaatctggggtgcttttttcccaaatattcccgcagaaagccacctttccaagcacagaatcttatcagtgcctaggagttcagccgacttagcacgaagagtgcgatggaagggctgcttttggcaaaccgtctcaaccccgggcgacggcgggcacgggaggtcagggagcgctggaggaaacctgcactggggtagaaatggctggaggaaggcggaccgcgggctcgttctcatggtgccaaccccggggacctttcttcaggctccctgcgggatccccagcctcccctcccctcggagctccgcccccttcctggcctcaaactccgagtccattcaaacctcgccttcctcgccctgcgcgttgtcaggcgtgtaattggggaaactcctccccgccgggaccgcctcggaggcgctgccaggggacagccgcccagctgcccccacctcccagcacagcgcacacagccccggcctgggcacccgcgcccgctcgcggctccaggcggggtgggcggcgccgcgccagggggtccccggcgcccattgctcccgccgcccggttgcgcggaccggcgctagtgcgcgggtgggggcggcgcgccgcggtggcccggcgtcccgtgtgcgtccmgtgtgcgccccgcgggggcgcggccagcgccagagtagatacctgtcccgcccgccgcggccagcagcctcggaggaagccagggcaaagagggccggcggagaccaggtccgcgccggaggaagccgcgcccggccgaggccccggaccctgcgccccgagctccacggcaccatggccccgaagctgctgctcctcctctgcctgttctcgggcttgcacgcgcggtaagtggcgygggggccgcatccccggaggccccgagctgggcgacagggcggcggggggcgctgtctgctggagtccctggcgcgccagccgtcggctgggctgcggcacggcgggccgggaggggactgggaagtcggtctgcacctcacctgtcccagctcccttggacacggtcatctgctttttcctctgcagccgggagtgtggggactcagattaatgggctcgtctcctgacgcttttaggatctggtggttttaaggggttttgagaaccaggttcagggggcaggggccatttctggctccttaccgacccctaattcccacctcagctgtttcaggggctcacacacacacacactttggctgacattctctgtcatttccatcactctgaaatttccaagaacccgggaaccgtggttctaactgcctagtttagaccgggctggaaagagctaatgcattggaggcaggcgcggggggattggaaccaggtgggcagaagaaagccctgcttgtctgggaggactcccctcccaggtcctgcaaacacacacacacaccttccacatcagccactttcacacagaggaacacacgcactcccacccccataaagcacgcatgtcgaaatggataataaggcttctgcctggtaatgtaagaaatcatctcaccataaattccgcaaccttcctcccagtacaccaaccggctaatgggagcttagaatcactctagaagagatgaagagggcgcatgaggatacaaggacagtgggacccaaagggttaaatcctgttgctgtaaacacaactggagattctgggtttagtttctttaattctgtctctctggctggatttctggctagagcttgcagactgtcctgttatttgaaaattggagcagtgtctggcctttacctctttccccaccctaggaagctcagcgtgcccctatcccccaaaccctcttgttttgacgcttctccatttcctgggtctgggagctagagaatcagagggcatccttgcgtgcacaagcctggccaccatcaggaggcaatgccaggaggccttgccttttcattcctatttgtgaactaccaaggagctaggaagacacatgaataaatcctactaaacatgaagggggcccccagttctcactcctgaattgggcaggggtgcttaccytgaggaaggaagccctggccctcccccttgcaactgctcctctttgctgagttgagtgtggaagccgactccaccggtgactcacaggcaactctttcaaagagacagagcactccttgggcctttcagctgaagtttctttctgtctcaagaggcagctggtgcaagcaatggaaacatgctttctgaggttgcttcttcctggttgtatctctgtttagagatggagagggaggcagacagcaccgggcataacgctgaggccggcagtcacatctctgccacctttctattgccaccaactcaaacgagtgaccagccgttcagggttcagtaatcaactgtttaggtctctggattcttaacattctagaagaaacactgcctattgtcctcactactgcatgtgcttagtaggaagatacctcagcctctgccttaaaacagtccggttactggggattcccaaatatacacaaaatctcttgggattcttcatccttccattctactaagacagacataatgattttcatttgttctctatttgggctcgttccccagctttcataatagagcttgcagatcagttaaaaaatccaaattttatactaactttattgctatatgcctcttctttgagagtgtctttgttctctgaatgggttttacagacatgtgaaataatctgatgtgcagtgtcatctttcaaaactgttttaaatttggaggggtttctcatttgcactctgagtcccttcctgctgtggaagttccttggataagggtctgatggctgtgctttgtggtgatggctcagcagctccccagaaggggggactccccattttgacacccatgggcatcataaaacgcactgattcccactcagaccttggtgatgccttaactgctttctgaggtttaggaactccttttaatgcttaaaaatacttcagactttttctctgtccttccgctttaagctaaggtgtaagacatgaaaataacatctgaaggttgagttgttgtttgactatgacaatacatcactgatttatttttaaggaaaagctaatttcagtaatggtgtttaggatccaacaatgcaagtaacagtgctcataaagattatatataacttacttagaatttagggaaaagagaatatttctatattatccacattctaatgggtcccctgagatgagatttcatttttgtcaaagcaaggattttcctgtgggcctggtggtctggcactagcaatgtgaggcttctatttcattttcaggatttgagggagaagggtgctcactgcccagggacctagagcatctcggcctcactctgcccactgcctacccaaccaggctacacagctggggccctgatatgcctcccaaaggggtggaagagaacgttcctgctttctttttcttggtccccctcactgccacctgtcctggcctctaaggaggaagcgcttgcaatttcaggaaaaccctctcatcaccactagagggagaattaggcttattacaatacctgtaagtagctggaagtaatttttaaaaactaaggctgcgtatatagagaatgatgaaaagctggttactgtgctcggtttrtgtgtatgtgattatcagggccatagacaataacacagggtggaggctgtggtctggctctgtagtggtgggggtaggagaggggaggagaacgggaggggaggggaagaagagtgaggcagaccccctcacagtgcccaagacagagacagcagagggagggaggaaggcacctgggctgagtcgccaagtgtcctgagcatgttgtgcctgattctgctgagatgagctaccggcctctcctcactgccccagatgcccttgctgtggagtgatttgccctgtcctgtgggcagtgcttgattcccagctatctaaatgcttcaacctgctctttaagttttaaaaaatttttgcaagatgataaaattaacatttctgataatatttcagatgacacgaaatattttttaaatttattattattattattattattattattattattattattatttgagatggagtctcgctctgttgcccaggctggagtgcagtgacactatctcggctcactgcaacctctgcctcctgggttcaagcaattctcttgcctcagcctcctgaatagccaggactacaggcatgtgccaccatgccccgctaattttttttgtatttttagtagagacgggrtttcaycctgttggccaggctggtctggaactcctgacctcagatgacccacccgccttggcttcccaaagtgttgggattacaggcgtgaacaaccatgcccggccagatgacatgaaatattttagagtaacatttaaaattctgtagtattacttgtaaatgttcactttaataaataatgaaatgcaacatattccttactgaataggtgccccacatttaaaaattcctatcgatcgtgaatatccaatgtgcataaaaatcaacagcaatttatagtttctatggatgattcaatttaaccttctagccaataggtactcaagaaatagagttatactttaagatcagcctaggaaaaacgtaagtggggaagtcattctttgagacatatgccgtataytcattgtcaacatctctcatttatgtacatgttcatacaggtgtagactatctggccaacactctagtctacgttatggctagttaacacrctttaaaagactcatgtatatattacataaatatgcatgtgcatatatatgaagacctaaattaagtrgaaaaaatgaatatgaaattttattttttaaattaacatcttgttaattatagataatttagrcaattctcaaaattaagttccagaaacttatatcccagagcacaagtgtcctgacatgacactaacattctggctcccatctgggaagctaaacagaaaagagttcatatacagtcaggacaaatccgcttccgtgcagttttcaattctttttattctcttctgtgaagaaaaagtcactaaagcatccacactgacaaactagaaaggaaaagtttggtttgtttcacatgctttcttgctggggtcaatggtagtctgcctggaaatgctgctttaaggcagaaagagactgtctgctctccaagcccaaataactatggtgttgagacggcctcactcattgagaaaaccagcttgtcaagtacaagtgtgtgccaattataaaccaaacattttttaaaaaacccaaaactgcagaaccaaaaaaaaaaaaagggaaaactagccggtcatcctgaggcctctccattcaggcactcctgtcagtgtgtgtcacacgggagaggaggctgtccagctcctccctgcacaaaacaagctcagagatgcccaggcattcactgagactcatttactaagaagtcagaatgttgaagacttattagaaagcttagttcttcatgtctgtgttagcctgctgtgcaggagatgaatcagtttgtgttgaccgaggcgtgcaagattgctagagggtcttcaccagtcatcagcgaacatcgctgtccttgcctccaatctgagtgccggcaaagcagaccccctcacaatgctcaagtgcctagacccccagattcccgcctccaagagaagcactgagtcagactcaactattttgaatgagtccactctgcaaaagctaatctcaccttcaacgaaaatgaggtcttggtggtcagggtggaaacaccacgatgcagtcaccatatagaaaacctctagaaggtttgtgccttgaccttcacaggctatcggggtggatccaagggtgtgttgcctgctggttggccctctggtgttgtttacctgccacgttgtctgtagtttaactgggatgggggatggtcttctggcatttaataaaaacataccatgttaatagcagtagcattcttcctatggaatcattcgtattttgtgtttctttctttttagaaaatattttcgggtwttcacgtgtgtggttgggctgtgggtactggggactttctacccatttcatggtacttggataggacaaacttaggctcttcstagagccattgctgccacttatatgtcgcatttttgtgctgtaactccaggtccagaaaggtggaagaggatgaatatgaagattcatcatcaaaccaaaagtgggtcttggctccaaaatcccaagacaccgacgtgactcttattctcaacaagttgctaagagartatgataaaaagctgaggccagatattggaagtgagtgttgttttttgttattctaatagaaaaatatgctgtagtgatatgaagtttttacttttgagtaattgtgaattccaagagtattgcaaagatagtgcagaaaggtttcctgtacttgtcacacaatagataacttagtgtgataccaaaccaggagactgacactggtgccatgcaggaacgtggctctgtgtcattttatcccatgtagacttatgtaatgatccttgcagtcaagatacagaactccttcatcaaccgaaagtggatctcgtatcacctcttgctatccctttactgtcacatctgcttccttcccccaaaatttctaaccattgtcagcctcaaatttgttcaatttgttattttatttttatttatttttttgtcattttgagaatgtcacgtacatggaatcattgaccttttgagactggcttttctttattcagcaaaatgattttgagattcattcaagttgttacatgtgtcagtagtttgttcttttttactgctgaatagttgttcatggtatgagtgtatcacagcttctttagccattcatctgttggggaacattttgattgtttcctgtttttgtctattgcaaataaaatgactgagcacatttatatacaggtttctatgtgagcataagattgtatttttgggataaatacccaggagtacgattgctgggttgtgcgacagcagtatgtttaattgcttaaggaaccgtcaaactgttttccaaagtggatacactatttttcgtttcccccagcaatatctgagagatccagtttctttgtgtcctcaccagcaactggtattttcactattttttattttagctgctctaataggtatatatttaataggttgatacctcattgttgtcttaatttacatttccctaattgttagtgatactgaactcttcttttattttatttatttatttattttgccatcagtatagccttctcattgaattgtcccttcatgttatttgcccttttaaaaattggattatttggtcttattttatttttttactgctgaaattgagagttctctgtatatcctaggtatgatcctttatgtcaaatatgtagtttgcttttcatccttttaatagcatctttcacagaggaaaagtttctaatattgatgaaatccaatttattgattttttttttatggagcatgcttttagagtattgtctaagaattctgcatgaagccctagctcttgaaaattttctcctttgtgttcttctgaaagttttgtaatttcatcctttacattttaatttgttatgtyttgatttttatataaaataaatatgtaagatttagatctaatttcttttccccaccctccatggatgcccaattactccagcaccatttgttggagagactatccttccttgactgaattgcttttatgaagttgtcaaaaatcagctggcttgactggtgtgggttatttctggttctcygtttcgctctgttttatctgtgtgtctgtcactctgtcaatacccacaatttttattaccatagctgtataataaatcttcaaattggatcaagtaattcaacctctttattcctccttttcaacattagctcatcttaacttctaatagttcgtatgcttttcaatatacattttagaatagttttctcygtaactacagaaaaatcctgctgggatttggtaggagtttgttaagtgtagatatcaatctggaaagaactggcatctctactatgttgcatcttccaatccatgcatatgataggtctcttcattatttagatcttctttatgttcttgtatcagtggtttctagttttcaagaggtatgtcctgaatgtattttgttagatttatgactaagtattttgttttttggagcaattgcgaatagtactgtattttaacatttcattttgcctgtgttaatttctaatatacataaatacaattgattttggtatgttgatgtgttctctgacttgctgaacttattagttatagaagtttgggactttttttgtttgtttgttttgtaggttccttggcattttctatgtacaccatcattgtcatctgcaaataaggagagtgttcattcttgctctccaatctgagtatcttttatttattttttcttgcctgttgcactggctagaactcccagcactgtgttgaacagcagtggtgtgaatggacatctctgccttgttctagatcttaggggcaaagccttcagtctttccccataaagtatgatattagctggaggtattttgtacatgttctttatccagttgagaaagttctctctattcctagtattctgatacattaaaaaaaagtttcatgatacttaaaaaaatcatgaatgggctttgaatttcaccaaagacttccttttactgcatcaattggtatgattttatgatttttttctttagtctgtcaatatggtggattatattaattgattttcaaatattgaatcagtattgcattcctggagtaaatcccacttagtcatggtgtttaataatacctccttttgtatattgctgaattctgtttgttaatattttgttaaggatttttgcatgtctatgtttaagggactatttttttgagtcttgggtaatatgagctttatacaatgggttgggacgtactccctcatcttctgttttctagaaaagattatataagggtttgtgttaattctttaaatgtttgatagaattctccagtgataccctctgggccaggagatttcttttctgggagttatttcatttccttaataagtctattcaaattatcactttcatattagggttgtggtggtttttttcaagaaattggtccatttctttaaagttgtcaaatttatatgtttagcattgttcatgatattccctcataatcttttgtgatgtctgtaggacctataataatatccctgcttcatttctgatactggtaacttgtgtcatcttcctttttttgtcagtcttgctagaggtttattttattgacctttttaaagaaccaactttttgtatgatagtttttctgttatttttgttcccaattacatcaattttgcttttatacttattatttcctttatttttcttgctttgggtttattttggttttcttctttttgaagtagaacttagattcttttggccrggtgcggtggctcatgcctgtagtcccagcactttgggaggctaaggcaggmggatcacgaggtcaggagatcaaggccatcctggctaacacggtgaaatcccgtctctactaaaaaatacagaaaaattagccaggcgtggtggcgggcgcctgtaatcccagctactgaggaggctgaggcaggagaatggcgtgaacctgggaggcagatgttgcagtgagctgagatggcgccactgcactccagcctgggccacagagcaagactcctctgtctcaaaaaaaaaaaaaaaaaaaaaaaagaacttagattcttttatttgagactattcttttcttatgtaagaacttttcctttttgtacttctttaatttcatcccatgaattttggtatgttgtattttcattttcattcagttaaatgtattttttaatttcccttgagatttttttctttaactcatgaattatttagaagcctgttttgtaggggaacagcagacactggggtctatctgagggtggagggtgggaggagggaaaggatcagcaaatataactaatggatactaggctaattacctgggtgatgaaataatctgtacaacaaatttccatgacatgagtttatctatataagaaacctgcacatgtacccctgaagttaaaataaaagttttttaaaaaaacaagcttggtttcatagagaactttcatcccaacaaggacatgatttttcaactgaraaacattcccaaattttactcttgaagagggagattaaccattgtgttttaggttttgaaatggaattgtttccaaattttggcttttgtgaataaaactgctgtgagcatttctgtacaaaaaaagagagtgtgcttttagtttccaagtacttgcacatattcctattatatgttacggatttctagcctgattccactatgatcagagaatatactctatatgagtttaattcttttaaatatgttaatgtttgatttaccatccaggatatggtctatcttggcaaatgctccacggtcttgaaaagagtatgtatcctgtcatcaatggatggactggatcctgttgtctgatagtgttgtccagttctatatccttgcctattttctgtctagttttctattgattatttgaatagattgacaattgatagattaaaaagtagattctgacccaagagaggagtggtatatttggccaggagggaagtggcacatacaattgctggtacaggcatgcactggccttgtggtgacagtaaggggaagtggggattgcagcagacgcaccgtcggcaggatgtgcctgaccgtggcttgcttcttctccttcaggaggctccactgcctgatagcttcctagcactcacactgcccaggcacactgtccctccatttttccaagcccaggactccagcatgtctgtagcaggacctagaactatgctgattccagtagccatcgaatttcaaaatccatgtgtgtagtgtgggagactttgaagatgcgtgtctagtgcagcgttggagaaatcatatcacccttcatgcctcagttgcctctcctatgcaatgaaagagagggactaaaatgactcttaacttttccttccagctttaaaatatttcttcagtgagtgatatatctaaattaccattgcacaagttcacaaattcaattgtcaccacagtgtttgcatcctaattagatagaaaatctttctagtgtgaagagtgtgcagcaattctgcatttatatagaaagagatgctttagaatatgttactaatttcctccttgattgtcagacactggtcagtcagagagcaaagatacccaagactggttccttgctcctctggataagctaagtccagttggaagttcatgtatcctgtggtaggctacagtgaagcaccttcctcatggtgtcactgggcaccacatggatcccctgaggtagaaaattgcaaatggggagacagtgggtgagcttggcttccaacccagatctctctggctctatagcaagatgatttgaccattgcactatttgtagaaaactcaaggcaagcctattcaaaaatattcctcacaccccaacaatgcagcrcttgcaagaagatatattaaggtgctgccatgtgcaataggcaagcaaaattcacaattctagagatttttccactgtgtacacaaggaattgtgaatttcccaaataaaacagcatatgtacacaccaagaacaagtgttcatttcaaagaaggcaactcccctaaagcatcctgtcatttagtcctcataagtcatcatcacatgtgagaacatgctctgtgctttgtgagtgaaaagatttttaacaaacaactaaacataaagttatgaggtaggatgctcctctttggttttgtgactttaacgttccaccatgatcatcatctggtccctggggcagcagagggggctgatgaaagcacccatgatccctgggacaaattaggacttgtctgcctgtctcatttaaatgctaaatcacgtatcattggcagaacccagcaacttgatgatattcaatcagaaaacagagtcactacccaagaacagctctcccggtaaaagatactgaattagaaaccattttctttcatggctcagaagggctctgctttaaaagagaacttcctataaacatctgaatcccttttcttttctcatgacttttttttttttcaaatctagccaatttcatttgctataaccatcrggccttctcatcccttatcaaggtgcagtgaacttatatgtacataatgtgctgtacrtggatttactattagtttgtgggagaggccagctcattgctcacttcctttacacccccgaccctggtacaccctgggagcccccgggaggctctccacacttgcgatcttctgatggcgagagacaaagaaggggactctccagatagcacttcggagtagataggggcactcccactttggtctaaattaacctgtttaatttgaaactcttgaaagttgcacttygcttctcagataaagaccaagycccttaaaaatgacattaagatggaaggctgaggcaggaagattgcttgagcccaggagtttgagaccagtctgagcaacataagagaccttgtttctacaaaaataatagtaaaaaatagtcaggtgtggtggcacatgcctgtggtcccagctactcaggaggctgaggcaggaggatggcttgagtccaggagttcaaggctgtagtgagctatgactgtgccactgcactccagcctggtagatggtgcaagaacctgtctctaaaaggaaaataattttaaaaagacataaagagacaaacctcaagcctcaaactattatctgtttcttttctacttctccactaccatttgctgactctgtgaatcacgtgccgggtacttcagggacactagacctcctgttttcttcttctggacccttgattttgctgctgtcctggcccgtttttcccccgtctgtgctgagctcaccatgcctgtcttcgagcctcgttgtcgccccctacaggaagccctccctcatttcgtgtcccttccccacctccccactgtggtggtgagtttcttctagcatcagttttttcatctttgaaacaatgataatacattttgaaggcctgtcttgaggataatgtggtatggtgtgacatgaacagtttctacagcattgttgtgtactttccacattgtacagctgaggactggtctttttttttccctctagggcgctgtttccaattcctaactatagaggcatccatgtatgttggcatctcccaacatacgtggtccaactgcagcagggcgatccatcatcaggaaacaattgtgcatcactgttatttttaacaacaaatagatggratttaatagactcgttcgttcatgttgcgtggaagtaacaaatctgcatggaatcctctaattagttttcataatacaaattgtgatcattatgttttaaaaataatgactcctctcctagacattatttcttctcaactaacttctaaattatggatatatctgttttagttcccttctttatccatccttttaagtaatgcttcagccctgtccttagctggttcagggtgatgtagggtgtcatttwtcttggaacagatcttgtcatgtgagctgggaaaggctggaggaggataaaccttttaagaaaaatcacgaaaaggaagagaaatggcctaagtaaatttcacttccttcagggtttyaagaaacttaaaccactctactgaaarcagatgattagagaatacagattccctccccagtatgtgggcaatcaatctgtgccaaatatggtcatgctgggaaaaayagaaggttacatattggcttttaaargtgaatagacactctgtggagtcctgggcaacgctgactgatgggttcactgaatccaggcaaaacatctgaatcaycttgtcttggccgtatcaatggctagagggcttcttcaagtgtttgcatatctgaacttctgttccaggcttttctaaaatgtattttcccagttcagttgaaacttctgctaaatatggaataagaatattcagtatgtgctgaagctggttgcatggtgaggaggtgaggtgtgttatggctgcagcccatggcaggagatcccagcctcctcctctgccagggctgcccacacaccccacctgggcaggaatgctggaggaaggtgccaccagggcttgctttcttccagctttccaggctggacatgacaccgggcactgactcaggatggctgagatgatgcagacaactccttgctgggcagcgcgagaggaatccctgcccgttcctggatgaggaagtgaaaacagaaaatgactgtagagtggggctgtgtcccccaaataggtcaggagttagttttgttgcagatactaggttttaaaacaactaaaagcaataaaatatgggccttgaattataatttttaaatgagtcttcttatgcagctccttgatgtctttcagtgaaaaattataagcacagttgagttgccttagaactctaggctggaagctgagggagcactggtcacagatgggccacctccaagaggattggattagccagtggaaagcagacgaagccccccacttgcatttttctgagctggtcttggtgttaatggaataacctcgccatgccccgccacaggttttgagagattatgttggaacgccctgtttaagtgaawtttggagtgtatgaagggccgtacaaagaaccagatgtatgattaagatactatgattgataatgaaggcatacaatagtccttcatcctgattgtttccgtattttaagaaaaataggagacacaatgttttaatccaaaggagtaaagtacaaatgccacagtgtaggtgaaggaagtgggagttggaggtagagtgtgagatattttggggtccctcgatccactgtgtcctgatgactcaccatctaggtgccccaggctggtggctgcctgccggaccacccctctgactcaatgaatcaaaccaaccttttccttctccatgcacatctggtaactgtgttagctgttcatgtagttcagcctggccagtcctcacctgaaatccacagcccaccgtgcatacaaatgacttgtcatttaccagcaattactgtatatccagaaaataattcaaatgtattcactccactctcggaacagatgtaggaggagaggaaacagacattcttaattgctgtgcttgaagtaaaagctattactgtagagttagttaactgattctctcacaaagttaattcaaatgcataagggaggtggagaataaattttgtagagaaattatacctgtcatctccaggagagactaagtagacatccaaaggccgccgagttcagacctcagcttaacacacgttggcggctgaactttccccacctcttcctcaccactttgggcagctgacccttcgcacacacacctgagcacctaggattgcaccatgccacccctatcgaggtaaagctccgtgtgagacagtgctgtgttggagcccactcatgcacttcacagttcattaaaaatatgtgctggatttcaaaaatagggaatatataatgtggtttcagcatctaagtattttattttttcttatatgctgtttggcaaataactcaggtgacatgtcctgaggtataatctagtgctggtcttgatttgaatattcagctcagttcatagaataacaaatgatctgtttcttatgtttattcattactgctccaggaattgagcaatgtggattagaaagtgtttgagtgagaaaagatctggactcacataatgagttmtcccaccagttaccagcaggtttcagagtgaaagagacrgcctcactggaccgtgggtttctgtctctaaacgaaataattaaacctatattccaagtcctgctgtaagaattacaggtaatgcactttggaaggccaaggtgggcggatcacgaggtcaggagattgagaccatcctggctaacatggtgaaaccccatctctactaaaaatacaaaaaaattagctgggagtggtggcaggtgcctgtagtctcagctactcgggaggctgaggcgggagaatggcgtgagcccgggaggcggagcttgcagtgagccgagatcacaccataattcataagatggcagggggcatcaggtgccttccatacttcccagctccacacagtgcttcggcttctgtttcgggttggtttatgagtaccggaatagagcccttagacaactttactgtcgtaaatgctttgccttacattgaactttcagttcagckgtctgcatttcatcactctgtaattaacatccatatccaagacatcttacagatcctcttatgaagtattactgtgcctatactgatcagattatcgttctcataatccataattcaaggaccaatgtaaacgcaagatcatagtttcctaggatatcatggtttgaagggattctaaaggacatctaatccaacagttcacaaacctggcattacgtcagaaccgccggaagagctggaagtcagagcccaacctcaagaattactgaatcggaatagttattccgttttctagttccttgatttccattttgataaccgttctgcttactttgtgtttcatgtgttgtttttctagttttgaggtggaagacgaaggcattgatttgagacgttcttttctaattttcatatttagtgtcattaatttcctcctgtgtattactttattagcatcctatagatttcagtgttttaatttcacttacattcaataaaaaacagctcctaatttcctttttgatttcttctttgaccaatgtagtatttagtgtggtatttatttttcaaatatttgaggttattccagatatcattcagttattgatttctaatttaatttcactgtgcttaaagaacatactctgaataacataaatccttttaagcttattgagagctgttttatggcacagaatatggtctctcatgctgtgtacttggaaagaatgtatattctgctgttgttagatgcagttgtttcataaattagacaaattaggtgaagttggtttatacttttgttaaagtctacttgctgcttttctatctatttctattaatcaagagtgaaatcttgatatttctagcaataactgtagctgtatttttctttagttctatcagtgtttgagtcatgaattttgaagcattattaccaggggtaaatgcatttaggatttttatgttttcttaattaattaaccactttatcattgtataatgaacgtctttatacctagcaacattctttgctatgaaatctactttgtcaggtgttaaaatagccacttcagcttttctttgactagtgttagtatggtatatacgtctttccatccttttacttttaacctatgtttgtctttgtgtttaaaatgtgtttcttgtagatgacatataggtgaatcttgcctttaawaaaaaagcccaatctaacaatctctgcctttaaattggagtctttagaccatttatatttactgttgctattgatgcagtttgatttcagtttatgatctttttatttttctttctttttttgctcctttcccctctttttatgattgtcttcctttattttcctaattagccgtaactacaattttatattgttattttagtggttgcattaaagatttatagtattgtatacatttttaacttatcacagtctaccttcaattaatattataccctttcagcatggctgaaaatatttttattttgcctgtgtgaaaacatcttcattgaaatatgattcatataccataaaattcatccaattatagtgtacagtccaatggctttcagtatattcacaatattgtgcagccataatttaggtttagaacatcttcatctstgcaaaaaggagaaagctactcactcaggggtagtcactccacattatccttgccactcttctttgagcccttggtaaccaatagtctaatttcyatcactatgaatttgcctgtaatgtacctttgatataaatggaaccgttagaataggtgactggtttcttgaatgttttcaaggtttatcaatgtgatagcatgtatcagtacttctttcatcttattcttagttgccaaatcatattctatgtttgtgttttgtttgtctcttcatcagttgatactgataacattaaacaggcattttgattgtttttcaatagtggatattctaaataatgatgctatgaatatatgtatataagttttacatggataaatrttttgatttttcttagatatacatgtaagagtggaattgctggatgatttagtttttgaccgattttattcaacttttttattgttaacttttgtgggtatatagtaggtatttatgcttatgaggtacatgagacattttggtacaagcatgcaatgcataataatcacatcgaggaaaattgggtatccattgcctcaagtgtttttttatgttacaaacaattcagctatatgcttttaattattttaaaatgtacaattaaattatttttgactatagttcccctcttgtgctatcaaatactaggtcttgttcattctttctaactattcttttatattcattaactgtccccaccttcccctcctcctcaccacccttcccagcctctgataaccatccttctagtctctatgtccatgacttcaattgttttgattttagatcccacaaataagtgagaacatccaatgtttgtctttctgtgcctggcttatttcacctaatgatctccagttctatctatggcattgcaaatgacaggatctcattttttaatagctgaatagtattacattatgtatatgtgctgcattttctttatccattcatctgttcatggacacttaggttgcttccaaatcttggctattgtgaacagtgctgcaatgaacatcagaatgaagatatctcttccatatactaatttcctttattttgggtatatacccagcagtggaattgctggatcatatggcagctttgtttatagttttttgaaacacttccaaaatgttctctgtagtgatttattawtctacatttccaccaacagtgtacaagggttcccttttctccacatccttgccagcatttgttattgcttgacttttggataaaagccattttaactggggtgagaggatatctcatagttttgatttgcatttctctgattatcagtgatgttgagcatcttctcatatgcctgtttgccatttgtatatcttcttttgagaaatatctattagaatcttttgcccatttaaaaatcagattattagattttttttcctataatgtttgtgtgagctcattatatattctggctattaatctcttgtcagatggatagtttgcaaatattttctcccatctgtgagttgtctctttactttgttctttgttgattgtttgctttgctatgcagaagctttttaatgtgacgtgatctcatttggccatttttgttttggttgccttgcttgtgggctattactcaggaaatttttgctcagaccagtgtcctagagagtttccccagtgttttcttgtagtacttgtagtagttccatattttaaggtctcggattgaaacctttaatccattttgattttttttttttttttttaagacagagtcttgctctgtcatccaggctgaagtgcagtggtgcaatctcggctcattgaaacctccgcctcctgggttcaagtgattcttttgcctcagcctcctgagtagctgggactacaggcatgcgccaccagacctggctaacttttgtattttcaatagagatgggatttcaccatgttggccaagctgttcttgaactcctgacctcgtgatccactcgccttggcctcccaaagtgctgttattacgtgatgtgatttttgttaaggcaagtgatggggccaagtttcattcttctgcatatgaatatcgagttttcctagcaccatttattgaagacattctttcccaccagtgtcttatattctcagcacctttgtcaaaaatgagttcactgtaggtgtatggatttgtttccaggtcctctattctgttccattggtttatgtgtctgttttttatgccactgccatgctgtttttgttactatagccttgtaatgtaatttgaagtcaggtaatatgattcgttcaatttttttttttcccccaggatagctttgactattttgggtcttctgtgattccatatacattttaggatagttttttaaaattttattttggtgaaaactgtcattggtattttgatagggattgcattcaatttatagattgctttgggtagtatagacattttaacaatatttattcttccaatccatgaacataaaatatctttccattttttgatatcctcttcaattttttcatcagtgtttcatagtttttattacagagatctttcacatctttggttaattcctgggtatttaattttatgtgtagctattgtaaatgggattacttttaatatttcttttcttttctttctttctttttttttctgagacggagtcttgctctttcacccaggctggggtgcagtggcatgatctcggctcactgcaacctccacctcccgggttcatgccattctccagcctcagcctcctgagtagctgggactacaggtgcccgccaccatgcccagctaattttttgtatttttagtagagatggggtttcaccgtgttagccaggatggtcttgatctcctgacctcgtgatcctcctgccttggcctcccaaagtgctgggattaaggcatgagccactgcgcccagcctaaaatttcttttttatattgttcacttggcatatagagatgtgactgatttttgtatgtcaaactgtatcctgcaacttaactaaatttgtcagttctaatagttttcttgtggaatctttagtttcttccaaatataagatcatatcatctttacaccaggataatttgatgacttcttttccaatttggatgtttttatttctttctcttctctgattgctttaggtaggacttcaaatactatgtagaataacagtggtgtaagtaggcatccttgtcatgttccagatcttagaggaaaggctttcagttttttcccattcaatatgatactagctgtgggtctgtcatatacagcttttattgtgttgagatatgttccttctacacccagttttttgagggttatcatgtagtgatattaaactttatcaaatgctttttcagcatgaagtgatcatatgttttttgtcctttgttctgtcgatatatcacattgattgatttgtgtatgttgaacccttcttgcattcctggaagaaatcccacttggacatgatgagtgatcttctaaattcattgttgaattctgtttgtttgtattttgttgagtatttttgcatcaatatccatcagagatattggcctgtagttttcttttttttgatgtgtctttatttggttttggtatcaaggtaatattgacttcatagaatgaatttggaagtatcccctctatttttaggaacagtttgagtaggattgctattagttatttaaatatttggtagaattcagcagtaaagacatcagttcccaggcttttatttactggggaaatttttattatggctttgatcttattactttttattggtctgttcaggttttggatttcttcatggttcaatcttggtaggttgtatgtatcatctaggaatttattcatttcttctagattttcaaatttattcacatatagttgatcatagcagccactaatgatcctttaaatttctgctgtatcagttgtaatgtctcccttcatttccaatgttacttatttgggtcatctctctttttttcttagtctggctaaaggtttgtcaattttgtttatcttttcaaaaaaaccaactttttgtttcattgatcttttgcattattttcacttcaaattcttttatatctgctctgatctttattatttcttttcttctactcattttgagtttggtttgctcttgattttctagttctttagagatacatcactaggttacgtatttgaagtttttctttttctatgtaggcacttacagctataaatttccctcttagtactaattttgctgtttcccatagactttggtatgttgtgtttccattatcatttgattcaagaagtttttcaattttcttcttaatttcctcattgacccactagtctttcagggccatattgtttcatttccatttgttcatatagttttcaaaattcctcttgttattatagttttatttcattgcagttagaaaacatgtttgatagtattttaatttttttgactgttttaagacatgttttgtgacataacatatggtatacccttgagtatgatccatgtgttgaggagaaaaatgtgttttctgcagcccttgaatgcagtgttctgtgaatatctatcaggtccatttgttctatagtgcagattaagatgagtgtttctttgttgattttctgtctgggagatctttcaagtgttgaaagtggggcattgaagtctccagctattattgtgctattgtctgtttctctctttagctctaataatatttgctatatatatatatctgtgtgctccagtgttgggtgcatatatatttaaaattattatatcctcttgccgaattgaaccctttatcattgataatgatcctttttgtctcttcccatagtttttgtcttgaaatctgtttcgtctgatatagctaccccttctgctttttaggtttccattggcatggaatatcttttcccatccctttattttcagtctatatgcatctttataggtgaagtgtgtttcttgtaggcaacagatcagatcattgggtctttttttcccatccattcagccctccatgtcttttgattggaaagtttagtccatttacattcaatgtgattattgctaagtagggacttacttatgctgttttgttacagatattctcggttttttgcagtcttcctttccttcctgtatttcttttagtgagtgtggttttctctggtggtttgctttaatttctttctattctttgtgtatacgttttatgttttttgatttgaggttcccatgaggcttgcaaatactctataactcattatttgaaactgatgataactcaccactgatagtaaaaaaaaatgcatgcaaaaggaaaactaataaaaactctacactttaaatttgcccactttctaacttttgtttctctttatatcttattgtactgtctatgtcttcaaaggttgtagttattattatttattggttcatcatttattctttctatttaagagcaagagtggtttccacatcacagttagtgttatactattctgtgtttttctgggtgcttgctattatcagtgagttttgtacctttaaatggtgtcttcttgctcattgtttgagtgtgttcttcattttccacacttttgttaatttaccacatttccttctgttattgatttctaatataactacattgtggttggagaatagacttcacatgatttcagtcttttaaaatttattgaggcttgttttatggcttagcataagccatgctccgtcccctaaaatgttctatgtgcacttaagaaaaatgtttattctgctgttattggatggagtgttctatagaagtctggtaagtctcatcattttatagttttgttaaatccgttttcttgttgatcttctgtctaattgctctattactgaaagtggagaattaaggtccaattattgcacattgaattatctgtttcccctttcaattatgtcagctttttctttaggttattttaggctgagttgttaggtacataaatatttacatttattatatgtcccaatacataggctgtttatcaatatgaaatatttctctttattttctagtagcattttcagtttaaggtgtattttatctaatgttagtatagctactttgtatcttttatgtttggtgtttgcattgtatacctttttccatcttttgcattttaaactgtttgtatctttgaatttagaatgtgtctcccctagacaacatggtgttggatcttgtttttatgcccattctcataatttctgcccattatattgtttaatcaatttatcttgaatattattgctaatatggttagacttaatctgatgttttgcttttttttctctatgtgtctcaaatctttttgttcctctttttctcgtttaatatcttttttttttttgttaagtggatattttctagtagaagattttggtttaatgattaaaagctgttttggaatcagcaagagaagcctgtaacagtaggcttgtcattagcaagcctacggcaatatacatgtcattgaaatttttgctactcttaacaatatatatctgagattatacaaacttaattccaattgaacatagaaatttactctagatacctctgttaattcaccctttttatactgtcatacatattacatctcaatatattacaaacctaaaaatttattttcacattagttgtacaaccttatgtcttttttatatgcaccatttaaataacatatttatttatcatttatgatgtatcatgtcttcctgtgaattagagttaccatctggggtcattatctgctccaatgcagctgtattcctactcacgtccttgtgccgttattattaaatatgttgcttgtcttttgttattgttagatatatgtagttaaatatattttattattgttaaatatattacttgttataggcccaacaatgtaattatatatgtacttttttatgcaattgccttttaagttagttgagaagatttatrcaattatattatcttttatgacaatctatgtaattatctttattagggctttttgttttttttgtttaaatttggatttttgtttgtggtcactggctttcagcataaagaacttccttagtgtttcttgtaatgcaggtgcattagcaacacattctctgtctcctttcttgttttttaatgtgggaattttatgtttacttttcagagatagtctttttatattaatcactttgaatatgcagtcacattgtcttctggcttccatcgttttggtaataagtcagttgagcctctcttgtatgtcataaattgtttttctcttgcggcttccaagattttctctctgtgtttcaacattttgactatgttgtatctgggtatgaattcctttgtgtttttcttcccttggaatttctgaccctttaacctccttcctctggtagtccaattatgtatatactggcttatttatttatttatttatttatttattttattttaattttttttgagacagagtcttgctcagtcacccaggctggagtgcagtggctcaatctcygctcactgcaagctccgcctcctgggttcatgccattctcctgcctcagcctcccgagtagctgggactacaggcccctgccaccacgcccagctaatgtttttgtatttttttagtagagacggggtttcaccrtgttagccaggatggttgcaatctcctgaactcgtgatcagccctcctcggcctcccaaagtgctgggattacaggtgtgagccaccacgcccggcctatactggtgtatttaatagcaccacacatctctctgaatctctgttagtttttcatcattcctttttctctgtgtttcagatttcactttttctattgatttatccacaagtttgatgatcctttcttctgccagctcaaatctactgttgaatgtctcctgtgaatttttcattttgattattgtactttttcgttctggaatttctatttggttcctcatattatttctatctctttaatgatattatctgtttcataagattttgttatcatatattcatttaattctttagatatggtttccttgagttctttgaacccatttaatttgtaatggctcttttgacatctttattaagggcaacatctgggacccctcaagagtagtttctattgcctgctgttctttttttcctgtgtatgaatcgtacttacccatttatttgcatttctcatatttcaaaaaaactttgacatttgaaaaaatatataacaactctagataataattccccacccttccaacatttacattgattttgtttgcttgttcctttatttgtttagtaacttacctgtattaatcccaagaagtctacttcccccagagaaggcaacttcagatgtatttgctcaaatttcttcctccttatattcattttttagcccagctacctagtgttgcctcttgcctaggtcagcattatcttctgcttattgaccaatgtttgtccataagtcattttagacagttagatttttctctttatcaatggatatctgtgtgtctttgagtytgttatcacaatttaggaattttacattttgtcccatgttcagctagggactagtagcttggatttttcctccttctaattcctgatatattacagccttagttatgtatagtctctcagatcatgagagatgcaagtaattttatttaaagcctagttcccttaggaattgcctctgggtcagggtaacttattgttcatccagtatttggtcagcagttgtgtttaagccctagtgagatttacaatctttattgatgtatttgtggcttgggaaatgttttcagcctaccttgtgtttttctccaattgctcctgggtgagtataacttagtgcctgtgcacagaatttctgatgcccagtgttgactgtgattccaggagagctttttgtgattgcttctttctctggttctgtctgttaaatttctggttactctactgctttgttttttgttactagtattgtaaatctaagagcggcttcttgattgctctccatcaagagctttgttgttttcaacaacacatttaggcatggaattctccacactttgttccaaatgatgccatcctccttgtccagagttcttaatccttatggcattcttcttcttctgggcagaatccccatgccagtatataatgccagggcctgggacagcagcccaatactcccagagtgatatctctgctgcacaacaggcattggggtggtgctggtggcaacccctgatcttggcttgttctttctggcatggaacccccactcttcaagtaaacaaggtgagagcacctggaataaactccccctaactatgaggaaggccttggtggagaaaaggaatatcagttctctggaccatgcctggctggaatagaacttctgaaaaatggggctggagagagtgagaaacactggtgaccatccccttctagagtgaaatcattatcttacactcagagagcccagagaaatgggaggctttgctgtgttgacctaacttacccagcatagagtatcagattcgagttttataaaacgaatctagggtggaggaagaggccacaggctctcattgtcctcacaatgatttagtaaagttttttgattgaatgtttcttcctttgctgtatacccttaaaacaatttccagggattttaaatgctttaaaaaataatgtttttccgttaaatgggtctttatttaaaagagagctgccatgctcctcattttgccattctggaattcctatcccttgcctttgtttttgatgtggaattctgggttaaccacttttttgacctgtcagttggcccttccttatccatgggttctgcatccatggattaaaccaaccatgggtagaaaatatttgaaaaaaaaaaaacacaatgaaaaataacaatatacaataaaaataatacaaacaaaaaagcaatagaatgtagtgactatttacatagcatttacattgtattaggtattataagtaatctagaaataatttatataatggatggtatgcataggttatattcagataccatgtcattttayatatgagacttaagaactcatggattttgatatagacagaatataggggttcaggaaccaatcccctgccaataccaaaggatggttatactttaaggacattgaaatccactgtatttcacctgcattgtttctgatgaagaatctgcggtcatagtttcctttgttcctttgtgtttcatgtgtttttcccccctgtgaattattttaagttcttctccttactactgggtttgagcattttgattataatgtgccttagggtagtattcttggtattttccctaagtatgaaaaatacttagggatcttgagctacttagatttttggcttcgtacttttcattaaatgttaaaaatttcaatcattatttcctcaaatgtatatttttctggttcttccatctgtttcctctttaaaggccccaattgcacatattttgtggtgtctgaagttgatctacagcttgttgatgctctttcctttaaatatttttcttttatttaagttttattttagattttattgctgtatcttcaagttcactattcttttctactgtgatgtctaacctacagttaatcttttctagtattatttttaatctcagatatcttagtttttatctctagaagtttgatttaggtcttgtttatatcttttcatgtctctactatttgaatatccctgtttttaaaattttttcaacatatggaatacagttaatgactctaattatctttgcttctaattctaatatttgcttcatgtctgttttgctaatctaattctagcatttgtatcagcctggttgaattttgattgattattcttctcattatgattgtgtttttccagcttctttgcatgcctactaatctttgttgacatttcagacactgtgaattttatcttgttgactgcttgatattttcatattcctatagatattcttgagtatcattttggtgtatagttgagttagttggaagcagcttgattctttgaatcttgtggtttaggtttgttagacagatctggagaagtgttctggcagactctagggctaattactccccactactgagtcaagattttcctgagtactctacccaaagctggtatgccttggttctgtatctccacccaaatctcatattcaattgtaattcccagtgttggaggtggtgcctgatggaggtgaatggatcatggggacagttgctcatgaatggtttaacactatccccatttgtactgctgttgtgatagtgagtgtgttctcatgtgatccggttgtttaccagtgtgtatcgcctccccccaccaccaccttgctcctgctctggccatgtgacagtgcttgctccccctttgccttcttccatgattgtaagtttcctgagacttccttagaagctgagcagatgccagcaccatgcttccagtacagcctgcagaaccgttaaaccattaaacgtttaaccatgagccagttgaacctcttttcttcataaattgtccagtctcagatatttctttatagcaatgcaagaatggactaatataaaagccctgtgaattttgactatttccactctagctgttgggaacagatcctgttcccagtcatatggggagactggaaaccattcttcatccttatggatggtttttggatggttacaagtagtcttctcacacacatgcactggttacccaagcgaggacctttacaggtctccatgtcacgagccataggctagaaactctttcaaggccctaagctggggcaattctagggataattttgcatgtttgcagcctcagtgaccaccgtccttcattgcctgatatagattgtcttgaaaaacattgtttcatatagtttgtctgatttttgattgtttcaagtgaaaaagtaaacccagttccagttacttcaccttgaatgtagagcagaagtgttcttccttctggctgagtttgatgtcacaagcrattcttgcctttcctgtcacccctctgaggcccaggtgggccagtggagccactgagcaccrtccagccagtcctccaactgtctgtagacacattaggtgtgtccaacccagctgactcccgcacacaatgccactccacacaatcatcagttgttggccaatgatggctgcttctctgcaggttagcatttgtggatgttgaatttcttctagacactgagtttgaggaactacttcttagattgggagtagcaggaggacttacttgctttagctatggtttcactgggatactctttattaggtcgtgtttgtcacagggcagggatgtgcagttgttaggaggataggtagagtcatattagctttgtgctcaccmctgttatgtttccaaacaagccactgctaggttgtggaaagaatggaaataatgaggtcatatgacctttctccagtggtttgtttcctccaaggcagtccttgaatctggattaatcaattgaccactggctgattttaggaagagatggcagaaggggacttttyttkaagagaggttcccataactcagtttttttttttttttttttttttttttttaagatatggtcagtgcaaactagagtgtttagggattgtttgggtattatgatgtagatgaagatatagtgtgataactactgtatgtgtggttatataaattttaaagtgattacataggaaaccatttttacctgagtcaaccacaacagtgagaagcttcaacttttaaaatattcctaccagtaaactcaaccttcttccaacaacaaatagacttcaaaaatagtcagcattttactaaactatttaaaactttccagccattacatcactcattgtataactgtaatacaatttgctgaaggctgctgactgaactcgcactcgaaggacacacagtagtgttttctgtcagggctcactggcccacagggggattttccagtgttgtccaggacaccaattcagtgcctgaatcatccacactttcctggcagcaagctatccttcaaagatagcacttcctccctcagcatgsattctgatttcacaaatagttttagaaattttagcagtgggctcatggtggtatttgtctaaactatttaacattttctctcagcattttaatttgttaaatatcttaatgaagccattctacttttagtgcagcatttcatttttttctttagatattatttttatttttaagctaagaaatttatgctgtaaaaatgtgggatgtgcggaatagtataaaaactagaaataaaagccatgcagctggacatggggctcatgtctatcatctcagcactttgggaggccagggcagtaggattgcttaaggccaggagtttgagagcagcctgggaaacatagtgagaccgtgtctctcaaaaaaaaaaaaaaaaaaaaagaaaggaaggaaggaaggaaggaaagaaggaaagagagaaagagagaaagagagaaatagctagatctggtggtgtgtgcctgtggtcccagctacttgggaggctgaggtgggaggattgcctgagcccaggagtttgaggttacagtgagctacgattgcatcactgtattccagcctgggtaacagaatgagaccctgactcgaaaattaaataaaataaaatacaataaataaacaaaacaaaacaaaaaccatatgcccctatccagaaactatcacatgtgaatatttaaatatgttttcttcaagcttctattacatttataaattacagaatttggtttttctcacatagccttatatcgttggtattcaagtatcatgaaatagtttttatttttttattttttattttttttaattttgtatttttattttatatttatttatttatttatttatttatttattttttattgatcattcttgggtgtttctcgcagagggggatttggcagggtcataggacaatagtggagggaaggtcagcagataaacaagtgaacaaaggtctctggttttcctaggcagaggtccctgcggccttccgcagtgtttgtgtccctgggtacttgagattagggagtggtgatgactcttaacgagcatgctgccttcaagcatctgtttaacaaagcacatcttgcaccgcccttaatccatttaaccctgagtggacacagcacatgtttcagagagcacagggctgggggtaaggtcacagatcaacaggatcccaaggcagaagaatttttcttagtacagaacaaaatgaaaagtctgccatgtatacttctttctacacagacatggcaaccatccgatttctcaatcttttccccacctttcccccctttctattccacaaaaccgccattgtcatcatggcctgttctcaatgagctgttgggtacacctcccagacggggtggtggcctggcagaggggctcctcacttcccagtaggggcggctgggcagaggcgcccctcacctccaggacggggtggctggccgggcggggggggctgacccccccacctccctcccggacggggcggctggccgggcagaggggctcctcacttcccagtaggggcggccgggcagaggcgcccctcacctcctggacggggcggctggccgggcggggggctgaccccccacctccctcccggacggggcggctgtccgggcggggggctgaacccccaactccctcccggacggggcggctgacccggcggggggctggcccccctacctccctcccggacggggcggctggccgggcggggggctgacccccccacctccctcccggacggggtggctgccgggcggagaggctcctcacttcccagacggggtggctgccgggcggaggggctcctcacttctcagatggggcagttgccaggcagaaggtctcctcacttctcagacggggcggccgggcagagacgctcctcacatcccagacggggtggcggggcagaggcggtccccacatctcagacgatgggcggccgggcagagacgctcctcacttcctggatgtgatggcggccgggaagaggcgctcctcacttcctagatgggatggcggccgggcagagacgctccccactttccggactgggcagccaggcagaggggctcctcacatcccagacgatgggcggtcaggcagagacactcctcacttcccagacggggtggcggccgggcagaggctgcaatcttggcattttgggaggccaaggcaggcggctgggaggtggaggttgtagccagccgagatcacgccactgcactccagcctgggcaccattgagcactccatgaaatagtttttaaactgcatcttgattgttttatgtttcccagttgtcggacatttatttggtcttaaaattttcattatgataaacaacaccaatgcagaaattttttacctgcattcgacatttgtattagttacatattgctgtaaaataaaccgccttaagattcactggcctacgactgatgactgtgtggactggcattgtgagcgggagtcagctgggctggacatacctaatatgtctacaggcagttggaggactggctggatggtgcccagtggctccattggcccatctgggcctcagcggggtgactggaaaggcaagaatagctgggcccctccgggtggtcatgcaaagatagcattttattttattttattctattttatttttctgtaagttattgggggtacaggtggtataacagttttagaaattttctagcaggatcatggcagtatttgtctaaactatttaacattttccctcaatatttaaattgttaaatatcttattttattttatttatttatttatttttgagatggagtctctctctgtygccaggctggagtgcrgtggtgcaatctcggctcactgcaacctccgcctcccgggttcaagcaattcttctgcctcagcctcccgagtagctgggactacaggagcaggccaccacgcccagctttaaattgttaaatatcttaatgaagcagtgtgctttgagtgcagcatttcatttttttctttagatattatttttatttttaagttaaaaagaaattgtgagaccttgaacaaacttttgagtcaattactrtataggaaacaaaatcatgttatcctyttttaccctttctcttattcgttgtgctcaagcctctgatctagaactggaagaagcttcagctctagccacgttgctgcaaaggacagaatttcactcttttaattttgagacaggggcttgctctgtctcaaggtgtctagtgtgagcttattcatataggagcagtcggaatttggatgagactagaagcaagtcttgttcagaattcatacagcatcacttttatgatattctrttagtcaaagcaagctgcaagtctgacctagatcaagtagagtctacccttggtggtagagtttgtggccaatttcaatttaccatgacagtttttccctaatttgtacctttgraagtggaactacttgtccaaaggatgcaaactttccataaaaattaacttgatatatatgttcaccagcagtgcatcagagtgaccatctcaaaatcttaccagccttttaccagttctaggcaaagctttgaatgtaatgaataagagaaagggtaaatgagaataacatcatttgatcttgtatatagttattgactctcatctggaccagtgtttgtggactttatctagacatatattttctcaaagcaaaatctggaaaaagtttcttcaataaaacttttttttacattcctagttttttttttgtcttccaactttttttgtttgtttgtttttgagacagggtctcgctttgtcgtctgggttggagtggagtggcgctatctaggctcattgcaacctctgcctcctgggttcaagcaattctcgtgactcagcctcccgagtagctgggactacaggtgcccgccaccatgcctggctaatttttgtatttttagcagagatggggtctcaccatgttgccaggctggtctcaaactcttgggctcaagtgatctgcccaccttggcctcccaaagtgctgggattacaggcgtgagccactgtgcccggccctcttccaacttttattttagcttcaggggtacagatgtaggtttgtcatataggtaaatttcatgtcatggggatttggtgtgtccagattatttcatcacccaggtaataagcatagtaaccgataggtagttttttgattctcaccttcctttcatctctactttcaaataggcctggtgtctgttgttcctttctatttgtctgtgtgtactcagtgtttggctcctcacttgtaagtgagaacatgcagtatttggttttctgttcctgcattagttcacttaggataatggtctccaactctatgttgttgtaaaggacatgatctcgtttgttttttttttcttttttttgagacagggtsttgctctgttgcccaggccggagtgtggtggcacaattgggcttactgcagcctcgaactcctgggctcaagtaatcctcccagctcagcctcctgagttgctgggaccacatgcacacaccaccaatccagagttgwtgggtatttagtttgattccatatctttgctgttgtgaatagtgctgcaatgaacatacatgtgcatgtgtcttttttttttttgttttttgagacagggtcttgttctgtcatcctggctggagcacagtggcataatcttggctcactgcagcctctgctctccaggctcaagcgatcctcccatctcagcctcttgagtagttgggaccacaggtgtgcaccaccatccctggctaatttttcatatttttagtagggaaggggtctcaccatgttgcccaggctggtctcgaactcctgagctcaagtcagcctgcatcagcctctcaaagtattgggattataggtgtgaaccactgtgcctggcccacatgcatgtgtctttatagtagaatgatttgtattcctttggttatatacccaataataggattgttggggcaaatgtttgctctgttttaagttctttgagaaatcaccatactactttccacagtggctgaactaatttacattcccatcagcagtggataagcrttcctttttctctacaacctcaccagcatctgttattttttggcttcctaataatagccattctgactggtgtgagatggtatctcattgtggttttgatttgcatttctctaatgaccagtgatgttgagcattttttcatatactgcatatatgtcttcttttgagaagtgtttgtttcatgtcctttacccattattgatggggttttttgttttttgcttgctggtttgtttaatttccttatagattctggatattggacttttattggatgcatagtttgcaaatattttcatccattctgtaggttgtttactctgttgatagtttcttttactctgcagaagctctttagtttaattaggtcccttttgtcaatttttgctttttttgcaattgcttttgatgtattcatcatgaaatctttgttcagtatatgttatctactgtccatcttctctttctggagcataatacaaactmttactaaacatactacagctagtgttacatatgacaggtaactggtattgaattgaaattagccttaagtgttcccagcatatgggccttttaaaattaatttagctaaataattatattttatgtgcattaaaataacaacagaaaaattcacatccagaatcagtgttgaaaatatgtaagtatgtattaacctactcaaatgcattagaacgtaatcactaagtatttggcattagtttatactgttaatctggaaggttaaacatgagcccacgtggctaaaaagagtaactcactctcaatagtctcatattctgaatatttgtattgcaggttcaggtgactttttcttgtcactcaaaaaatgtgcacatgcccttaattttcactccaaaaatagatgaacagttcttccaaatatagatgggataggaatcttttggctgacaatcactcagagattcagtcgagaattgaatctggggtactctgctgtgctagaagttggcaggcctgtgtggcctccataaataaaactaattaatctggctgttttcttaaattcccatattgcttgtctaaatatcaggtgctggcagcttttttttttataacattctccccccaccactccctaccatccccctgcaaaagggcacacacctcatttttttaagttggaaggaaagggaaggagagaatattaatccggtaaatggcacccgcagagcagccactgctcactttcagggtcgccgtgagcggacatctctgcagtgctgctctggggtaaagctcagctgaggcgatgatgggtgtcagttggccttttcaatggcacctcgctaggggctgagtcagaagaaaatccagcatctgttcccattctcagttcagctgcagcccccatggatgaggaatgtttccagagaagagaggtaggggtgggacggggcgaggatgtagagcaaggagagggaagaaagtgcaggggacaggacggtaggctctgacagtcctaggctgagctcagactctgctcacggtgccgtctggaagacactgcatccccagctcactcttcagctgccctgagcatcgacacatactccacaggtgcacactggactgctgcgggctcctctaggttgacataaagaattccaagttgagagagctcgaatactgatagcaaaccgtgtagaacaagccgtcagtgttgtaatagggtgggttggtcttgggaatctttttgcttttcttctcagttttgttctgatgtccccttactgagctggttatatagactggaaagtactagtcctaccaagatatttgcatttttrtcagaggacacatgacgattgaaaaaaccgttaggatccaatatatacatcctacatatttacatatttagataaacaaacaagcaaaagttctagccaggtaaggaagaaatttgggaaaggctgagaaaggtttccagtatttttcagcttctaatatgtatttgtttgcctaggactttacttagtgagcctactgctaagaccatactcatgttctaaatgctcagggaaagctaacaatgcctacattaggacagttctcatcctcaaggcaatgaaagccttttgaggcccaaacagtatcatcaatccaaatttggagccagattcaaaagggcagccaggaaggtctggccatcctatggtgatcacacatatgccccagcacagaactgaccatctctcctaagatgtaaagcatgcttaaagtgggagtcctagattcctcaggcaacttcttcttcctcttcctcttcctttcctcctcctcctcctgctcctcctcctccaccacctcttcctccttctgcttctgctgcttcttcttctttcttcattcttctttcttcttcttttttttgacaggctctcactccttcatccaggctggagtgcagtggtatgatcatggcttactgcaacctctgcctccagggctcaagtgatccttccacctcagcctcccaagtagctggagctacaggcacatactaccaagcccrgctaatttttgtagtttttgtagagccggtgttgcatacctaagctaaggtgttgcacacaaggctgatatgtcacatacctaggttgatagcttgggatctagggtaatttgttggatatccagagctgtgtgccacccctcctccataggcaccttcctaggaattttgtcctctctctgtttgtgctttcacctgaaagaaagattcttcatcaaggaacgcccaggccacagaatgaacagggtgataactttagcaatcagggtaagcagctaattaaatattctagaaatgcagtaacttgcttgattcttttacctagaacaactgagatagcttcactgtggtcaaaacaatagccccaggcattcctaaatttaagagaagatccagggtaacatcagtttggctcttggacaatagcagggttagattaagttgggactggccaacttcatgctctcaagtcatttccacaccattttccaccttctctcttgaagctcttgcctcctttgagcttcactttcacacatttccctctcccctttctcatctctgttgttctctatttaaaaacacacccatatcccaaactcctggttgttgtagatgtgggacatgctcagtttgaaagagcttaatctccattgcctttgccgttccactatcctcagatctggtccttgacataactcagagaggcttaaatactgaggttgtttttgtttgtttgtttgttcgttttgtttttgatatggagtstcactttgtcgcccagggtggagtgcaatggcgtaatcttggctcactacaagctctgcctcccgggttccagcgattctcctgcctcagcctccrgagtagctgggattacaggcccacaccaccatgcccaagctaattcttgtatttttagtagagtcagggttttgccatgttggacattgacagctggactcgaactggctggtctcgaactcctgacctcaagtgatctkcccgcctcggcctcccaaagtgctgggattacaggtgtgagccactgttcccgggcaaacactgagattcttattcttactttaaattctaaccacagcatctactttttcaattctgcaactctcttaggactttcagaaatgttctttatctttattgtgacgtgtacaactttgacactttcttcagaaggacccatttctctgtctgcttcaatgaaatatcttctcctctctcactgtccccttcctggcttctcttcctccttccatcacccatattcctggcctttcaatacattatctttcagtctcttctcttcattttatacagcattttatttgatagtaacaccagcctttgtggcttcaacccccaacctcatgtattaaaatatgttttccaatctgctagtttagcctaggtcaggatactacttagatctacaattctaggctgggcgcggtggctcacgcctgtaatcccagcactttgggaggctgaggcaggcggatcacaaggtcaggagatcgagaccatcctggctaacacggtgaaaccctttttctactaaaaaatacaaaaaattagccgggtgtggtggtgggcgcctgtagtcccagctactcaggaggctgaggcaggagaatggcgtgaacctgggaggcggagcttacagtgagcagagatcatgccactgtactccaggctgggcgacagagcaagactccgtctcaaaaaaaaaaaaaaagatctacaattctaattcacctctggaaaattgaggtgcatggctattctgtcagattcttgaagttctcacatatagactcttaacacattttcattgagttcartagtggtggataactaaatagcttactttttctgctgctctttgttccttcttgtagatccaagcttccatatgctataatttattaatagtgtaaagaatattttaaaatattttgaatactgcagatcagatggagatgaattctctattatttttctgtgtgaagatgtttatttcatcttgatttttgaaggtcttttttgggggtacagaattataggctaatatgtttttctttcagtacttgaaaaaatctcacacaattgttttttgatttctgttgtttcttataaggtgtcagccatgatcttaactatttttgttatttatgcaatgtaccttttgttgggctcatcttaagaattgtttctttattaacttttcagcaatttgataatgatgtgcccaggtatggttttcataatgttcatcattcttggagtttgatgaagtgctcagatctgtgatttgatgtctttcatcacttttgggaaattcttgactataatctttacagatatattttaaaatctcaatatctttttgtgggatgcattatatatgtattctctttgtaatacattagatgttactgggttgtgtgctttttcaaggctgtattaactctataggaaggaatggatatggggagtgaatcaccatatccaaggtagactcttctttcccacaccatagtcaatctttatctcagtacctggttttattcctttcatagtactcataactataaaaaacagctggtttattgattagtttacttgtttaatctccgtttcacgcactgtgatttaaatgctaagaaagtggagactttgtgtcttgattatgctctgtcctcagacattagaactctgtctagctcaccagtcatccactaattatttgtagaatgaatagtggtaagcagaaaggcaaaaacaagatttacttaccacttacactagaagggaggctgttaaaaggtacgtattaataaaacccttcaaacagtttataatactggaaatgtttgaactgtaagaatagattggaaggtgaaagaaatttgaaataattcagtgaaaaataaaatattttgtagtagttaggcttatcagctgtaatggaatcataggacttcacatctggatttctaactactttaagatacttcatatgagtggaatcttaacatattcgtccttttatacttggcttatttcacttaacatgatgtcctcaaagttcatccacctagtagaacatgacaggatttctttgtttttcaaggctgaacaatattgtatgtatatgccacatattcttttttcattcacctgttgattgacatttctgttccttctacatcttggctattgtgatgtgcaggagtttttaagtttaatgtagtccatttgtctatttttgcttctgtttcctgagcttttactgtcatatccaagaaattattaccaaattcaatataatgatcttttccaatgttttctcatagacattttatagtttttggtctcatatttaggcttttgatccattttgagttgaattttttatatgatatatagtaagagtgctaacctcattcttttgcatatggagatacaattgtccctgcatcatttatagagactgtccttttctcattttgtagtcttggcatcattgttgaaattcatttggctactttatgcaaggatttaactatgggctctctattctgttccattggtctctatatctgtctttataccagtatcatgctgtttgattttgtagtaagtttttgaaataggaagtttcagacctccaactttcttttttttcccccaggattgttttggctatttggggtcccttgagactccatataattttggaattggcttttctatttctgccaaaaatgcagttggcgtttatattggaattatatagaatctgtagattgctttgaataggactgacatcttaacaatattaggccttccaatctgtgaaagcaagatgtctttttacttactggtgttttccttaatttctacaaacaatgttttgtagtttttggtgtataagtcctttgcctctttagtacaattggcgtacaattattcataatagtctcacaatttttcttatttttgtgacatcagttgtaacattctttcatttttaagtatcgttatttgagtcttctctcatttttttcttagtctagctaagggtttatacatttcattgatcttttcgaagaatcagctcttggttttgttgattttgtttctattttctatttcctatttcatttatctctgtacaatttgtattatttgctttcttcagctacatttctttatttttttttttttagttttttgagggtgtaaacttagattgttgatttgagggttttcctccttttttaatgtaagtctttactgctataaatttcttcctttgtactgcttttgttgtagcccataagttttgatatgttgtgttttctttatttgtctccatatattttctaagttcccttgtgatttctccttcgaccctttggttgtttaagagtaaattattcaatttccatatatttgtgaattttcctgttttgctttcctgttgatttgtttcattctattgtactttgagtgatttaaatcttaaatgtggtaaaacttgttttgtggactaacatgtcttctatctttgagaatgtctagttgcacttgaggagaaggtgtattttgctgttgttgggtggagtgttctgaatatgtctgttaggtccagttggtttgtagtgttgttcaagtcctctgtttctttgcttatcttctgtctggttctttatataactgaaagtgagatattgaagtctcctactattatcgtgttgctgtctagttgtctcttcagctctgccaatgtttaccttataaaattgggaactctaacgttaggtgtatatatacttatggttgttatgtctttcttgtgaatggacccttttattactgaataacaatcttctttgtgtcttgcgacagtttttgacttaaaatctcttttgtccaatacaaatatagtcacccttgctttctttaggttcccatttgcatagaatatcttttctcatcctttcacttttaacctatgtatgtccttagatctaaagtgagtctcttatagacagcatactctttgatctttttaaaatccatttagtcaatctatatattttaattagggttgtaatccatttacttagaaagtaattactgatagggaaggacttactgttgccattttgttaatttttttttctggatgtattataactttctgcccctcctttcctctcttgccgctcactttcttttgtgtttgatttttttttttttttttttgagatggaatctcgctctgtcrcccaggctggagtgcagtggcgcaatctcggctcactgcaagctccgcctcccgggttcacgccattctcctgcctgagcctcccgagtagctgggactacaggtgcccaccaccacacctggctaawttttttttgtatttttagtagagacggggtttcaccgtgttagccaggatggtctcgatctcctgacctcgtgatccacccgcctcagcctcccaaagtgctgggattacaggtgtgagccaccgcgcccggccgtgtttgatttttttgagtgacctgctttgattcccttttgattttcctttgtgtatactctatagatattttcttcctggttaccattacatgaaatataacaatctctattaaactgataacttcaattgcatataaaaattatatttcttctgctgttgatttcttgtttcattccattgtggtcaaataaaatactttgaataatttaaatcttctttatatgttaagacttgtcttaacaagtcttaagtcttgacatgtctttaagacttgtctgcccacacttgatgttgttgatgactccacctacctctttgtatactgtgtatgcattaacgtagttttataattactttttatgcttttgttttttaaattctatacctgatttaaaagtaatttttatatatttatatggcttaatgttgctgtttatcattcttccacttcaatttgaaggactactttcagtatttcttatatagcagctctagtcatgatgaactctctcagctttcctttccttcccttttctttctttctttctttctttttttttttttttgagagaaagtctcactctgtcacctaggctggagtgcagtggctctatgacttcagctttactttatctgagaatgtcttacattcttattcatttttgaaggagagtttttaccatatgtaatattgttggttgattttttttcctttcagcattttgaatatattatccaacttcattctgtcctgcaaggtttctgctgagaaatgaggttataatctaatacaagctcccttgtacatgatragtcacttttctctttctgctttcaagattctcattgtctgtgacttttgacagttggattatgatgtgtctctttgtagatctctttatttttattctacttatggttcttttagcttcttgattatgtatgtccatttctttcctcagatttgggaagttttcagccattatttcttcaaatagtctctttccccctttcttccttttaaattcgcataatrcatatgttattctgctcaacactctaccgtaagtcccttaggctctctctgctttgcttcactcttttttttgtttttgcttgtcttgataatttaaaaagtcctgttcttaaatttactggttctttcttctatctgatcaagtctgctattgagtagttctcgtgaatttttaaattcgcttaatgtattcctcactccaagtagttttgtttgtttcttcttcttagtttctgtctcttttctgatattatcattttgttcatttttaaaaatttcattagttttttccatctgtgccttcttttactccattgaacatccttacgacagttattttgaattatttatctgctaattcatatattcccatgcctttagggttagtttcaggatatttaatttgttaccttgggcccagtctttgtggtctggtttcatgcaggaaggactttcaccagtcagcatggccagagactctagagacctctaaagccttttctggggatgcgtactccccggacttgcacacttaatatattaggttggtacaaaagtaatttcgaagaaccrcaattacttttgcaccaagttaataatgggtgtgttgctttctactcaggggttcactctgatgcctgtttgtggtactgcagtttctttggtggtgtagcaaactgaggtactggcactccccctactgtcattccatcgtactgcagactctggtggtagaacaaaccctgttcattgcctctgttgtgagtccaccaacctgccactctgttcctctaagcacttaaattcagagaacacagaaaccagtcacttgggcagccccacaaaaagtcggaatgttgaaaatatcctactcttttctttctttcctcagggagaagttgggaatgttctgaacacaccctgtggtacttggcgggaggcactctggcacgttgtgtgccaagaattttcctacggggacttctgtgtggctggctttgcactggccaggggtgctgcagagacctctgaattgtattctagatttctcacagaggcagttggtctgtatcgtgtggttaagtcagtagcttcacatggaaagtagggtctggggctttctactctgccatcttgctggtgtcactttgttcatgtcactcaggtacagtgaggtttgtcaagcactgaggattttcataccatcctcagtgccctctttattaaaggcatagtgcagttagcccttcacatctgctctgaactcacagctctgctggtcagtgcagttctgcattccctgccagatggtggaagggagaagctgctattatgaagggagttgttaaaaacttatctttcctgttataacgaacagaattcatgtttggaaagagaacttacttcaaatattcagtttatagatggagaaaatgagccccatcaaatttaagtgactttctcaaggccatatggctacttcagagtcaaatttataacattactagacttggcagatgccttcctcaattctcttatattcttatcatcaaatcctttcaggaggtggaaatttagatctgagctttcgagtacctacccatcagagctctgaaggatttgtggttctgaacttaacaccagtgtttttattcttttaagaataggaattctcaaggtcttttaatagtatattttatatgaatgtgcaaaaatgtagaatgtcactgtttgcctccttccctgttacttatcatatctgacccacagtgaaatgacaataaccttatctttatctttgtcaactcttgctggccttcttgagatcacatatttaaagggtgtttgggaaaggagtgagggctttggagttgacatctatagttctgggattaatggaaatggaattagctgtaaaccttatatttaagggtctgagccaagtaaattggccaaattggaccttaactgagctggaatgggacctgtgatagtgactttaccgtctcagggcttcaatactaagttatagaaaacatttttgcatggactcagagtattggcaaaactgcaatattgaccaagtttgcttatcccatgtaccttttacccaaattcttccacttagtccccataatagtattctccaagttagaaaaaaagcatttgaaaacaaatcttcactgagatgctgtggataggtttaatataatcctcagagacagggaatttgtgtttaaaaaattcttgaaagattatttgtcacgataatcatgatgatgatgrtaaaaaacagtactaatcccattgaagtatttgttccctagagtctttttttttttttttttttttttttttttgagatggagtcttgctctgtcaccccggctggagtgctgtggtgcgatctgggctcactgcaagctctgcctcccgggttcacgccattctcctgcctcagcctcccgagcagctgggactacaggcgcccgccaccacgcctggctaattttttttgtatttttagtagagacggggtttcaccatgttagccaggatggtctcaatctcctgacctcgtgatccccccgccttggcctcccaaagtgctgggattacaggcatgagccaccgcgcccagcctagagtctcttgaagcctcactaccaaaatagaaactccgggaggttgagggtggaaccccggattctctgctttggtgaagctgcagaatcccagttaagtcactcctcactcctattttaacttcctctctgtaaaatgggaacaggaatgctactgcatactgattaaatgcaaactgcttatgacagtgccatgtaataaatcttatcatccttcatctgtggacattagcagagggagagaaggcagaactgaaggaaggttggtgatggggtgtaggggatcctctgcctaatacatcattgtgttcagtgggactcttagtttagggaaaggaaagggacagatgwgcccccrttccccacccttgtccccaaaagcaggaaagatggaagggaggttcccagttattggaagagsctcttatgcgttgggggcatgagagttaatgttatttattcatcttctgaaaattcatgtgctgatatttaaataattacrtcatttttactcttttcatgaaaacatagaaacttaagtgcctagggtgatttttaagcataaacattatttgaaaggcagcaaatgcaatattttggcattctattctgcgtttaattccaggggccttaacaaccatagctaaaaatttactgagcacccactatttactgcgttaacagcccggccctccactctcatcttgaattaggttctgttttcagcctctcttccacgtaggggaactgaggcacagagatctgaagaaacttttcgagatgatagagctggtgagcagctgagcccccctgcagtcaggccgcaccctccatgggcatgtcccctcacttgacacgtctgctcagaattcctcagggtctgcatgcctcatcctcactgctggtgtggggcagctctttagggattcccttgcatggacagctgtaaacacctcgacctcttccccctccacctttttgtccttgtcaacacctattggtcctgtagctcttctgttggaatctctgtttctgttgttttctatctctttgtttttgagacrgagtctcgctctttcgcccaggctggagtgcagtggcgctatctcggctcactgcaagctccgcctcctgggttcacgccattctcctgcctcagcctcctgagtagctgggactacaggcgcccgccaccacgcccggctaatttttttttttgtatttttagcagagacggggtttcactgtgttagccaggatggtctcgatctcccgacctcgtgatccgcccccctctgcctcccaaagtgctgggattaccggcttgagccaccgcgcccggcctgttgttttctatctctcgcttgtttttgaatgaatgttcatggtttcatttgctctcgcgatgtcactctctactttttcctctccatggaggtgatataatttttgttgtaacagatgattatttttaggaacatctttgtctcagacgatcttttatcagctcttttcccgcttgactacttgggtcagcttgtaatcgtcatcatgttctaggggacatttaaaaattattctctttcaaaagtaagacagtgctaggtaatcggtaaggtgactgttgtttataataatctattgtatatttcaaaataactgaaaaggaataattcagatgttcctagcacaaagaaaagacaaatatttaaggcaatggatattccaatgacactgatttgatctttatagactatataaatgtattaaattaacacgtgtcctaaaaatatgtacatctgttatgtatcaataaaaaaaattaaaagagaaaagaacatattttttcgtgttgcaattggcaagctcatgagcatttaacatgtaaagttaagtaattataactttacaactgcaatttttacgaaccatagttatgcaacatccaggggtcacctacagtgccagatgctgtgggaagggtgagggtaaatcacacagacctgccttccaatgaccagcttttcttgttgagggtgctaaaaggtgcccatgacctaaaagtaggaagtaatcatacaaggtagggattcagagaaaggaaatacatcttttcttctccactactgtatgttaagttaatttccctaaaagaccccagacacttactcgaaatttatgtgagtggctgagtccagtggcttacacctggaatcccagcactttgggaggcccaagcgggaaggctgtttgaatctggaagttcaagaccagcctgggcaacatagcgagactctatttctacaaaaaaaattaaaaaattagcctgatatgttggtgtgtgcctgtagtcctagttacttaggaggctgagatgagaggattgcctaagcccaggaggtccaggctgcagcgagccatgattgcaccactgcactccagcgtgggcaacagagcaagaccctgcctcaaaataaataagtaataaaatacaataagtttaaaaatttgcatgagaactatcttttgtaagagatattaatcaaaagactcaactcagaaagaactaagtgactatgaatactggtccttgtggccctggatgcctgccacctccatgctctggggctctgtgtaaatccataggctcattcctctgggatgccttcctgccctgccaccttcccctggtagatgactgcagaacccatgccctatgaacgcatgctgagccaagcacaatttctctgtctttttttctacccttttcttccccctctcctcaatttttctaaagtaaatcatgctgtcataagtctggttttagagagaaacttcttggggttttgagaagccagctcaatacaacttgccacttcacgctggaaaagttaggagaacatctagaatcagatcagccaggcttcttctcttcttcttatgaatcatgccaggaattaaccccattttagaaggacacaacttgcttattaacccacctgacttattaaataacatctgtgcccacctcagggggcccagggccaaataaggaactatcaaagttagcaaaatgagacacttattaccatatgaagatcatcaggagaggggctgaggcgagtttagcaggaatcttgtactatattaaatgtgattttacctgtcaagtcccaaaggaattgatgtcgggaactttcttcaaataaaatacaatttatttccttttgaccatgacaggattcctttaacgtccacaataagcaaggcaaagcatctgctcacccctagtttttggtacgtggctctaggtgcatccacagacagacccgcccggccctgcattccttccccagcaaggctgctgtcaggtcccccttcccactggggctgtctcctcagctcatcatgatagttcaaatagccctccaccaagctctcctcactggcttcttccaggatgaagacggccatggagagtggagaaaaacaaccaagcaaaggtctgctttagygttgtgacagaggcaaagagaaaaggcagcccatgtactccccttaggaccacctcaatccatcaacggagcaaatgtggctgatgcttgttgaggcttagctggcggatctttgcaaggttcacatatgctgcacaacttatgagtttatgattcttctcagacatactaattctcaattcttaggaaataatagcaaccagataagtaaggtagaattcaaaggaagaatccattttaaaccgaatgtatgggactcagttccatcatccctattttaaaatattcctatttcttttaaaaaatagaatctgctttctttcactcagaaaattgctccccaccaccccatttctggctttcctaccttcatatccccatctttctcttggctacatagggcttattatattgtagtaaaatacacataacatgaaatttgccatcttaaccattgttaaatgtacagttgagtggcagtaggtctgttcatattgctttgtagccaccaccaccatccatctccagaactcttttcatcttgcagacctaaaactctgtacccattaaacaactcccatttccccttccccagtccctggaaaccaacattgtactttctgtctctatgagtttgagtgccgtagaaggcttatrtaagtggaatcatagtatttgctcttttgtgactatcttatttcacttagcataatgtcctcaaggtttatccatgttgtggcacgtatcacgatatccttcctctttaaggcaaaataatattccattgtctatgtatactacattttttaaatccattcatttgtcgatgagcacttgaactgtttctaccttttggctactgtgaataatattagcatagctattcaatctgtttgagcccctccttttaattcctttgggtgtatacccagaagtggaactactggatcatatggtaattgtatttttagttttttgaggaatcatcctactattttccacagtgggtatatcatttttcttcccacaaacagtgcacaaggattacaatttcttcatatccaggctggcacttgttattttctgttgctgttattgttgtgtttgtttgtttttaatagtagccatccgaatgggtgtgagtgttattttgtggttttgatttgcatttccctaataactaatgatgttttcatgtgcttattgtctgcttgtatatcttcttgggggaaatgtctatttacgtttttttgccatttaaatcaggttagtttgtttttgttgttgagttctgggagttctttatgtattctggatattaaccacttatcagagatacaatttacaaatattttctcccactcaatgggttgtcttttcactctgttgtgccctatatgcacagaagttttaaattttgttatagtcaaattcatttatttttcttttgttgcctgatgttctggtgttatatccaagagattgttgttaaatccaatgtcaggaagctttccgccgtgttttcttctgatagttttgtagttttaggccttacagttaggtctcaagtccattttgagttaatgtttgtttatggcataaggtaagggtccaacttcattcttttgcctgtggatatccagttttcctagcactgttggttgaaaagactgtccgttccctcattgaatggtcttggcaactttgtgaaagatcatttgtcagggtttagtcttgagtctttgaattataaaccttcagctgcctgtggccaatctccttcttggattctactgtcagagccactattctaatgcttcaattacgttagcatgactgcttaaaagagcatctactggccgggcacrgtggctcatgcctgtattcccagcactttgggaggctggggtgggcagatcacctgaggtcaggagttcaagaccaacctggctaacatggtgaaaccccgtctctactaaaaatacaaaattagctgggcgtggtggcaggcgcctgtaatcccagctayttgggaggctgagtcaggagaatcgcttgaaccgggaggcagaggttgccgtgagctgagattgcgccattgcactccaccatgggagacaaagcaagaccctgtctcaaaaaaaaaaaaaaaaaaaaagcatctactaaaagcgcttcattttccttggcattttgtgagtgtgtgtgtgtgtgcgcacacttattgcaaactcttatctcttacacccttcatggcactgttgcacttattacatttgccgctgctcactgcaagctgttaaggctttatgtttgttggttctttttatttaatgatatacaaatctctggaagcccaaagtctaataagttgtatgaaacaaccagaaawctctctcactaaatgtaggtccttaaccaactgacttaacaccctttggtatagcataatcaaaggttctgcagtatttggagatggaacacttgttgaatccaataatttgaagaaagatgctacctaatttccatagtagttagcaaagcttagtctaaaatgaagagtactccttttatgaaacttaagcaccatatacatagtgcatggaattgtgttggggcattttccaaaatgccagctgctcttgcagctcacgtgacttggctgtactgacagacgttgtaggagttggttcaaagtcattatcattgttttcattacgtgaaggtctggggatcgttgcccagggcacagaccagtttatgtgcaattttacgagaccgagagctcagagctgccattcattgtttcaaaagtagagtgtggaattccatttgtgaatgttcagttcttcagcacaattgaaggaagcacattcacataattgcatagactacactcttgtttctatagaaacagtctgtttcatggggaaaggttcaggagtcttgttcatattcctcctgggcagaaattttctggaattggctctgcgtcatcctttgtcagccactgagtgcagggtgaagggaatgtcctcctttcagaggacatcagcccccgactcagaggtccgtgggctcagctgtctcattatcaggcttgctcagttcttttgctgccatcaaaagagaaactggtttcccttaaagccaagtgagccagggtagcctctgacatacggcgttagagagatcaacctgtgattatataaatgttatgccttcatagttgaaacagtaattctttgacttattaacattccattgtgttttgagttggatttaaactctgtgatgtatgtgcatatatgtatctttaagttatattgataacaataaataatatttctcattttttattggtgtatagactcactagaactttgccttgagttgctttgctttggaaggatagcttgacagctatgtggtggacacataacccaacaacgtcactgacattgctcctctcttgtgttgagttttatagcaaaactttgacattaaattactcatgcagtagctcaccttgtatctcctatctttgccataaaaatcagcttaagtaacgttacggtatatctttatagtcttctatgactggcaaattgcagtgtataaatattctattttcctagatagaactgaaaagatacaagtaagaatctctcatccttcgagaattttgaaaagaaaggcaggcagggcttgaattataattacaagagaagtcccaaagaaagccctgctcatgtktgtttccaccatgtccttgtgatgctatgtatgagactttaggacttgaatgtgctctcctctgtctttctccggcacgaagtattaacatacatgtatttttctccacagtaaarccgaccgtaattgacgttgacatttatgttaacagcattggtcctgtgtcatcaataaacatggtaagaarctcctttattttctgatctaacggctgttgcacctcttcttgttacattctcattgtggatttctgtttgagatttatcatgccggtttaaaactcacactgacttcttaaatctgtaacacttattggaatattgaaaatggtaaaaaaaaaatgaagaaagatagcttgtgatggtagtagcatttccacttttagtttcttctttcaacatccaagagacctgtcttttatagtgtttcttaggaaaggattcgagatcactcagattatacttttgtcttcagtttggactttgagagtaaataaactgcctctgctttttagtatgggatcaaatatgtgctttccccgagtagggtattcccacaggcttataagcaaattcagctcaagaactattggatgtgaaagaagcccttccctgtgcaaaagtgcctggctatgaagtgagtgtgggggtattgaaatacgttagggtgagagccttctgtggtgggctgaaggccacagtccacctgccagcaaggggttaacaggactacctaggatccccaagcaggcctgtctattgcagcctcaagcattgtcaggagctccccccgcctgcggaggtcctgcctgtgctccctgctgcacatttgctcctgatttggggagacgtgaggccgagggaggggaattgccaaaatgctgacttaaatttcttcttttcattgcagtgttctgtggatggaaataacccctccaaaattagtagcaaaatcgtttcttttcattgccagattttaaaagtgttcttttctctggtgatataagggttccatgcaggggtaaagttatatttgtgggtgattcacttaaaaaatctccatatcatccctaaactggagcaaagaagtggaatgaataaaggagaattatttcacacaacctatgtgctgcagatggctgtatattaaaatcaagttgtgagtgtaatattcccttttcctgatacatcattattcagttgactgctyagagtaaccctttcttatgtatgtttcttgttctggagttttattttcttgcatttgttccacaaccgtttattcaacacctttacgtctaacatgtgtttatgtctaacactcaaagaagaagtgccttcctggatatatggttacagaattatttcaggaagtcaattgcatttgcatatagagggattttcctgcaggcctttaactttagaatttactttgtgcctcgtgttaggctttgttattggaatagacgggaattttcatgtggaaatcacgggctgcagagaaggaggccgagtgagtgacaggctccttcacggtgatacggccctgctgcaggagtggaagggacttctccagtgaggtcctcttcatctgaaacttgacggataggcaagagtgtgctaggtgggataaagtttgaaggtccttagtaacacaggaggacagagtgcgtcacacagctggggacgagggagtgatgtgtggagagatgcctggaggggcacatgggggcagctgtgaccaaggccctgaagctgcagttaagggtcggacctcagccttctcttcatccaaaacagatccctgcgtttggaaactgtgaaaaccttttcccatcagagatctgagcaggtcatatttcatgagatttgttcaaatccaggccgggcacagtggctcacgcctgtaatcccagcactttgggaggctgaggcaggcagatcacaaggtcaggagttcgagaccagcctggtcaacgtgatgaaaccctgactctactaaaaatataaaaaatcagctgggcatggtggcaggcgcctgtagtctcagctactcgagaggctgaggcagaagaatcgcttgaatccaggaggcggaggttgcagtgagccaagattgagccactgcactccagcctgggtgacagagctagacttcatctcaaaaaaaaaaaaaaaaaaaaatccagtaagatcgctagtcagacccctctctccctgaaaaaaaacaaaaactacatgatgatgcagagctcacattagggacttgaaatcatgaactctgatccttccctgtggggtgagaaacgaccttagaatggccgggggcattgtaagccctgggccctggagaagaacacgtgtgcaccagcatcctgctcatctggaggctgacacagcaggtttccaaggctgagctgtggcaggatgtggagtagaaagctattttctattaactctctcatttgtaaaacttgccctgaatattttgaaacttcacttagtccagttggttttctttctagcatggctctctaccctactgaaggggtggggagcctgtgtggctgcctgctgctgtgtgagttggaagcagctggcacgcagccctggggaagccgaatgctagcaagtgctttcctctgcaaacagcgccgaggccgcagtcagcgctcagcagggatggcactgtctaggccattctggagtctgatttcctgaggaagacacaacgtactactagcctacctcggctcagcaaagcatagagggcaggcaaggatttgtttaaaatgcacacacacacacacacgcatgcacacatgcacacactcgtgcacacacacaggcacacacgtacgtgtgcacacatgcatcacacgcacacatacaggcgcacacacacgcacacacacgcacatttatatgtttaattcccatgttctccttgggtgagttgctgtgtgtctctctctgttccttcacgcacatttgccatccgactagtgtgaggcattgtcctgggtgaaggtgagacacgaggaaccaaggcctgctttggtggggcaagtctgtggatgagctgagtgccacagtggaggtaggttcccttctaagcagccccgagctggcaggctctggctggcctgagggaagtttcaaagccctcaggaggcaggggcctcggggaccacttctggaagaatgagtgtttcttacctttgtgctgggaatgctttgctgggacgccagaatgataagggcatctcacattgccgagtgcatcacatagacccgctatatctgtgcaaccaaacgacgcaattttaaaagaagtaaagggcttaaaaatgaaacacagatcttaggaaaaataatagaaattttaaagtagagaactgacggtgtaggtgggtattggggattgagttagcaataaaaaagaatataagaaagactaaaacaatcaaagaatacaagatgagaagaagcacaatttagagatgcagacagggtttaaggatgtaaatttgtattggggrtttgaccgtaaaggtaaagcctggtaaaattatggcttcttgtccaaatagtcatttaacaatcaatgaaacagggaacaatgactatttcactttctccttcctcttcttcctcctccttctttcacactttctgccttttattgatattattaacactgaagattctgcctcagccattccttctgtggagtggaaatgaagttgtgtctcaatctattgtttaatagattatctttgtcttgtttatcctggagctgtttatgctttttctagttatcgagattagaaacgggaccaggggaatgttcctctacatgaagctttcacagcatcctctgcctttgtcgctgcaacatacctaaatgtgtagcattcatcaaagaaagtgtgtgtggtttgtttccacaccaggaaagctgcatgcaagggggcttgtgagtttatttttgagaatatccacttcaagcagccttttaggaaagcaaagaagaaaaccaatgttctgacacttactctgtgctattgaccccaaatcctttaatcttcacaagaccatagtggagaagatattgaccttcctgcttgtttgagtccagtaagtggaagcttgtggaagacatcttagagcaaggttctgagtgtgacctgcttggcaacaaagccctggctttgtttcctagtcaatatggacacacagcagctgtacatacctgtagggccacagccttaacatagacacaaaaggctcagtgttaggattacttttctgtgttttttaaaagaattaaattaataaattttttgagcatttttaggtttacataaaaattgagcagaaagtagagttcccctatatattttcctctacacacacacagacacacacacacacacacacacayayacaacacataacacattattattaacatcttgcattagtgtattgtatttgttacaatgaatgaatgcaccttaatccatctttatcatgcaaagcctatggcttacattaggattcactcttggtgttgtttattttatggatttcgacaaatgtctaatgccatgtatctgccactatagtatcttaagaacagtggcactgcccttaaatcctctgtgctccacctgtttatcccttcctatccccagacgctggcaaccactgatatttttactgtttccatagttttgctttttcctaagtgtcacatacttcaaattatacaatagtcaaccttgtaggatggctttttttccttcgttttaaaaagtactgatacyaattcatctgaggaaatctaagacttgtagcgagccactgtaatgtgactatagcgtgaccatgtgttaccagaaattgatgggatggctctgtggattgtgggacaggtccaacatcaccaaattatactatatgatagatcacctacacatttaaaactgaaaagatgacatgcagccagagaaatcataaagaacacatgaggcctctcaaccctatctctgctccattccacttgtggctgaagctttaagaagtgaagtcaggataccaagtcctgattagggcctgtggaaggtaaattccatttggtcattactggaggatgatctattgctttgtggaactcttttggagtcatctaagctcaggaaagtttaaaataagtgacagctraagcaccgtggygcycctgaccttgttttgtttttctttgcatttctcctgcgtaaagttcatagcagtttttgcatctgtagttcgataactttcagcagtgtttgaaaaagagtggccattatttcttaaatattgttttggcaccgttctaggactctgctcatgtgaaggttacatgcttctcccaggtcccacttgcttttatgcttgtgctgktttttatttcttcctttgcactccatcttttggcatatgaagtcactcttcatctctgttctgtgatgttttaaagctgtctattgagttcttgatttcagttattatgttttcagttcgaaaattttaatttgattctttctaacgtatgttagttctctggtgmgattctccatcttgcaatctgttttctggaacacattaaccatgaagtcccttctgccatctctggttccatttctaatgtctgttttcttgcttctttctattacttggtatgcctgatgtattagtctgtttgtattgctgtaaaggaatatctgagactgggtaatttataaagaaaagaggtttatttggttcacagttctgctggctgtacaagcgtggcaccagcatctgcttctgatgagagcctcaggaagcttccaatcatggcagaggtgaagggggagccagcttgtcaatggtgagagggagcaagagagagagggaggaggtgccagcctcttttaaacaaccagatctcttgtgaactaacagtgagaactcactcattaccatgagcacagcactaagccattcatgagggatccatgtctatgatgcaaacacctcccaccaaaccccacatccaacaagggaatcacattttaacatgagatttggaggggatgaaacatctaaaccatatcacctggcaattttcattgtgtacaaagatttgtagaggcattgagtggtttttcccttgcctctstgtaggtctgagctggcatggggctgacctgcagtcttgyagaggctccactggactctggttcccctgcctttctgcatcgttccccagaggtcccaactgagggcctggaatgtgtcaacaccaaaaaatggctgaaaatacagcccttcttttttaagccatttttacaattgttttttaacctcttatgttgtacaacttagtcagtaaatgtgtcgaggagataaccagtattggttggctttcttctctgacattcatattccctgaaattgtggcccctccttttttgacttcttggccagtttttccctcaagctctcccgggttctttattctctctgtccaggttttcacattacgtgccctgtcagcagaagacaagttctcgggggaagtggcgtgcaggaaatgtttaccatggtgagcctgctgcctctgttttggcttcttcagatggatttttgcttagctttctcgcttgctcttagtgagggtgccagtctactgcaaggtatcccatcctagccatgcatccttgatttggaaatttaagtttaggtgtaataaggattgattctggatagctagcaaggaagtaagttggagcagagtcaaagcagatacaatctgactgggagatttttgttgttgctttggtaacctcctgaactgccttcaggttagcgaataagaggattttctagggtccattgttttcaggttttttctataaaataatgatgctttgaacgacactaaaggatacgaattatgtatttcttttagcaatattagctttagatgaaaaaaagcatgtggcccttttcagttgtttaagaggatgatggtcttatatgtggtttkaatattattttataaaatgaacaatatttcattttccacttgaaaaatgaaaaaattttaytgctgtcrtagatttttttgtggttttatgcattaatatagtatatagtaaatgttcaaaaggattgtttgttgctattcttgctattrtattacaacctgtaaattttgtgacactttcagttttatgtcatccgtgaattctcccctcagtgttcatggcctttggacctgaggaattggcattactggcaagcttcttagaaatgcagagaatcatgccaaaccccagatctccttgaatcagaatctgcattttaacaggatctccagatcattgtcatccaccttaaaatgtgagggataccatctaactcaccatgacttctccatatgaaaagcatacacaacttaccctgtatgaaaacgtatatgcctgtattgatgccttaatttgatgttttctattctcgaaaagcatacaactgctctggctttgtggatctcctgttgtcctctttctgcagagttagagaatagtccatcactgaagattcaggccacgcatgtaactcagggycagttctcttaatgctctcattttatgttggggcaaattaagaagtctgcccatggccacgtggtcagtgtgttatttatttgttttgttttatttaaaaaaagaagtgaaaaataatacctttgcacattaagtgtgtgtgttcaagatttgtttcatcactggaagaataactctttccacactaataacaataggaacaataatatttaaggtatacatgttagtaagtaaaacaatagagaatagcctggaggagccacacaagctttgtgggaatgatctctgcaaattaaaaaaaaaatctccaagaacaaaaaagaagatgacacttaaaggctttygagcctgagatccatcgagtcttgtgtggcagatgcccatgagccctggaccaaggcccacatgtctttttggtcacttacttaccccaatcatccagtccagaggcccttgtaaatatgtgtcaagtgagtgaatggataacagtccttatctccctctgcctctcaygtgcatgcctgctagtctgtttttgtgtgtgaacacatcctgctctacatgcctgtacactactgtcttcagttcacaatttccttagttaataggcttcttttgctccagtagtcttagctaacactgtgtccagggcttctgttgttttgaggatgtaatcctgacattaaacctatgaggccatggctgtcagcacctgaactcacaggtaatggagcaacgcagcttaggagacgcctctgagagttcataggccgtccatctggaagatgaaaggaccaccacgcacatgtctccatccctggaagaagaagagaacccaggtgggcttggctaaaaggcatgtctgacatgtaaaactgcttaattttaaactcacactctgtgtcctcttttctctgtcctctggtgtcttagaacttgtcaccattttatacaaaatgtcattagagatgccacctggtaggatggggtgttgtctattgtaggaatgaatggtaacttttcagtgatttagggacactgagatgtcggtaatcatgataagacaccggatctttgttagcagcgatctcatgcactgactccttcaaatgtgtgaatagcttcttattttcctttcrtcttgaacttttgcacttcgattggatatttcacaattgattttcctcattcttcacaatgtgagctacataatgtccctctgacaagagcaccgtctttatgttccacaaaactccttttgtgaaaaggtggggctgttgggttgggccccctattagcacatttgaagaaactctcccgctttaccttgacaggtttgctgcaagcccccgcacaggccccacttgcctagagacagggagccacgtggagcttgccatagctgagtgtgcgtggacagcaggattggggaaggacaggacgaggcactgttatgggccctatggtgggtgctgatgtgcatctttcacagaagccccttgggcagcactgtggagaatggcggtgggggctggaaaggctgagttacacagatgtgaggggaaatgtgaaattccagggtgagaaatggtgagttctgagtctgaagatttgcagtgggctgcagaagaggctgtggatttgagaaatataacctccaagacagtgggagaagtcaagggtgactcacatcctaacagcatttgctaatccaataaatatggctgagcacctgctatgtgcaagatgctgaagcaggtaatgggaacacagcagtgaacggaattaataaagctgtggtgttcatgaggcttcagtttatttgaggtaagacatcgaataaacaaayatgcacactgttatttcaaattgtggacagttttataaagaaattaaactcctgggtgtggccaccccgtgaaggtttcctttatagaatttgggccgggcaggagaggggaggaagcttcgacatgagagctcctaggcgccagatcacaggggagccctgcagaccagtgtgaggggcctgcgttttgttctgggctctggaagaagcctatgcaaggtagtaagcagggaaattgtgtaacgtgtttcactttyagatgccggccgggcgcggtggctcatgcctataatcccaggacttgggaagctgaggcgggcggatcatgaggtcaggagttggagaccagcctgaccaacatggtgaaataccgtctctactagaaatacaaaaattagctgggctttgtggcatgcacctgtaatcccagctactcaggaggctgaggsaggagaatcgcttgaacctgggaggcagaggttgcagtgagctgagattgcaccattacgctgcaggctgggcgacagaacaagactccatctcaaaaataataataatactaataatgctgtacactgactatgtgaggggttgaaaggccagccttccttgacctcagttccttggagacagtagaatacagctatgaatcttgttgatggagcctttcatatgttgaattatgtcccccacaaaaggtataggttgagtcccatcctccagttccttagaatgtgactttatttggaaatagagtcattgcagatgtaattcattaaggtcattctggagaagggtggcccctactgcagtatgactgatgtccttatgaagaagggagatttggaaacgactcacacactcacagggagaacaccaggtgaagaaggagacagagatcagggtgatcctctataagccaaggaacaccaaagataccagcaaataccagaagccagggcagagccctggagcagcttctccctcacagcccccagagagcaccagccctgctgacaccttgatctcggccttccaccttccagaacccggagagaaaacacatttgttgtgtgagccccgggcagtggtgctgcattacygtagcagcccagcactagcactaacacaggcctagcctacatttcgcaggtcctgtccatatataagagattctgtaagaattgaagaaacaggagagaaacacaaagggtggctcgacagtcaacagggacaggtttattttcaataaacctgagagggtcgactggctaagttaggtcagaggcactctgtcttatagactaagagtttgtaakgattcagggtgggagagtttatcagagtcttggactgcttctgtgcctctttgttgtgcttatctgggagggagagttgtgtgtctcttcccatacatctttctgcagctgcaggcatatcccctgagtctgcttttagcttccctatcttagtacacctgaaggaaaaggaaggtgcttattaagggccactgttttactggggcccattggatgagggcaaagtttggcagttacgcaagagactttcctcccacctscttctgtgcccgagctgtcttatctgtgttttactgtctgctctttctggctgctggtagttagaagagaagtgatttccttgaaatgaaggagtctagaaagggagctggagtttaaagtgacagtgtttgtccaagatcatggtgctcctgctctgtcagattcctactttccacatgccaccaacttgctgcttgcctgggaggctgcatttcacccttgccctcaccccgtccccagcatgcagggtcccagccaggctctggccarcagatgcagggaagagcctgcagcatccctctgtgtgcagctgcttagcaaggtcgagagctgtcccgatcgggtcctggtccatgctccgtaactagtcccagaacagccccatctcagtccggttggccactgtaacaaataccttagactgggtagtttacatactgcagacatttattgcacacaagtctaagactgggaagtccaagtctaagactgggaagtccaagatcaaggtgctggcaggtgcagcgtatggtgagggctgctctctgcttctgtggtactttctgtgtgtcgtcacatggtgcaggggacataaatgtgaaggacgaycttccttcatgtctgcatggtctctcagtcatgtcattctgtaccaaggtcttattactccccaaacccaggcattcttttgaggcatcaaattctgaggctgggagtttgatgagtttcttgcctctcctgtcccgtggtaggtgtgcccaccacctgtggacactggtgctgctcaccacactcttccctggcaccacgctcttctcctggacaccaccggcttcccttccctgtgttagggttggcagagcctgaaaagctgggaaagtggcacagactgtrtcgatatctttcccactttgtgaatgacctcctcatattctccaggaccaaccaagctcttggggcctggggcacatgggaaccatgcagtgtggcctctcaggggtgcagggagccccgccccagaaaggcagagggtagggggcaagtgtgttggggagttggggatgtcagagtgacagcagaagagctggagctcrgccatgggaatgtcagcaaagaactgtcaggaagaaactgatctcctgagagagggaaaggtgtgccactctcccctcccgggtggagcctgaggagatgtgtgccatgagcaaggtggcgccttatcaaagaaaagcagagccagcagaaatcaaatcagtgatggcacattttattcaggactattgcaaaaaagactccagtgaagagctgggttgggctccgttacaagtacaacggggacgagtgggcactgatggccaaggagcagagggtcagtgggtgtaaagttactcagaggagacgccaagtctgcgggcagttctggccaaaccagcctaaagggtttcctgctgaaggcaggtcagcatgtcagcatgtttctgtggggaattcttgccagactgacttagctggggttcttgctaatgggcctaggagaaggatcagggcctgactaaagactggccaagcacaggatctttgtcacattgaggacaggatgtggagctagactgagctagaccatggggctgcctgctacaggaacactgggcttcctgcactgaataagagaggaaggtacaggagtgcagccggcctggtggccctgtcatttcttagccggctgcaccacggagtggccttaggtccctgcatgctgctcagcagttgtgtgtaaggaatccctgcattgggaggaagctgaatccagtgactgccagctccacaagcatgaagtgttatgaagacgccacaaagagagtgcttcacagcatcatttgattcttcagcccccaaatccattttccaactcaactctaagtaggacccactgtttcctgacagtgcatgcagttgtcaggaaagcacagaactttcttttgtcagcattccctagtcttttatgaggcagaactgtattcctgaggcctgtgctaaagtaaataccagaccctgtcggtgtgcaggaggcacccctcgctgtcaccccgcggtccgccattgaggttgcgttgatgttccatccacccctattgcccctggaatcttactatggagctgccctagacttatgcaaccactcaccgaggagaatctgcctcttatttcatcttcccaggaagttcctccttgctgggacacttcttctcttttctgctccctccatcccacttaattcttggttctsctttccttaccttccccaagtctccattggcctgggccgctgcccttcagcccacaccttggcagttggtggtgcctcgcagcacgggatggcagagaagggctgggcctgtcaggatgaggtgagtgtcccaggcaggtgggggtccagaggacgcatttccacttgctgtgttcggggtggcccatgacaggtgctgagctgccaggcttccgtccacagaaaccaatctgactgtaacttctttgtcccttgaagagcccttgagatgcagccagggtacagagcaggcaaatcaaatggctggtcgttgcaagcaggcaggcagctcctgtgcttcccatagggcatagctgactgctcccaagtcactgggtgtgtccagaggagagtgagttgctgggggttggatggggtggggaaatacacacatgggttggcctctctggtctcatccaagatgaatgtcctatgattccatgagtctgtgacacaaaaggaaaatttgattttataatacagaagaaagtcttttaaaatttcctaccaacaattaattttgccagtgatttgcaatcactcaccttttgtttcttgatgctctcatttctcccatcctctctcataatacagcagtctaaagatagaagcgtccttggaactgtgcagggaaaatgaattagagttatcaaagaaagtattaaaatactgttttcctttctcttttctctcttttttggctgcaaagttacacgttagagattttgagaaagacatttaaatgaggaaagcaattaaggtttaagcattggaaaggaatttacatgagataagaagggaccatatgaagttggttctcctttcttcttctgaaattgttctgaacgactctatcatgataaaactgatgagcaagaccctgtttctgtgaagagtaggctctggcctctctgtgaggtgtgctcgtgcggggagaaacctcttccaatatccaacattcaaacagcatttgtggaccatatttactgaaattttttttctctcttttgcaatgtcgaatgaaccaaaaaccactgaaaagagacaaatttagatggtatatgcaccattcacaatgcttattataaaactcctataatttttgcatcttgtttagtttatgtgtgctttttaacgtaaactttttttgaggcagggtctctctgtgtcacccaggctggagcacagaggtgcaatcttggctcattgcaacctcctcctcccagactcaagcgatcttcttacctcagcctcccaagtagctgggaccacaggcacacaccaccattctcagctaatttttgtatttttgatagaggcagggttttcccatgttgcccagctggtctcaaactcctgagctcaagcatcttcctgccttggcctctcaaagtgctgggattacaggtgtgagccaccacgcccagccaacctaaacctttttaaacctatgctgcagacatatttctaccatcttcctagatctcatggtgtggctatccagtaaatacttctcactcagtaaattcttaattgaacatcctaacttattctaaataaactttccctttttggtttccatattattcgtagtgtgttcatgtactacatttgccaatcatcaaagccagaaacacttggaatcatctttgatcttgtgtctttgactttctgcatgtgtctggtcaccagatgtgttggccaggtgatcctaccagcatgcagtttgagctctgaactcctctctaagcctccaggaagacacagcaagaggagaggtgccatcagtcccaggacttcgggtcctgcagggggaggactttgccgtccctccctggttgaggtgttctggtacttgaggtgggggatgagacctctgagaggtcttcatgcagatgaaggaagggtggcatccttccaaacattcctgttctacgtgcaatgcaggtctcctcttttaggccttgttttgtgtgatttgatttcttcagtggaaactaaggcagggagcccaggctgacctcagtgaacgaggttctccaaaggacagagctgcgtgtgaggacacaggatactgtggtctggctggatgcaagcggctgcccatgtgggtcccatctgcctcccctctcagcagcatttgtcccctagaccagagaattccggttgagaagctcccgaatccccacccttcgttcctctaaagacttacacaggagccaagcatatgaaatgaatgaaagttggagcttcagggatgcgagtgggcggagggagctggggcctcccctgccacctgagggccctcacccgaatgctgcagccctcctgctgctcgctgacttggacacatcctcctccatccctcttccacactgctgccaagccgccctccagaacgggccaaggggcctggcggccctctgctgccagcttcagaggatgcccgttgcctccctgttgcagtgcggtggttgcagctggctcaccctccctgggtgctgttcctggctcctcccctgccctccaccatgtcccgcacacatcaccacactcgctggtgcaattctgtgggagccgccccttgcttcatgctcccttggcttccaggctcaactcccaaactccyggtgcctgggtgtcagtctctccacatgcccttggggctatgccctgggtggtgctgctccctcccatgggaatgctcagccacctggatgactctcaccgtcgggtctgacagcctgagtcaggctggcctgtcctgggaagctttctgcatcactcttagcagggccagggcctccctgtggtgtggcctggaagtgtgtgcagacaggtgccagacagttggagatgctgttgtcactgtcctgtcttgaggcttgcatgttgcactcagtcataagctgtcaagggtgggggccttgtatccctttctccagccacgggctccgcgtccagccctgatcagatgctcaataactgtcttgttctatatgaacctaacttgctcgtgctccttcctgtgtctggaatctcttccccccaccccatctttccagccccattctaataccctccatctcttcagtaaagccttccttcacaaagcccaggcagaattgttgattagatggaatttggtgggaccctcagtttttctacaactcagaacaacaccacattccccgactgttgctttgatgtaaatattgtatttatccatcaggctaggagtgtgcagttaaggattgttaaagagtttataggagaccgtgggtttagactgagctcctgcactaggcattggcagaccagaccagctcagaaccaactcactcatgttctatatcagcaaactgaactctgaaacaggcattttccaaggcagagaagcacagcagcccgtcagaaggggccagctcacctgagctggtatcataggaagtcccctctgttttaacccaaaaaggagagtaactttgagatggctgatctgctgtttgtcccatgcttctgcttccttcmgcccttttctgcccgcagagccccctcctctgctcagctcgctggaacactcattctatctcatggaatgaggcattgcttgattctagaattgtcctaatttttgtcttttamcagtgtgagttagttacctattgctgtgtaacgaagtaccccaatgctttgtggcttcaaagaacacattttttacctcgcagtttatatggtcaggaatttgggcagagcttagctggctcctccgcttcagggtccctcccagtctgcagcagtgctgggcctgcagtcctcccgaggctgggcccagaagaagctgcttccagagccgtctcctgcctgccagcaggatgcagctcctctcaggctgtcgggctgagagtctcaactcctccctggcctttgcctggcctggctcagttcctggcacaagggcccctccactgggaaactggctttattagaaggaaagaggaaggaaggatcaggggaggtgagagaggagaggggaggggaggatgtttttataatctaacctcggaagtgatgtcatgtcactttggccatatctgttggttaggaacaacacatcactaggcccagccctcgtgtgctgggaggatatactcaaagcctgaatgtcaggaggggagatattcaggagttgttttggaagctgaagaccacacacttattttgtgccagtcactgttctagaagtaaaaccagacatggtttctgaaattaaggtgatttctgttcttgccctaaacacggttttgatatttttaggcaaatcgaagctatcaataggtattgactaaaaaraaaatataaatagatgtcaaaatgcaaacttgttgatatccattgttgtcaaaatacttataattttcacattttgaaatcaaatgttgatattaaatataccattgcaaaaatattaagataaaatatttgcatgaatgaagaaaagcaaaaccttttaatacataatgataaagtacaatgccagtgttaaaagaaaacctttagacaaattaaattaacagagtttaactgagcaaagggtgaatcatgaagggggcaggccctagaatcagaataggttcagaaagtctgttactacaaccaaaaagtagtcaaacaatgttaatggayagagaaaaggaaatgagggacagaaacagctccattggttgccactcagtgtggccttatttgaacctggtttaaccagttggccgcctgtgactggctgaagcttggcggctgtgattggctgagactcarttatttgttacagaagcatactcataagttagcctttcaatttatttacatactgagttagattggagcttattacacacagctggtatggaggcctctaaagcccaaatttagtttgatttaacagcagtctaacaatcaatactaaaaagtaatcttaaattggaatacccataaaataaagcctagaagatgcaggtagtcattaattcacataactactgagacagattattatagaagtcagaggggttatttcagaagtggaatgagaagctctgaagctgcattatatataaaggagcatggcctagatcagacctattggagaattccctgaggcgcttatgagcccagagggctgagcagaggtcagccaggcgaaggggtgatttcaggttgtcctgaacaggacggagtggcaggtgcaaaggcctcgtgctaggtgccgcacagcacaccccgaaactcacatgagggtagaacatacccacttctctcaccgggggaacaaactccagaaggtcagttccttatgctctgtcattattagtttgcacacaaccgaatagtgtccctttatctgatttccctttccggtgtgcacccagcatctactgcragataaactatctagaatgaaggaattgatatatgctttggcaacaatcaatttaagcagctctcagctagagcacaaaaccgtaaatctgctgcrattgctgggcatcaaggggcatcagcagttgctctgcctcactttatcagaagcaggtgcacactcatggaaggcgaaagagaaaggaattaggatccactgagtttcaatgtgcgccagtttgcacacattacctcattttgtcctcagggagcccacaacgtctttttggagacagggaaccaagtgcagtgagacagcggtcaatgcccgtgcccaggtctttcctccggaggcagcgtgggctctgcaaggccacctgtcttcactttgcagcaaaaccaagtcctcatgcaggggccgatgagttctaaatgcatggagaaacactggctcagcctcttcacctgcacatggtgatactaattatgtttgctttgccagaggaggatgtgggcagacgtgggaactgcagagagctccgagttccgagggaagcgtcacggaagtgtgaagggcgagggaagggatacccttgaatccttacatacttctttttcttttttttcttttttatttttttgagatggagtttcactcttgttgccgaggctggagtgcaatggcacgatctcagctcaccgcaacgtccgtctctggggttcaagtgattctcctgccccagcctcccgagtagctgggattacaggcatgcaccaccatacctggctaattttttttttttttttgtatttttagtagagactggtttttccatgtttgtcaggctggtctcgaactcctgacctcaggtgatccacctgcctcggtctcccaaagtgctgggattattggcgtgagccaccacgcttggccccttatatacttcttaaagttgtttccscttactcagtgtcccctggctcactcctgtattctccagctgcatgaagacagccacgggtcttcccttgcctgtgctgatcactgtgtggtcattctcctgtatcgttagtgctgtgcgcatcccttactggcttgtccatctttcattcacagctttgtgttgcaagagaaagctaatccttcccacttctgttgctctgtcatgtattgatagcaaattcattaaactccagtttcaaagtcacagcatgttggtgttacatcccttttggatatgtgaggtatcttttttggaggtctgaaaataggcacacacctttaaaatgtcagtccactcttggagaggaagaggatgttcattttgccgttgtctttcagctttttcttttggaggtagaatataatcaggcacatctgtggctctcaaacacttagaggaatttgatgttttcagacaaagtgatgttatcaaatgaagtgttattgccactgtacttctttcttgttttatcagttttattatttatttaaaatgtctcttgaatgactctgttctttaatcctctgggatggtgaaagacgatgtaagataatgtctgcagtgggaccatatggtgtcagttgcttgctcagctagttgttgcataatttttcatgctggtttcctctccagagataaaccaccacatactcattttaaatccaacatatagggtatcttcaggccgctgtgttctgaaggaacattctggccaaatgttccatattccccgagacttcccagtcttacagttatcatactgctgacattattggagaattagcagtccagggtgcactatgcatgtttgggtaagggaaacatgtcaccctcgcaggtctcataattatctgtagaatcactgaataagatgaggcccagcacctccattactgtaattcatgggcactgactatcattttgattgaaaatgtgtgcccatggcctggcttacagggagccctgacgtcatatcatagttaattatgaaaatcagatatgtgttcatgattcttggttctcataaatctgttgcatgtgaaaaacttcagctaaaagtcaagggctgttccctttgtatcaactttgtttagtgaataagaaagggaatttttaatacttgagaaatattyggcaatgcacagtttaaagtttttcagatttataccttgcaagcctccttataaaacagttaattttcagtgtctgagactcatggtcaggtcgattttaaaaggacaagctgaaaatgatattgtctttgctattgggctgctgccgactttgcagatctgggagaggcagtgtgaatctatttctgggctaaaaatggaatcaggatggattaccttagtctaggagacaacctttaattgtgcactttatctttatttggatctattaagttttaactggtggtcattttgctaaatgtgttgaacccagataaaaatttaaattgtgaaataactgaattacagaaaacgagagaatcagatgarcaggggtcccagaaaatgcattgagaataggtcgtttgcatccaggcaaggtacaacacagatagtcggtgagtgagggccgccatggctcagggagtctggagggggctccatcctcttccagcctggggagaggccccagcaaggggtgctgcaggggggtgagtacaggggccccatacctgccagaggactgcaccccactgccctgggagcaggctgtgtgcctctcatgtgctcrtttactctgaagagggtgtggaggcccaggcttcctttccctcagaggtgccactgacatggtttgtgtgccagcccaccctctgatccagaacgtccagacagaatctctgggcaaatgcaagctccaggtgccaggctcccggctgacctcacaagcagactagatatggatgtgttcggaaacagggagttcatctggccccggcagcaggagccagctgggaactcagcagaggagcccaaagccccaggagctgacctcagtccctccatagggcctgcaggcaggtggctggggctttgctcttccacccgtcccccatggtcttatgaagatcttaggtgtctgagaaaaacaggcaggtttcrgtcccctgaaactgccacyggagctaatagcatcaaatcataacattaatcagctgcccacgggtgggcaggcattgtcaatttccttcaaaaagaaagatgtcttcaatgacgatttgaaatttccttatacttaaatctctcctgagagatgtggggattaaatatgtcaccatcatgtggcttctgtgccaggttgtggcaacctcatctcagagtccaaggcaccaggccctggttctcctaaccctgaccatctctgactgtatctccctctccttccttcctgccccctgcaaatggatggaagttggattcttctgtgacagccaggtcctgactttccttcaggtgtttgggggctaccctggggcctgctgcccaccaygctrcggggctctgtgagcctcggacrcacagcctgttagaggaagtcagtactcggacactagagaaagatgcggctttgcaagctcagagattcccaggaagtgctgagctgcctttgggcagggtggctgcatgagcatgcatstcctgcacatgcagggttgggtttaatgctctggtgtctctctcttgatgtgcgtaaccgtttttgattagggagccctgcatttttattttgtgctgggccccacaaattatgtaggcagcccagctgctgatgtgtctttgccttcaggtagttcatgctttcgcgttacatgggtccacagactacagtcrcacaaatcagagcttcatttatttaaaccctcatatggtcttagaatttcactatcttcctggagcacctgctagctgtctgtgcttcacactgtttgtattagtttcttccagtttctaatcttactgcttctaacttgggagctcaatttcttcccagcagccttaccaatcactcccctgagctgaggaccgaccatagaaatgaaagccacacacccagcagggatgccagtgatcatggtcacggaataaggcaaaccygggctcaaatgctccctcccaagtactgaacatgacacttttcatttcccttatttgaagagcaggcacaataaaaacacctatcaaatatatttaagaattacatcagaaatgcataaacaggtagatgtgtttagtgcaatagctcatagttaactccctgaaagaagagtaagaaaggatgagtgatgcgtgcacgctgctagaccaggagaagagcagggctctgggaggggcacagtgagcggggatgaaaggtcatatccacctgtgtgacagcaggacacctgtgtgccctccctgggcctctgtttttgtatttgttaaaccctcttgtggacgggctgattgtggattaattagataatacatcaaatgcctgtgatgttgtctgaaatatgttgaataagacctataataagtgggtttctctattctgttctgagacgggcctttccaaaagcagagaggaaacacacagctttttggtagaggaagaagatttaaatttaatctctggtacatcccgttctgatacctatgtatatgcagattctaaagtgagatttagtctctatattgggcatggmctgagatagtctccacatgttctttgatgacacacaaagagattagccgtagggaaargacacaatattttacttcctgtatgaaggaaggcatttgctttgagctgtttcctccttcttctgtgctcatgcctgaaactctgtccctggggccccctggygaccccaaactgcattctcccctgcttcccgagggtgggtgaaattactgtccctttctcgcaggcacagcagggctgttcaggtctccagccaactcccttcacctgggaggtggcagggcagccacacaccattgccttgcccttcgtcctgctgttcctaggataagatagcatctcaggggatcttaggaggatctctgggttttactaccagtaaagctgtaaagcccttatttgcccaggagaacaagatttcctcgaatacctaaactcagtaatgtagaagcagctgagttattaagattcagacttctggagggggctgtttttattcttgggtgttttatttccaagtggatgacaataagttatttttataaactttttaaatttaattataatattattaactatttcttaagttatagactaattatctgtaattacaaggaaattacttatagtagtcatacagtattaccactgattactatatattaagcattacaatttattaccaatagctgtacatattttgcttataatatgatgtttaatatcatggtcctgctattgcaaattatgtagtttttaaactcatgagaggaagagatttatccattttatatggtaagaggaaaatgatccaaatatggtcaaatttatactgctgttagctgtagcacataaaagtcatacaatgctaggtgtaaccagataaattgaggcaataggactcagaccacaaattctttgtatttattagatgaccatagtgcagttgttttttacatttgccttaaattctatagactttcattccaaagggaaaaaatctagacaagctacaattgttgactctcctgttttcagtcattttaggtaatgattagacctgacctaaatttactggcaatttagaatctcagaagaaatgctgttttattgattttattttttttattgaggttatgtccctccaaaatgcatctatccatcaatgtccatccagaagataaactatagtgaattagccattgtttataatggatacacattttgatgaatagtatatgttgtggactgaattttgtgtctcccccaaaatgcatctgttgaaatcctaactcccaaggtggtgatattaggaggtgtgtcctttgggaaggggattaagtcatgagggtggaggccccacacatgggattagtgactttataaaagggacctcagataactcttgtcccttcctctgtgtggggacacagcaggaagataccatctaagacagtagtccccaacctttttggcaccagggaccggtttcatggaagacagtttttccacggaccagggctgggggtttcaggatgattcaagtgcattacatttattgtgcagtctacttctattactattatattgtaatatacagtgaaataattatacaacttatacaactcaccatcatgtagaatcagtggagccctgagcttgttttctagcaattagatggtcccatctgggggtgatgggagacgtgacagatcatcaggcattagattctcataaggagtgtgcaacctagatcccttgcatgtgcagttcacaatagggttcgtgctcctgtgagaatctaatgctgccactgatctgacaggaggcggagctcagtaatgtgagtgatgggcagcggctgtaaatacagatgaagcttctcttgctcgcccgcctctcacctcctgctgtgtggcccagttcctgacaggccttggactgatacccggccacagatcgggcgttggggccccctgatctaagaggaagaatgccatgtctggtagaaggatggtgtgttctctgtcccacccccatgaaatttctggtggggactggtctgtctttgtctcttgagagtgctgagttacgttgatcacaacacctctgatcaccttgggggggtgctgtcactcccgtgccgcaaatggtgaccagatcagagaaaggactcagccctcaggtggtggcaccatagccagtggccagtggggcctcggcgtgtggcacaggtggtagaaaaacttggcattctgtgggccaatgtggagtgttaggcctggagaatcacagaaaatctaagcataaggcccttcattcctcctgtaactccttgacaaaagaagtgccacagtgcctgtgagggtgcatgatggcaggccacttccctcctgctgcttctaaaacacacgaaatctagtatcaagacaaacaaaaataaatgagcaagaagattcagcaaatggatcagcagatgattaaaatacctaatgtagagctatgctcatagtttaaaaagtctagatacagtggacaatttgggggaaagattaacctggatcaaaagaagagggaaacacaatttcatactatactgcaagactacattaaccaaaatagcatggtactggcacaaaaacagacatacggacaagtggaatagagtagataacccagaaataaagcaacacacatgcaaccagatgatctttgataaaattgataaaaataagcaatagggaaaggactctctgttcagtaaatagtgctgggaaaacaggctagccacatgcrgaagaatgaaactggaccctacatatcaccatatacaaaaattaactcaaggcggattaaaggcttaaatgtaagacatcaaaataacaaaatcctagaagaaaacctaggaaatacccttctggatattggccttggcaaagaatttatggctaagtcctcaaaagcaattgcaacaaaaacaaaaattgacagtgggaccaaataactaaagaacttctgtacagcaacagaaactatcaacaacccacagaatgggagaaaatattcactatgcttctaatagaggcctaatgtccagaatctataactaacttaaatcaacaaacaaaaacaaataaccccactagaaagtgagtaaaggacatggacagatacttctcaaaagaagacatacaagtgaccaacaaatgaaaaaatcctcaacatcactaaccgtcagagaattgcaaatcaaaaccacagtgagacaccatctcacgccagtcagaatagttattactaaaaagttaaaagccagcagggttggagaggctgcagagaaaatggaacacttatacactgttggtgagaaggtaaattggttcagccattgtggagagcattttggagatttctcaaagaagtaaaaacagaactagcaatcccattacctagtatatacccagtggaaaataaatcattctaccaaaacgacatatgcacttgtatgttcactgcaccactattcacaatagcaaagacatggaatgaaccaaagtgcccataaatggtgacagaaaaaagaaaatgtgtaaatatacaccgtgaaataccgcgcagccattaagaaagaatgaaggcatatcctttgcagctacatggatgggaaggtggaggccgtgatcctaagtgaattaatgcagaaacaaaaatgaaatactgcatgtcatcacttataagtggaagctaaattttggatacacatggacataaagatgggaatagacactggggacttcaaaaggagggaggggccgggcgtggcggctcacgcctctaatccctgcactttgactaaggcaggtggatcacctgaggtcaggagttcgagaccagcctggctaacctggtgaaaccccatctctactaaaaaaaatagcacgcacctgtaatcccagctactcaggaggctgaggtgggagaatcccttgagcccgggaggcggaggttgcagtgagccgagatcgcaccactatactccagcctgggcgaaagagccaaactctatctcaaaaagaaaaaaaaaaagaaaaaaggagggagggtgtgagggggccaaggactgaaaaactgcctgttgggttctgtgctcactacctgggagatgggaccgatcaaagcccaaacctcagcatcacgaaacatatccagggaacaaacctgcacgtgtaccccctgaatctaaaataaaaatagaaataaacaaggaagaaggaaataagcaacactggaaaaaactgtaaaagttatcaaagaatttcctccaaaacaggttccagagccaaagtcacgtttttcagaagcaacattcccaaggctgtaagacttgactgagtgttacaagaaaggcggaaatgcatccgtttattttgtggtgccgccctgactcccatacagaaaactggccaggacaacgcagagctgcagatccgtcagatggaayggatacagatcagtcttgatgccagggacggtgcttcaaaagcagctattactctgaaaggacactcagcagatccgggggcttcaggttgtgagatgagctctgtatcgagcggggaggaacagctgctgtgcaccacactgaagccctgagaccagcggggaactacctgtctttattaagatcgactacaaaagtctaagttactgtcctcgttttgagggggactctgagtggacccttggtggaatggttgtcagccacaaagcaagagcgtcaaacctgagagtgaaactgggcaaagtttgtaagttacagcccargggccaagacctgtttttttttttttttttaaatgacttgtcagctaataatagtctttacattcttaaaggattgtgaaaaacagcagcagcagcaacaacaactagccccccaaacaaaagaaggctgtgtaatagagactccgtgtcccacaccagagcagcctgtgatagaggctccgcgtcccgcaccggagcagcctgtgatagagactctgtgtcccgcacyggagcagcttgctagcacgtcccgggctttcaccccgtaacatcttaagaaggatggaaagaccaatcagtacaaaaaaataacctgaacttgttacatctgtaactcggggaaattagttctaaagctatcattatttgctaatgttataagtatttatttaggaagtcaaaaggagataatggaagacttagatacaggcggagcatcccaaatctgaaaatcggaaatccagaaggctccaaaatccaaagctttgtgagcactgacctaatgcgacaaatagaaaatcccacacctgacctcacatggcaggtcacagtcaaacgctggcgcagaacacacggtgttttcagcgttcccataggaataataaaattaccttcaggctacatgcataaggtgtgtatgaaacataaatgaattcctgtttatacttggtttccattattaagatatttcattatctgtatggaaatattttcaaatatgaaataatctgagatctgaaacacttctggtcccatgcatttcagataagggatacccaaccagtaatgatggagattatcaaaggtttgagaacaaagcaaaagcattctcaaaagtcattgagaaaaaaaaatcatcccagaaatactagggaaatatatggtttttaatttttaaagagttttatattattttaattggcaaataataaatgcacatattgatgaggtacaatgtgacactttgatacatgtatacattctgcagtgatcaactcaaggtaatattttttaaaaatttgcaggaggagaaaaatcacaaatagtcacaaacagaaaataaatgtacaggctgggtgcagtggctcaagcctgtaatcctagcactttgggaggctgaggtggtgggttacttgagtccaggagttcgagatcagcctgggcaacatggagaaaacccatgtctacaaaaaatgcaaaataatgagccaggtgtggtggtacacacctgtagtcccagctacttgggaggctgaggtgggaggatcacttgagcctggggggaactgaggccgcagtgagctgtgattgtgccactgcactccagcctggttgacagagtgagaccctgtctccaaaaaaaaaaaaaaaaaaaagaaaagaaaaaagaaaataaacatacatattgagatattgaacccgttgtttgagtcaggcatggttttaggtcctgaaatgaaaattaacaccagacaaccagcctgagaatttgcaagaatgttctaaaagtgatcatgcagtgctggaaaaagctgtggaaagaaagtgagaagtgttgtccagtgttggtgggagaatgaaactggggtgtgtggagagcgtttgtgagaagcctccgccggaaggagctcagatcctgctgttggtgctccaagctcagactgartgggaagttcacaagaccccccacggtggcttccactgcaaacagaaaaccagtggacgtgaggatgggagaggtggtggatgagcgttttcattaaagttgttgatttattctgcaataaatggaactcgtttgtagggtagctttttaagaatggctccagcacactattctggattcttcactgatttctcttgagacccaagactgtgatcgggaaaaagcaccttctcatcatctagttcctctgtgtgcagtgtgtgcttgggtcctccttaatgaaaaatattgtccctgtctcctatctcctcttgttcagactctatactcttccctgcttattatcaagggaaggattcagagacagggtgtggagtaaacattgctctcatgtccattgtccaggtggagaaataaaccttccaacagtggccagaacccctaaccccagccccttcttgaagcttttagtccttgattccatttttttggtcatcagatttttagctggtggttttttccaagggtggatctttcttcctaactcacacacatgaaactcctctgcttcttgtgcccattgtggctgacaacttcaataaagaagttttccgatctggccaggacaaaagtcacagaacataatttttatgggattaaaaccatttctgctcttgtagtttcagtagagaatgttttctgaaaccagcttacaggaaggcatcaacacttacggtgatttatgcctctgatttttaggagaaaatggtaaatgacaagtacaatgcctgagatttattaaaacaaaaacatttcagagaatgtcatggggtggtttgaggtctgctcaktttcctgtgccttatacatctacggggctgcacgatcctagaagacgtgtctgagccccctggaaaggcctctgggctgtggagggcacctgtgatggagagaggtgtcctggccgccaggtcaccctcggggctcccattgctcatgtccttcaggtgtttcctaagtaaaaactggtgttgttgtctgggaatcttaccacgtacttattctttggaaatctatcataccagcaggtggaatcggtgtagttcaggacattcgccatttaatcgagacatagaaaagccatgtttacttgcctcaaagaagtcccgctgatgaagaaataaaggaagtttccatgcacatccactaccagaaggaaagtcatgacagtccgctcccattgcaactcgagaggatgtgtgcattggcctctgcaaccgggcttcttacaggacatgagtgcattctccatccactgggaggcggcttgtatactcactstcacagtgaatctgccgacagttctcaaagctgaggaagcatacaggctttgcccgtggttgggtggygaggctgcatttcgtgctcatctgctccatctgcagagccagccttgaattttaaagtcctgtcttactggactcctgtgatgactcactatgataacgcatcagaacacatggatcttaaatacgcagggacaaaataagagaagcgctgatttctccaaggaagtccaggtgttcccatttacggtgcatctgagaatggagatgatagggacaagagtccacaccaggctatctccgcacagcagagctcagaattacagatggcagagccttgctgagcagtttagacgagggtaaagatttttgagtatgcttttcattgtaagttttggaggcgtccattagggccactcagcagaggtctgaatcatctgattgctctgtttgactcagtgttggaagcctgttgaacaggaaatgagctatttcttgctcaaccaggagttgtagcatctttgaagtttgggaagttaatttataaattcccaactgtccggctacatgtcaagtgtctggtcattgttttgatttgttgcaacctgtgaaagtactttttttttttttcaaagtcaaattgccatattggaaaccaggagccaccatctttaaacaattagagattagagatttgctatgactttacctatacagtgcttaagaccgatttagtctattagaaaccagtaagttcgcgggcctcatcaaaattgataagtgattagcactgtctataaaactatgccatatcgtataaagtaaaattgcttcttaactatctttgtgttgctatagtacatatttctgaaaagctcttagactaaatgcaaccgtcatcaccaataaaaccattaatgaaccctatacacaaatgaactttgaatcctgtggccactattaaaacaattttagatcttgatttgccatttggggaatgctaagctgctgtaacagcaggctcaaactaattcactgaattggaaaatatggaaattcttcatataagaactctgaagtgagcatttcaggctggcaggctgccctggtgccctctgccattcagggaagcagaagacaatgaaggctctgtcactcccaacacgaggctgcaaaggttgccatacatgctctttctagccagcaggaaggcctgaagggcacccctactgctctctacatttcctttggggagagctgagtcttggggccacagccagctacaggtggtttggaagcggggttcccatctgacagagaccatgctcccacctgcagcccttctgttgtagaaaattggcaaaacggattttggtggacaaatagcagtctccatcaccgttctgttattttataagctgaatcccagttatgagatactatgttggctataatttcaaagtttctattgatagctgttataacacttttattccaatttgaaaatttggatcaataaacattgaattggagatatagttccaaatcaagaatataactgttcacctcttacgctgttaagaaacctaaaggcatttgacatacactgttttgcatttctatgttagatgtccaagagaggagacatgtgttccaagactgtggtcctgagatggcatgaaggcgagtgatgcagagtgaaagggtttcctgccatgggcataggtctgggtcctggcagacaatggtgcttcactgtgaacaaagacacagttcgattattgaccactaggtggcaccacggagaatagaaatgtctgcaccaatcaccagggagctgggagtgctctttccttaaggatctgtattctattgtagcaaaaggtggccattcctgctacctctgtgcagtcaaagcttattgaagaaagaacaatgttctctttttagattttcttctcttaagtagaaatttattataacctttagtaatgctataaaattaaacactagactttccacaatgtggtcataaaccaagagataaggaaaaatggcaactacattattttaaaatgtgtattttgatttatgtgacagtaaggggagtttaaaatccagttggtttttaacatttttgtatctaactgcttgttgtcaagagctttcccaggagaagagattgtctaagaccattatgcatatttgtctaatgtgaactttggttttattttgcagcaagaaagggtggggtggcacctatttgaatgcagcccactggcctgttggtgcaattcctccttggccacactggcccctgagcagggttggagcttccctttgcaggttggtgcacaaagatgtggcatgctgctccagaaactgctctgggaaactgctggtggccccacaggctcttggaactaacagactgtgtcattatcacatgctgcaaagcaaatccctgcttgtaaggactcagctcagctttagaagttccctgagacttcgagaatgtcaacagatgcatgctttcgtgagtccatgccattcagtgaacttgatggaatcattctgtgtgaaacgttaagtggcgtggggatgatgcagagactatttctgacgagtccctgcccaaaaggaaaatcaaatgatgaggcagcaggagtcacgtctaagtggaaatacagagaccaagctgtagggtgtaaggaaggagggacctttcttcctttgccactttcactggttattttatgtgcttgaaaatagccacaacactttctcccctccataaagggaatgatggctttggtctagtttttatatgtctctcttcagctctcatgtctcctagtggttctgactacaaatagttccattgtttcttctgtatggtcctaataggtctctgaggtttttttggaatcactaaatgccaccaaatactctctagtttacttaatagggcgatggccatacctccctacaattttcctgagtgacaccataagtagcacattttgaatgtaaaagatgagaaggtcatcatacaaaacaggagtctatgaagaatgaggcaattgccattgcttacctgtgtttaatattttcttctcccaataaggtaaacctatagacaggtgttgtctatgctggtaagaagtgaaaggccaattggttgagagtttattgtgtacttttacgaccatggccgtgttcatcaggcgtctgctcttacatcgctggtgcagtgaatggtgtccttgcatcactcgaacgaggatgccccagtggctaacggtgtgagaacaccgcactgcctgctctcacactgtatacggggctgggtgggttctgaacgctggccatctggctgattagggtttttaataagtctatcgtaacaaaacaatgctccattgaggtaactgctcttttttttttttttgttaaaattaaatgtcatattttgccctttcactagaaaacaaactgttcagctgcataaagccctccagattatgatttaaactgtctcaagtttcatccatgtatttatgagtgatgttcccgcatgccagtcacaagcagtagagatttatgggcagtactggtttcaaagaaaatgctcaagttgattgatggggcaagtctccctatctcctatccccctgctccccaccaaagagaaaaaaagtcttttccctgctaactgcagtgccagctttgaccctgacttagttgataaccttgaataaattgcattccagtagcaagccagatggattttaaagggtatccgggcctggtggaagcctcagcacccctctcccgccccgtgtggaaatcctgctgtgctcccgagaggcactgcctgccctctgctctggcattttccctaggaggcacttccatgtttgaacagttcctatgactaacagatgcttctcaggaagctgaaatcagcctcctccttccttctgtccactgaccctatactttgccttctggagtgctacagaatctctctcatccaccatcatgggctgccttccgggcaactggcggcagctgtcatgttctctgagtcttcctgtcccatgagagtgcctgtgatagagtttccagacctggccatcccacaggactattggctgtgcaaacggggactcccctttggagccagagtctgtggatgtggagtcacaggagagggagctggctccgctgtgcttatatgtgcaggtgggcatgtgggtgctggtgagttcaccctgaccacttttaaaagactgagtatcggctgggtgtggtggctcacgcctgtaatcccagcacttcaggaggccgaggcaggcagatcacctgaggtcaggagtttaagaccagcctggccaacatggtgaaactccatctctactaaaaaaaaaaaaaaaaaaaaaaaaaaaaaaaaaaaaaaaaaaattagccgggcatgatggcaggtgcctgtaatcccagctactcaggaggctgaggcaggaraatcgcttgaacctgggaggcagaggttgcagtgagctaagatcctgccattacactgcagcctgggcgacagagagagactgtgtttcaaaaaacaaacaaaccaacaaaaacaaaaaacaaacaaasaaaaatcactgagtatgtcaatctttagcttgagagcaggaatagatagttttaactaactgtgaacaatcctttaaccagatgttttatgttcatgtgcaggtgccacaagggccaggtgtagagagttagtacttactagttaatgctccattaattttcactgaactgtaaaggatgtgtttaaaagataragtaaatcctaaaagagaaatttaacagttaatttctttggcgctattactttatttgtaaaataagtggatttggccaaaattatatctgggatctttttggcactaatatctgctgatcctttcaatagaaaagaaattcatgtatcatggttcaatgtcgtgagacggcattttgcactgcaaaatgtaaacagcaggtgacgcgtgatgcgttttcccccccaatgaggaatgagctcaaaggatgaaatgtgtagttttaattactcccttgcctaagcccgactaaactgttgcaagatgaggacaaaattggagccatgacaaaagtggaaagcagctgaccaacacagcttccctttcagtgttatccctgcctgcgcctcagggacacacaggagtgtcttcgggtggacgttttcaggtggagatccagatctgcaggtgtctttggcaaaccttgtggagtgcctgatgtagtttggatgtttgtcccctccagatctctgttaaaatgcgatcctcagtctctgaggtggggcctggtgggaggtatctggatcatggggaggatccctcacgaacggcttgggccatccccttgctgatgagtgagctctagctctgagtttgcaccagatctggttgtttaagattgtgtggsyccctgtttccctggcttgctctgccctgaccatgtgatgcgccttctgcccgtgactgaaaggaagcttcctgaggcctccctagaagcagatgcttcctgtacagcctgcagaactgtgagcagttaaacctcttttcttctaaatcacccagtctcagatatttctttatagccttgcgagaatggcctaagacagcaccttaggaatgagccagctcaggccaggtggggttgccctgcagcctggcgtcaatcactgccatctttgcaatgagcacagagtccgcccctgcagagccccccaggtcagaatgagcaacacaagctgttctgggaggcaggaaagacctgctgaccacccggcctgctcacccacttccccacaccccttctccttttgcctcctttcctgacatgggtgtcatttcagggttgacatgaaacccacacagtccatcccttactgccctctaggtgctgtccccagtcagagaaatgatcaaccaagcaactgtttttggagacgcagtagattcgtttaatgtgtttatctcaagatgcaaatgatcccttgagtttggagagagaaatggaaggaactggacacgtagtggggtggcagagagtgcagggtggaggtacagaggaagtccgcagcctctccccaggagggcgcagggtggaaaacatgcttttgatactggatacttgcagtgttggctagcatgaggtgtgagaagcagatggccrcacgtcactctggttagagaagtgaaatgtttcagcctgaatcgggtcttgaccatcaggtgtgagagtccctccaggcccgscggtaaggcctgtggttgcgctggagtcatgtgaaattggagcttggtgcagcgtttctgacccttctcttcgtccatgaatctcacccgttctcaggagccccagcccactggctcctcaggaaagggarcgctgggctttctggcctttgtctggcttggttgggtggtcttgttgaggggttagggctgaggtgggcagctgcctctttgtttgctgtcctctagcccctgtgtttcaggaagcatcctaaataatctggtggggttgccttactgcttccatcatcctccagccactcttctttcatctcagctgggggcccaaagcattatttaaagaatgagcgtgcagcacgcaacccacaggagggcctcatttgggccttctcatcagagcagggtgtccacaggtgctttcaggactcagggcctctgcacaccatcccgtgtgttagcaatactttatgattttgtagccatacatgactggttattgatggtgcactgaaaaatcaggactgagtcccaccttctcttcatgaccatctaaacatctttaaacgtgtgtcaagttgtgttccttttttaattaatatacaattgagacactaattttagtcagttaaattttgttcctccaatagagtcaccagtaaagaggctgacatcatcatttttcctgagaaggagcaggtgccgtgtggtgggctcctgcaccctctctttgaggcaccccattgcttccttggcagctggtgactagtctcacgttggctgccactctcaatggggacactcaggaggaaaggctgtttatggcggtctactttttactcaccataacgagtggatgaatgaatgaatgaatgaatactaagtgaacaaatggatgcaggaattctgctttatgatctgcacaatgaaacgtttaaataggacttggctgttgcttctgtgctggggattcagcaaaacctgctgctagacagtcatctttatgtctaaaaactggaaaggatctgaggctgttacattattattgcaagaattgaaggcagaaatccaggaatgtgtttttccctggttggtcggatgtttcccgatggtgaggacacagcagcccaatttctctctcccttggtccccggagaagctgctgtgagtagccagtgggtctcggttccttccattcccaatatcccctgggtttggaccagaacatttacaaggaaatgtggagtcaactccagtaatctctgtgtgctttgtgttgttttgataaaagatgtgtagcataagactttcgtttgcaaagaacttacaagagaagagaccttagctgcctgctgagcagccttccggcagtcaccggggtcaccttgccaccactgaacaaccaaaatgctgcccaataggacacagcactttacttgctgctttttgaaaaataatggaaaaataacctgaacgttctttcagccttgatctccattggattcctctccggggaatttaactagacagctgcaacactgtgtggacttcggtttccaaacagagaaaatcctggtcaatttagacatgtcaacctggatttatacttttaatgggaaaaatattctctgcaggaagatgacatttgcctcctattctgagaaaatgactgattttgcatgatcatactcctatactgttgctcaatgatagctgaaataaatcagcgaaagtgacattggctgtttgcaatgattaaacattagatgtctggaaaacatcctttggtcatttatattcaggatatttcagacatctctgatactcctttttttcctaagccctgatagagctaatagtacttactatgatatagttacgttcatacaaacctcactcaatactaacagtgtatcttttaagcatcaaagtcatcacctgttgtagttattccatccatttctgcatattcttgaagttgtgtggccattttttctgtgtttatgtcttttggagggatagggctgtttcagcgttgctgttgaatggtctagaagactggctggtccaaacctgagacaagaaagagctcctaacattagaaacaattgggactgctttcaatgagatgccaacacatagttgatgctatgattttaaatatgcctggaagaaaaagaaaaataggccccatttaagtggaagcatttaaaagtagacctcaggccaccagaaggactttcagaaaaacaagtggtatccacaggtgcagggaaagacctcttagtctgagagcaggtattacagaatgtgtgggctgaccacagagagaggccagagcctgatcagcattcaggaggtcatatgtgggtcacttttcctggacgcccattctgttctatcttgaaaagtgatatcttgttcatttgcatgcttccagaataatccctttcctgattttatcccgttaaatccttcaagttctaggagtgaagaaatttgtatttctttagaatatcacatagatacactgctgctatctgtaatgctgagaaatagaatgtcaagggtgaggcaaacagaaaccacaactacatactacttcagtgcaacaggactttgaggggcatggtgggataatctgactactagcttctctctggccaagaaaaatacaaatatcagcaagtacaggagtgcactgttcctgggttttaaatcacgtgcacacatgaaaacatagcacagccctgcccagcctccctgcggctgcacctttgccgtggagggagcattttgtcrtgtaatgttctcccgtccctccagtgggagcatctggggctggtgaagacktggcactccaggagccgagtggacctggggtcacccagataaaagccaccaggcagggcttcagctctctgccttctcctggaagttcgtgtctgtgtttcactacgcagctggcggggcagggctaggtgttacatggactttgcctcactccccatccacccgcacccttctgtgtcccctctcgtgatgtatgatggagggagcgtgttcctgctaagggctcgcctctgcccctttccggagaacatggaatcaccttacccagaaggttttgtcccatgctccccagggtggccgacaaccgggtcacacccagggcctttgctgcagatggggtgattctgtgatccttggtgctccagagtgcccctgtgggccaggctgcagctgcctccagctgagaccgcatccttagcttttcctcctttctccactccccttccctttcctgactcatcccatttcaggccccgattttggggaggctgagcccatcagcttaggcacctggaactttaggtctgttcaggcggctctgccttccaagcctggctgttcaggcctcctctttattttgtgaacacccagctatcctgtactaatctcttttctgttctaagtcagctagggttggtgtctcttgcttgcaatcaggagatctaacagctttatgcctggatctgctaggatcagatcagaagagggaagctgcatcatactttgaacatgaaaagtttaatatagagaattactaataggcattggagtagagaaggcttagctagtaagtagagtgcacagaagaatacaggaatagcagagaaaaggagcacattaaaaagaaatagatacctaaggagggatcatggccatggctcaatggatggcagaggggttgctgcagagctgcacccatgaaacctgccagaaatctaccctccaagctaccagagagatctgctcacaggaaggtgtctcactggggaattactccactgaaacatcacccgaggaaggtgctggtggaagctgctggctgcgaagcataaccactgctgtgtaacagaggagccaggtgctgggggagatgctcgcactgcaggagctgggcactggggaaactgctgcaggagcctgcggctggaggagccatccacactgcaggagcagagcattgcagaaactctgtgcactgtaggagcctggagctggaaaggccctatgcactgtaagaactgggcactggggaactgtatgggtggcagcggtctggctgcaggtgtctgctcagacagcactgcagaaacaagaaggaaacttttggcaatgtttcttcagcatcctctgctgacaaagcttactgccagttagcaaaggagatatatttgtagggcccagatccattttcacaaaacagtcaatgaagggtgaattcagagctgagaggcatggattgatacttggaaaaatgcctcatttccttacatgttgcactggcagggcctcttagctagtcatggatatgacagggagtctgtgataaacatgcagtgcagttgcaaagagaaagactgaagtgggtgagttgtatcttcttcaaaaatgaaagtgaaaaacatttacctgggaactgcagttagggcattttgtttaatcagtgctccataatctcttactctcccagtctccctgaaccttctgagagagatgatacctcctgttctgggtaccacatgccactgtttcccagcaagcacaccactcaggcatcattgcaggaactgctaattttaagtaggactttgtttccccaccttgcaaatgggaccctaaatcccaagggagagaaataactaagagaaggcatgtttacgctgggtcaaatcattttgccctcgttcttgttttgtcagcttgcagttctgtgccacaaggcagctgcaggggtgccgtgtgcccttgagacatgggtctgctcacagaaccctcaagctgctcagtgcttcttaacaatgagtaatacttccagggttttatatttgtgaattttctaargtcaagtataattttgggattagacacttgttctagacattcatggcatagtggagggagcactggacatagaggcaggctacatcystctaggcacctgggccaccctgaaagcctctctgtgtctcctgtctcaattgctgtgggcccacaatgaatgagttacatgaaaaagttctaaaatgttgtgcacttctacrgttctaccgtgtatcaggtaactgtacactgtcagagagactcgcgcaggaatcaaaactgtgcatacacatccatctcctctctttcgctgtgtgcatatragggtctgagtgtgtttatgtgtaaatatgaaagggaaaggctagcagagtataaactaaaatgttaactgccgttattataagaaacaggattattatttaaactatgatttaaatttccacctgtatactttactggatcttccaaatgttacacaatctggaatcatcactagtattatcaggaaaagtagaacttatttagaagtaatattcagctcatctgttttcagagtataaatacccatgttgaaacacatgcaaaaatcagatgccttggtcgttaatatccactggagaaatgggcacagagagcttgcagtagtgcctgtggatcttgcaacagtacattgtggaacagtgctttttccaaataccattctgtctctgctcatgctggtaattctatcgtttccattggaagacaatgcaagctgcccttcccagaagaggcaggaagagaagtgaattagagagaggaaggagagaattgtgtgttgtgaaaaaaacagaaaaccaaggaagaacaagatggctatccaatgctcctggaggggagtcctcccccacgtgaggacagggcaagtgcccagattccacttatgtcatcttgtctgcaaaacaaaaccttttgcaacagcctgaatgcagtttggacctttctctgtatcttcagtgccgtatacaaagagacagataatcaaataaggatattgcttcccattggtaggatgtgcatttggtgtgacccaggaactgttctggaacattatcaagaggttatgaccatatgccaagttgaaaatgtctgttttcatcattcagagggactgtgaccacatagaacattccattatgccaggcttccctcctctgttcaatccaactgcactccacgtatgagtgaaactcattgaaaaatcttgtgaatataagtttcacatcagtaaaatttcctctcttgcacccttaakaatggaattatgcttgtcaccaacatttggaagaatatttggtcagttcatatttttgcccttttttgctttagagattgaagtasaggatttgatgaaatgttaaggtttatgacaatttgtataaatgaaaaacctggaatgtatttcttcttggccctgagcaagcagtgaccctaaaggcatttgggaagccagaaatggagtgcactggtagggtgatttatttagaaaataggaatcttggaaataaatcactaaagtaagtgtttcagtgatggatggtcacatcttattctgaatttagaaaatgagaactacccaattcactcctttgtgttcaaaggtagcccctcagagcctccctgtggctggctgaacccagctccgctttgcaggtgcagacgggactgcgaggtcctctccagcctaaggacctcctgaagcgctgggagaacctgcttggtggctgctttctaatgccctgttcatctgaataactaggaggaagtctgagcttacaatcagtgtctgtgttgtttttcaaaatctgggctccctcgtatcctaggcaaccatttagaggagagagaatgcaaagtgggaggcgtcctgtgtgtttaagtcacaacccctggtccctgggtagtagctgtgttgatattgtcattttgaccctttggggccaaagctgctaggagccagtggtgtttggtggcattgtgttgcatgtagaggccaaggagggggcatttctacccttttgccaccctacccccttctcctctcttccctctgagtccagtcgcctcggacagcgctgattcgaggtgaggctagaggaaggcctgtgctaattgcacactagctgacatacctgccccacacctgctttgttgcttttgctggtaaatgcagcaacgacacagcaaacctgagtgctcccattagggaagctggtgcacctgtcctgatagagctctccagcttgacggatgtctgcctttcagtaccgtgtccatagatgtgattgcttttcctgactggggcagtctgcacactgtgggaaggccagcgcaggtgcagcaaaagcacctggcggctctctctggctgtagtacggtgaggctggggttttctccctcagcgataaagcaatatcaactggagatatgctgaagacctattttctagaggtgtcaaaattgtaatgtttgcagacagatatggatatttactctgaatttgggttgttaaggtattaccttcttaaagtgtatcttaagcttgaagattgtattcaagcgtactaagatggcttttctggtgagcagttattacttgattagttgattactttcctctttcacagttgtggggataagaaaaaacagtctccacagctcctctcaggctggaagatagatcaggtcatttcctactaaatcaggacggtatttaagccataagcaaagccgcacaaagagctcacctgattggttagctattgcagttcctacagccttgattttctcatcccgcccttaaaagtaagagcctttcgaagtaccccacctccaatcatgctttcgtaatgacagcttccttctgctcctgaaggtcctgaaggctgccagctctccttgtgagtcttctcatggtctgaaaactcaagcctgcaaggaaatacattatttattttttcatattacgaatggaatttctctctgtgtccccagtccactcggtaacattgtgaggtacatcaactttgtcttcagcatcctacctccttctccatggacacccttctttttcttcattccttcatttccttttcttcattccttcatttcctttttccttcattcctaaccacccaggtattcatcttagtccaagattctagaggacactcaaaatarcttcagataccacctctctcaggacatttcatctcacttcatatcagcctgtaggattcattttattagggtatgctaattgttgtgacagatagactccagagggtacaatgactcaaatgacaccagtccatttcttgcacaagtgacttactgcggaaggaacaggtcgggggcagtgcgtctccaagctggcctgagggagaaggctgacaaggactttgccttcctcagcccctggctcccaaggtgccccaggattgtttccataccacccaccatgaggaggaaggggggtttgccagaggcactgtgggccaggctcagaagtgccacgcttctctctgcctgtggactcactcaactgcaagacagcccagaaagttaattcccaggagaaattgttccctgtggagtggaaaatgtggaattctgggatatggctggccatccctgccacagcccactgctctggccagcagatagtcagactgaccctattttccaaatgtaggccaaatacatttactaccaaactagcaacaaacaaacaaacaaacaaaaacaagttcctgtccagtgctgcatccagcccagggtcccggatacctgagcagtctgttgagtgtggggtgacttgatgtgtccagggattgaggactcccagcacacccatccaaagcatgatagggaagcagaggcagaatcctcyctagaaactccctcctggaaagggaatagaggagttcacacagccttcaggaatggagcctcatgagatcctgcctggcagatgtcctgcagcatgtctgcctggaagaggaggggaccccwggtgctggctgtacttctgcaaggtctttcttgtccatggtcctccaggacctccagtgaggtgtgtcagcagcatgcctcrggggtgccaccccatgtgccattygcttctgcttcatagtggctgtgtccaaggcagatgaaacaagaagcttggcttagagatgacatcttcacctggtcattaatgaagtgctgccaccagctgtgactgggaattctcaacaggcttttgtagcttaaagtcctttataattctgcctgctatcatatagctccagatgcacattcctggattcccttttcttctactgtttatttctgcttttgcacaaatccatgtttgactgagctcaccttgtgaactagttagctattgctatttaataatgtctccacaagctcagtggctaagataacacacatggattagctcacatattccaagggacaagagtccaagcttgacttggctgggccttctgcaaggtggagattggggtgtcggccctggctgggtttccatctgaaggctcaactgaggaaggatcactgccaagccctcgtggtggttgttcacatggatttcctcacatcaacagatggccttggtttctgtattagtttgttttcatgctgcttataaagactgggcaatttacaaaagaaagaggtttaattggacttacagttccacgtggctggggaagcctcacaatcatggtggaaggcagggaggagcaagtcccatcttacatggatggcagcaggcaaagagagaatgaggaagacagaaaagggagaaccctaataagaccatcagatctcttgagacttaatttactaccaggagaacagtattgaggaaaccgcccccatggttcaattatctgccactgggtccctcccacaacacaggggaattatgggagtacaattcatgatgagatttgggtgaggacacagagccaaaccatatcagtttcttactgagtgttgaccagagactaccacgtggccttttctgacaaggctgtgtttcgtcagagccccaagagagagagtgttccagcaaggtggatatcacagtcataatcacaggagtgacatgtgaccgcttccttctgtgctgctggctagaagcatgtctcacacgctgcccacgctcagtgcaagggacaagagtcaagcttggcttgctgggccctgtgcaagccaagcttggactcttgtcccttcctcggaggatgggactgcccaaggctggagtaccaggaggtggctctaatttcagcccatcctggaacctttatcaagaacctactctgtgtgaatatattccatagcatttacttttttttttttttacaagattgaagcaactattattatccttacctcgcaaataataaaattgaagttgagatcccttagtgtctgacactaactggtggagcaggtgttcaaatgtaggatttagtgtaacacatcaggagtgtgtgtgtaggcagtgaatggatggcacaggtggaaagcgaatcgaaggaagtgaagctgaaaagaaatgttggggttggtttttaaagagttggacattacatggaggctttattccaaagttcctggaggagccactgtgtttgaatgatgagaacatgtactcatcttcatcagttttaagtaatagttgtggtcagacttaacagcctacattcaaaggtgaggttgaaggacatttttattgatactaatatatgaataaaacccaatcaacttcaagtaaaatgtgaacacgattttcaaaaacaattttttagaatttcacttagatattggtgatttttttctcatttgtttagagtaatataactgactattaataattcttaagatgaggtgaaaattatttaactgaaaggcttccctcttttattgagcaaaacatctcatggtatttagtggaataggtttatgctaattttaagacatattgaagctttttaaacaaagacattttatttgcaaatgattacgtgtggaggctttacactggttgagctatgctatggtttcttgagaagggaaatggaatcttggtttattttggcatcctagcatcagggatggtgcctaccacattgcaggagctcagtgctggactatgcaatgaataagttataaaatttatcctcaatctagtgcaaaaatgaaggcaaaccctagagctgaaggctttgtacattcggcagagaactctttccatattgtttatataagaaattcattctgccctctgaataattcatgggacctragtcaaacaatccaaaacccagaaagcaagctagaggagatgttcaaagtcatatcatttagaccattaaaagaaatccgtgtcataaggcaatatgagctttgcacttcagaggatgtataagtcattttgttgaggaagaggtggattttctatggaggtatcaggatggctccctggtgggggtgagacttgtgcttgaaggacaagtcctctgtcagatcatgaggagtgtgaaggattccagtccaggggaacccagtgtaaaggtcctgatttaaggaactgtcatccagatgctatgtgtctgttctaccatgtgctggtcctttccacagtgcgagtcacggaacggaagtgctgctagtgtttgcgcagcatgtgagtttctctgtgtccccgcgctgagggttgcagagtcatttggggggcttcctcacagtcttgagcttgcaggtgtttggtcctgagtgttcatcttgtagactgctgcattcttttctgccatcagtggtttcagcaagagccctggcaccaagaactttgttttcattggttgacagaatggcagaacttgacaggtctagaccttctccccagtcctttggcaggtggaaagtgatgtcccccaaaacatccatgccaaatccctggaagctgcagcagctgacatgtttataaaagagcctttgctgatgacattgagccaactgtctttttttttttttttttttttttgagatggagtctcactctgttgcccaggctggagtgcaatggcatgatctcggctcactgcaacctccacctcctgggttcaagcgattctcctgcctcagcctcctgagcagctgggactataggcgtgcagcaccacgcccatctaatttttttgtatttttagtagagatggggtttcaccatgttgaccaggatgttctcgatctcctgacctcatgatccacccacctcagcctcccaaagtgttgggattgcaggcatgagccaccgtgcccggtgagccacctgtctcaagatcatcctggacttcctgggtgggccctaatccaatgctgagtgttcttaggagggaggcagagagaggtggacagaagagaagataaggcagggcatggagtgacactgccacaagtcagcagacactagaggccatcagaagccggaagaatggggaatgattctgccccagagctcaggagggagcatggccctaccagcactttgatttaggatctctggtgtccagagctgtgagagaaaaacattttgttgcttttaccaaccacgtttgtggtattttgccatggcagccacaggaagctaatgtatcttccttatgaaaagtgaagacattggtttctgagcattcaggtgacctgctccaacccgaggctgccctctgatgatccccaatagcctttgagtttggattctgtaacgctgcygaagtttcatgcttgacctatctgtcttcctctgcaattttcctgaacagaccacacagtgaggccaaaccatgggcagtcttagcatgacagtggctgggtgttcgtggaggagagagtttctagggagcaccctgcatgcccagcmtctctgggtatcactgtgttgcagcgcgtttgtggttatgtttcattagcagagcggttccaaccgtgcttgcctgtctctgtttcatacaggctttcttcagatgacaattaggattaccaggtccccatgcacccagggtttgtggagccacacaccggcttgttaggatccttccagccagctgcattttccagagcagctggactcttactctctcatttttttttctgttctgttctattctggggtgcattatctttagaaatgccaagacaaatggaaactaatttgcaaatgccccttatggcttaattgattgctttctgtgctgaccttcgtgggtaaaaggcagccagcaggaaaaggaacatcttccccagaccccgtgtgagccttcttccccatcactctgtcgatttccagaatgttttgagaaaattgggtaaagatggaagcaaccattttctgagatggcaagtgatttgccaggttttgtaatgctcccctgatctctctcctcttattcagctgcagattactctggaaatgaaaggaaggactttttttctctcttgtcctaaacagtatttaaggctgagtcctatgaggaccaaaaagttagcactaagattgggccactgtggagggcagttctcagcatcatcacagcccagcaaatatcaggggagctattgtgcaccccagccattcctcagcctccccgccgggggtttgggggaggtggcttcaggttctgaaatatgtgccatgtttctgtttctctggcgccctctgtgatgctggctggacacacagacggggctttccttgygtgatgatcagtgttatatgtcagcttcactgggggccatggagtgccggatagttggtcaaatattattctggatgtgtttgtgagggtgtttttatatgagattaacaattgagtcagtagactaggcttccccaatgtgagtgggcctcatttgatctgttgaagggccggatagaaaaatgaaaggctgacctcctctaaatgacactgtcagtcagtcagtcaggtgccagatttataattgtgtgagccagttccttccaataaatctctctttctcgacatccttttggttccgtttctttgggggaccctaatataccttgttttgctttattatttggggttttgatcacttacttctaactttgaaaaaccaagtttttagctcttctatatgctatggaaaaatttctttttatgaaaggaaaaacatgccttaaccacagcatatcaggaaatctgtagatgtcagatgaaactgcagtagagaaatggaaacatatgccaggcaaagggtaccgaggctatgataggagaagcacatctctgtagatgtaacaccagctgtcactggtcaccgcccaggggctcctygtctttaaagaggggataataagagtgtcttcttgattcctttgttttcaggatgaaaggagaccatgcttgaagtgtctttcgcatgaggaccatattaagggctcagtaaacattggctggccagtaaagtggtcagtgttgggttggatgctgtccccctgcaatgcatatccttcctggaacctcagaatatgaccttatttggaaatagggtcattgcagatgtacttacttaagatgaggtcacacaggactagtagggtggggccttartccattgtaactcctcttataagaagagaagagacagagaaaaacacccagtggggtagaaggactcatgtccatgggggcagagactggagtgatgcatctgtgggccaagaagtgcaaggattgctggcaacaccagaagctgacagaaggcatagaaccgtttcccccagaccctgcagagagagcatggcccagctgatgacttgttttggactgtaggcatggtcgggtgtgagcaaggcagcagcacctcaggagacatgtccagtgctcagggaggcttcatgaaaatccctaatcaaagagccaggagttgctaaaggagcctgcatatgtaaagagtagagaagcaacaagatagtgccaaaaaaaaggcaaataattttgtttttatacaatattgaggaacttttggaagtcagaatacttttaaaaattaagtataataggatttaaaggacaacaggagcagggaggcacatgtgtttgcagaacagataatcactgtgattttcatacagaagccacaaatagagtgaatttagaagatgccgtgtggagtgtgtgtgttgggagtgggtgagatttcactgcaggattgatgtaagtcttggcgagggctaacaatctatcaagcagcttggataaaagggacaaatggaagtggagccgtttcaagaacccctgaaggagtctggcaggaagcttgatggttctcaccagtgagacccagcctcgggccttctattcatggacagaattaaaaaaataataacattgccatcactttgctataaagcaaggtaaattgaacatacagtctccaacactgtcccaaaacagctctgaaaactggatcatgcaagcctcagacatagcatcattaagacctctaatggctaaggatgagttagtggagaattaaataaaaatcagcccgcactttctcaggtttgcttttcttttgattgtcttcctggaagaaaggtatcctcccaacatcactcccagctcactcagtatgcagaggtggagcttttgagggctggctcaggctaagcatcatctctagggatcaggggaaatgccagctgatctgccaatatctccaagaagccaagtccatttggaagagagtcatcttcctagagtagatgcgtcctctctaaggttgcctcaaggctccccaaaccatttctgtagcaaggggccatcttgctacagaaatagtctagaaagtcaggcatggtggcatgcacctgtagtcccagctactgggaaactgaggcaggaggaccacttgaacccaagagttcaaggccagcctgaacaacatagcgagaacctctctctaataagwaaataaataaataaataaaaattagctgaatatggtggtgtgtgcctgtaatcccaactacttgggagactgaggtggcaggatcacttaagcccaggaattcaagtctgcagtgagccactccagcctgggtgacagaacaagacttcatctctaaaaaaccaaaaaccagaaaacaaaacatgatttatagtcattctgattaagctgggcatgatggcttgcacatgtattccgagctattcaggaggccagggtggaaggatcacttgaggctgggagtttgagaccagcctgggcaacacagcgagaccttgtctctaaaaataaaatgaaatgaaattaaaaagttttaaaaaagaaatgtccaggaacacacactggagaatgagtgataagacaccgtaagagattgcttataagcagtggccacagttatggccctctgtccacattcttctacagtgtgagtttccaatctctcccatccagaggcaagtctctttctggccctgggacttgcttccaacaagaggagctggtgctagttagccctcaccaagcctgggaggcaaaaggccttgtggttcccagtgacttgcttggaacccttctaaccaccatagaaaccaggcaagctagcctgctggtgggggtggtggtggggagggggayagagacctctcggagaagaggcaggccaccccactcaggtcctcttaggtgaaatggtccctaacgggtggctgagggcacacagctgagtgagttgagcccactttggctaagcctggcccacatcagcaggaccacaagttgacctggagactcctgagcagtaataaatggctgttgctttaagccagtgagtgttggttatagtaaaagctaacaggtatagatgctgccccccacaaacaggtrgcttgcaaattagaaagctggggcccagaggctacaaggatgctagatacatactgatagaactaggatcttttaattctcatgttttgctgagtgcttctcctactagattagactgctttgggttgggaaactgatgaattataatacatattctggtagaattagtagtttccttaactattgtacttttattaaatattcatttgaaatttattaaatattaataaattattgaatattattaaatattcactcatttattcttgaatagaaatacattcattgattgaaaaatatgttcattgtttgaggagttcttggccacacagctatgtcttatcaatgtgtgggtgcagcagaggaggctggccccaaatggatgtcacagcacgcagtrtggatcactgacttactccatgggccaggagggaagggagctggagtaaacactgagtggcaggcaggaccgagtcccctcccatgccactatgataccaacaacatgggcttcccagaaccagcggctgagagcctgtgactgaatccagctgctgtggtcgaccccgctccccaggagacatactgcagatgctcatgcttttcccgtatgggtatgacatcgattttcaatagaaaggaggctcttggagctatatttcctggtgtggtagatccctccagtggctgttaacaggttacatttcactgaattgagttctaatcttcrgtgagagttctcttggggacccagagagtgcttaagttagagtgtttatctgaacacatcctggtgaatgtttagtagtgaagcaaggcacacagtcacatcacattacaaataaaatgcctcactgtcatcatgagaagctctgtggtcaagattcccttgcctgcttctggtggaggtaggttcagacatggccctgaccctgtggctgtgtcctccctgagatgacggagagagtcctgtatgctgattcacagggtcaacaagtgtcaggcacaaaaacactgtggaaaaataagtcacagtgcatttgacctctgacctgaaaagccacccaatttcacatgaagcctctttcctgcttttcatgaaaggaaatgaagttgcaggtataattgtagaagaaagattccagaatgccacaaatgcataaccttgcatttatgcggggaacgcacgagcttgtatgacattcatcagcattcatagctgaattttaaacataataagacaaaaaaaattctgcaggcaatgtttcagatcagaaatgttatgagaggaatcatgacaaggggtgccctgcattaaatggaacctgattagaagccacttgggcaagggttgggtctgcgtcccacccccacaactgaagaaggatgttgtggagtattcaagatcacgataaaaccacagagtcattccgtagttgcagaacgtgattgatgtggaaaggataaagaaagcaaactcatttagtttatgaacagtaggataagaaatgactgccaggaaccacagatgccttttaaagtccgctgcaatgaaagccgcagtagaccctggcttggtgaatgaagaccagccaggacagcagcaggaatgttgatgcttgctagagctctgttccctgagggacctgctcccgcttctctgtcactcatgccttctctgctgcaagaggtgagcctccccgaactccctgcatcttggcttctactacagaattctcaggactacaagttttctccgttaaccatttatcttgtgctttataaaggctgtctgtgtgtctgtgtagtgcagcttgtttcatcattatattttatcacataaggtaaagatcaaaccagcctaaactatataaaatacattttcatgtttttagtgataacttacaagctctaggcttgttagcataacacaaatgaggcagggaaaaatagaggcagtttttatgactcaaatgatacttgcagacaagcattaacaaatgctgtagtaacaaaggctaagatcatttttttcctgactttcattcagaaaggaagtggcatcaaaattttagtcatctgaaccgacaagtggtaaaatttggattcttgaaaagtaagagctattgattttttttttttttttttgagttctgtcaccaaggctggcgtgtagtggtgcaatctctgttcactgcaacctccgccacccggattcaagcgattctcctgcctcagcctcctgagtagctgggattacaggcacacaccatcatgcctggctaatttttatgtttttagtagagatttcaccatgttggccaggatggtctcgatctcctgacctcatgatccacctgcctcggcctcccaaagtgctgggattacaggcatgaaccaccgtgcccagccaacttttctattttcaattaattcccatgacttccaagtgcctgcagttatatgcaatggccaaaaaaccatggcctcatgaaggatgttgaaatctacatatggatcattctttccaaacagtgtcacaaagccccaggtaccatctgcagtatgtgttcaccatgtatgtggggcatgggtgtttcaaatacccgttagcagtgtttaaataggtaattgtttcccacacttctctttctttatatttcttcaataagcctccgtgttgacatgctgtgaaggtaagctgccaacctttccctgtctacatgatcacagtccacctatgacttgtcaccacatcatccacagcaaaagtgtgtgcagggaagcctggtttggtgtctgggctggaggcacagtggagagactcagcctcaggcctcaccccacctgagaaccctgggtcccagyaggcaaacgtttcatctcatccaggccgtcttgcctcaaccactttgctcaygctccatcctccagctgaactgctcagataaactgatggaatgttgattctttcagtycagactcaaataccatcttgtccttgagccttttgggattatcccacgtgcctctgaaatcctgcggttctgtgtctctcttagacctttggttacagcctctttttcatttttgcttctgagttttccaggcacatttcttattttttagaaagacaaaattcttagtgtgtgtgtctctacctggcaaggtgcctccaaatgggaaatggaggttattctgccctgaccctcagccagaatgttgagatatgatggagattgcctcagtctttarcccaaggttcttttgtagtgagacaaataagcaaacactgagaagactggtcctggtggtacaaccatgaatgtgaacctgggcacttcaggctagcctggggctgcatggcacaagagtcagagaaccttctggaaagactgttcagtctttaaccattatagtcagtagttaactaagtatgtctgttttcgtcatggggaccaaataattagcaaattgggtactgtgtaggaaaaccgtcctcagccacatggaacagactctacgctagttttacctggattcagcaactgaccactgacctccatcactgcagaagccaggaggccagggtctccaggggggtgccactctctctgaagagctgcttcctgggctcttcagagccccctgcaaacagatgggatcaacataaaacgtggctctccttctgacactgtgtcttcttaattctctgtgtgagcaccagccctaggggccacttccacaggccctgggacatgtacagtagttgaagggcctctgatcttagcaattcatagaagtgacttttggcagtattcgtcaagaagcacttcaggcttattcgatactcagcaggtgcatgtttgaatgagagtatcatgcaccacataagagggcaaataagggtttcatttcaaggctggtgtgaacagtcattctgacacttgtgtgagaaccctggaggaagtgctggagaggaggggagtctgacctcatgggatgtcacatctctaggctgtgatcttgttatttgtaattttttgcatcataacagatcacctttcacagacttaatagatctgcctcattctgattgaggcaaaataacctatagcactggtacaccagctattttttaaccagtgtgctattgatggtgtcttcagcttttctccaaacaaatcagttggaaatatatttacacaggcacccttaaatacttttaggaatatttctctgggatgtgtgcctagaaattcaactgctgttttcaaggtctatgcacttatatttgtatagttactgcaaaatttcattttaaaaaatttgaaatatattgtctcaaattactcccatcaacagtgtagaaggttgctgttttccctctgacaatcactgcataacatcaattattctaacttaaaaattgctaatctggtgatcaataacaaacttttttttgtttatgaactatgatagggagagattgaatgaaacaacacaggcctgcattggagggaggtagcaagcttcagttaatttgaaaatatcaaaatgctaattttaaaatacaataaaaattgttcagcttattttttctccctagcatattattttagtatactgaaatccttcctatgttctgcaaatctacaatgatcatctatgctctttggatatatcctgcttttagattcagaatagtgacctgtgtactttatagtaactaacattttaaacatttcattgaagaacttaaaaccaactccaaatttgcattatatatggcagagctcaacgtaagaacttcctgttttatcagcttctaaactttccttggtttttaagattaaatattacatacagtttaacaaaattgaaccttttggagttttggcagtttttttttttttttttcttgtaaaggacatggagtagagggagtaaggggtcagataaatgaatatttgtggatccgacatgccaggcaacaattcataaaatattccctaggagcaggaggaggaagggtcactggtggaagaaagaaccccccttcatctgtgagcagcctgctcctactggggacagagcaggtcagagttctgygcatttacaaaggcagcatgggttgtgggggaggtgcagttccagatccatgtctgtgtcactcgggcacgtctctgagcttagactgggaagtccaactttatctctgaaaatgagcgctgtagttactaccctgcctcccctgccagaatgtattgaaaatccaaagaataatatgtatgacagcacttttcaaattggaaagtcctatacaatggaaagttgtcaaaactgtaattaatgtcaacatggaaaggaaattgaacaaaaatgaagttattgtattcaaagctttataacatacatttaggttagttccacaagcattttttcaatgggcggtttatttgaattgctgctgcttaggtaaagcatgcaaaaaacattcaggtttgcctggatttgctgatttatttctgtcagattgaaaatgttttgtttgtagcagtttctggtggggagagttttgagttctggaggctctctctgaggtgctgtcctggcttctctgaggcctgctgggtgaagcacttgccttcaggtcgtccttgtgggccactgtgtctgtggttctttccatagctggatgcaggacaagggcagggacagggaaaggaacccctctggggagcccagacttccgtttccagaaagtgtctgcaggccaaagaaaacacgcagtgcccaaatcacatctttgagttcttgcttcatgagccatcacagtaacaggttgcacggggccagcccccgtgcttggctggactgactggagactgagagatgggtgacgtgacctgagaggccccttccagtctgcgtcttcagcagcgagggagtttgagctgatcgaaaccacacttgacatcgagcgaggctgctgctcagtgaggtgcagcgggcatgtctatgccatgccagggcatgggagccttgacctctggggacttggtgccagggcaggggcctgagtggaatcccggcctgcatgcttcacctcggggtccacagttcgtgttcttctgagctctgtaggatgagtggctcactgagcatttattgacagcctacttgtgtcagaccgccttggggtgctggcagcacagtggttcacagaacagtatctgtgcactcacagagctgacacttgaaagtgtgggccaagatgacttttaaaaaggacatgtgaacatgccacatggtgataaagtctttgtggaaaagtaaagcaggaaaaggaagtaaggagggcctgaggtgtgtgcatgtcagggtgaatgtgtgtatgcatgtatgcaaatgtgtgagattgtatgtgctgtgcatgcatctgtgtgtgcatatgtggtgtgctgtggaatgtatgagtgggggtgtgtacatgtatgtgtgtggtatgtacatgtacttgtgtgtctggtgtgctgtagtgtgtggtgtgtgtatatgtaggcacatgtgtgtatgaatgtgatgtgtgtatatgagtgtgattatgtgtggtgtgtgtgcatgtgtatgtgtgtgtaatgtgctgtggggtgtgtgtggtgtgctatggggtgtgtgtgtgcatgtgtgagtgtggtgtgctgtggtgtgtgtgtgatgtgctgtggtgtgtggtgtgtgctgtggagtgtgtgtgtgcatgtgcgtgtctctgtgtgtgatgtgccatggttgtgtgtgtgcatgtgtatatgagtgtgtgatatgctgtggtgtttgtgtgtggtgtgctgcagtgtgtgtgtgagtgtgtgtgatgtgccgtggttgtgtgtgtgtgtgtgtgtgtgcacgcatgtgtgtggagaggcctgaagcagctgagggtgtgagtgggcctggaaaggcagccttgcaggcgggctcacgtttgttagatgggcgccgcggtgcgttctgggagtgctcggggcgggcgcgggggcgggcgcgggccaggagtgggaagtggtggctaaaggtggggtcctcgtcctggcgcctccagggctctggggaagccccaggagaaggaaagggtgcgctattcagagggcaggcgctcgtgggaggcagggctgggagtctgcagccccaggggctttactctggccaactggggaggctgtgtgccgggcaggctgcgggtgaacactgcctgtattagtccagttctcacactgctgtgaagaactatctgagactgggcaacttttgaagaaaagaggtttcattggctcccagttccgcaggcctaacagcctgactgggaggcctcggaaactcacaatcctggtggaaggcgagggggaagcgggcttcttcgtcacgtggccaggagagagcgagcacctgaggaggtaaacaaccagagctcctgagaactcactrtggagagcagcatgggggaaaccgtccccaaaatccagtcacctcccaccaggcccctcacaattggaggtgagatttgggtggggacgcagagccaagccatgtgagtgcccgaggaagcggtgctgcactttgcagtagaggactctgaagggagacggggtgagccatgggggagatgcatggggaggatcacagccttggctgggaaggaggggaatggggctgtgccgggtccagggcattgaagcccgatgaacacgggagagcctgggggtgtcaggctggctggcgccgggctctggagccctgagcagggcgtctgagagcagaatgtcggttcttaaggcctgggcaatgaccaggcacatcctctggaagataagagctggggccatagggcaggaaggaccgtggaaggaccagacttgtgggtgcaaagaatggacaggaagcagggccttggggtcaggaggagccgcagggaaggcagaacggtggccaagcatkggggaatcagctgcggaatccacagagcgcgacattcccttggattggagaggacagctcgtctgcaggcaactgggaggagcgaggtggacctgctgcctgcagtccccatggtatagacactttgggaggagggtgcaggctgcagtgtcctctgtggggagcacaccagaggcttcttgtccacattctaagtctagtctctagggcaggctggcattagtatggttcagtcacctccccaggtgactctagggtacatccggggtccatagccctggaaccagactcagagttgaaaggcagttcggagacaagcatgtgtttgcacaggactctaccgtgtgtgaccatagtagcagcccctgccaggcctcagggtaggcgggggagagaggctcttggattggagacccccgagcacagggcacagtggcagatcatgcaggaaggctgtggtcatgcgaagggaggacatcttgccaggacggcaaacactcatctgctttctgcctctgtgcatttgttcgttctgaatattgcatgtgaatgaaatcatatgccatgtggcctccctcttgtgactggcttctttcactcagcatcatgttttcaaggttcatccatgctgcaccccgtgtcagtacttcattccttttcatggcttaataatattccactatatggatataccacattgtgtgtgcccattcatctgttgatgggcattttagttgttttcaccttttagccattttaaatagaactgctatgaacatcggtgtacaagtttttgtttgaacacctgttttcagttcttttgtgtatagacaggtagtccctgacttaagattttttgactttacaatggagtgagagcactacacgctcagtagaaaccatacttttgagtacccacataaccatactgtttttcactttcaataaattacatgtgatattcaacactttattataaagtatgttttgtgttagattattttgttgaactataggctaataaagagctctgagcatgtttaaggtaggctagactaagctatgatgtttggtagattagttgtattaaatgcatattttacttaaagtattttcagcatatggtgggttatccgtaggtaaccccattgtaagctgagcagcacctgcgtttaggagtggaattgtgggtcatatgggaattctatgtttaactgattgagaaactgccaaagtgttttctatagcagctgcaccgttttacagttccaccaacaacctatgagggttccaattcctccacatcctctacaacacttattttattttagtttcatggtcatcctagtggctgtgaggaggtatgtgattgtgtttttgatttacattttactaatgaatctaggatgtctttctatttatttgtgttttaaaaaaatgtttcaacatttgataattttcagtatacaagacttgtacttctttggctaaaattatccctaagtatttttgactctattgtaaatgaaatagttttcctacttttgcttattgctagtgtgtttcctcttcaggctttttattgctggcatatgaaattggtgcaactgatttttgttgagttgattttatatcctgcaacactgctgagtttgtctattagctctaactgtgggtgtgttcttatattttatacatataagggtgtatcatatgtaagtaaagatagttttatttcttcctttactatttggatgccttttacttatttttcttgcctaattgctctggcttgaacttccagtaaaatgttgcaaaagagggcatacttgtctcgttcctgttcttaagggagaaagggtgcagtcttgtcattgagcatgatgtcagctgcagatttctcatacattttatcatgttgaggaagttctgcttctagtttattgagttaatttttcatcattaacagatactgtattttgtgagttccttttttggtatcaattgatcattttgtttttctcttcattctgttaatgtgatgtattgcattaactttttgtatactgaatgactgttgcatttctgggataaatcccacttgatcatgatgtataatcccttacatgctactggattcagtttgctagcattgtgttaaagatttttgcatatatattcataggggatattgttctgtcgttttcttttcttgtgatgtctcttcctggctttgtaatgatgacctcatagaaagagttagaagtttcctcctcttctatttttggaggagtttgagaaggactggtgttgattcttctttaaatatttggtaggattcccagaaaagctatctgatcgtgggcttttctttgctggaaagttttgatcactgattcaacctcgctgtttgctctagatctgttcggattttccattttctttgtgagtcacttccctgcatatgtctttccagggaaacccctgtcaggtcaaaaccaacaaacgtggttccttgggtataagatccactctgctctttccagaaatgtccacatgggaaactcggcctgccctattcaagatggctgctgtactgcatcgtggggcagagctacggcaagctaaaatcctgcagtgttctcctgtcctgtttcagtggcaaacattccttggttgttataaccctgtggctatctttcggcatgctggtaaggttgattctgccagtttttgtcaagtttttcagcatttcttaggaggaacaccccagaggtccctgctccaccacttttgctgatgtcacacctgttaaataaacttttcttacgcactcactgttttatgaagcaacagttcttttactgtggagtttaaagagtctcatcattttcctctctcacctggccctctacgggaagcaccctctgatgtcccattcaccccgggcttctgtgtctggatcacaccagccatgtcattctgttatgactcagtttactagtttttgacttcctttctgacagaactggggaatctttaggggggatggtctcccagatttgagtcttataaagaatgcttctttgtgtgtgtgcatttccaaataaatgcaaatgaggcagggcgtgtctttcatgttttctctgttatcctatttttatgtgtccatgttcatctctctgctctcctctcccactgtctgagacctcactatctggtcctgcctgccttggacagctgtttgctgtcaggtagctgctgtgtaaggacccgcagcactcacaggtaatggttgttcctgtgtctgcagcaacaagcggatgctctggaggctctgtgtcgtgttgccccgtccgtgtgagctgccgtgcagcggactgtgcttaatctcgggtgatttagtgctggagaaaataacagtcaggccagccattgaaaaatagatgtgcttatcaaatatgtgtttgctttgtgtgcaagttgaattacagagttttcagaacaggaagggcgggacctttgagatgacttgctcggtgtctttgttttacaaaattaaggaatggaattcacagaagtccatcaaacagcagctctctccctcccagaagagtgtcccccctgcagccccacataattaccagtatctccatccacagggtcttctccttgagttttcactagacttggtctggtagctgagtttgtagattcctgcatggtgcagttgaaagggaattgagaaggggcctccttctgtaatttgttttcctggcacacatccccagtcactgaaccctaccccacggactcctctagacaggcagccattgggttgagagagaggatctcctctagagtgggtgctcactcagagagtgcctgagcattgtatcctgggcacctgaggcttgaagctagtgaggaagggagtgtaaaaatgagaacggaacagaccaatgtcacatgtggccaggttggtgaggtggaggcaggagagctgtgatgaagtggaggggtgcagccaggctgactcaggctctgacacttactgcatgacagtgagcagacccttacatgccctcctcattggttttcccatctgtgcaatgggatgatgatgataatagtcaggagttctgagaagagcgtatgaagcactgaacagtccactggtgctctctgagagtcagctgtcatgacatcgtaagtactgtttgttatgagctgctaagccctgcggctccctgctggagtcggggactctgctgttcatatacacaaggcccagtcctgagtgtgcattctcttgacttctaatgttgatccttctattggacatacagaaagattatgcatggtcgtagctatgatgttttgttaaaagaaaggcccttaaaatttttatttttaaaaattttagaaagatatcaggctagaaaattttggcaacaatatttgggcactcaagatagaaacccaatttccagtatgatggatactctgtaagtcagagagtgacataaagagccctaaaaaaggaacttcagaaggtattgacactattgcacctttttaaatgtcgaggtcccttcagcgtgtaaatgggttcatgccttacttcatgctgggaggcacagagcatagtggctcacagtttggtcagaatacctggtttcaaggccagtgccatgggacaccttctcagccccatgaccattcacataaaaaataaagatgttattagcagtattagtcctcctgccattgttctgacacctgatgttggttttatgcatgcagatcacattgcacagtctttggcacatgggagatgcatatagttacccttagtggttgygagtatttgctccatacagcccacagacctgaattaagctggctgcttccacgagtcctgtcctgggttctgtgccaaggacccaggtgcttgccttttccattttagagtgaaggccacmgcagtcaagccttcagaggctgcaggggtgagcattatttcctcattactcctttggagaccaggggtcagaaagccggagtgcatggcccaaggcatttgaggtgatgagggtttccagatgaggactatcaggctctgcagctttttattgcaccagctgccttcttaaaaaattgtctgcctccatatttgcagtgtacttggtctagaaaacagtgtctcccagtctcagccccagataatagatgatcttgttttaatgtgtttggaatgtggccatacagatgggattgaccttcctggattctaagaaaagcttctgggcctgaggaggcacagattcctgggrctcaggaaacataaatagagggaagcagttctgcagggagcagggagagccttcccttgttggaattgggcctgagagcattatgtcacctacatttgcagagatgcctgtctctcagagggtggagagtgtaggacataaattaactcaataaactagaagcagcacttttatgctttgtgcagcataaactcaaaagatttgctttactgattacaaatagatatttattgttaaaatttaaaaatatagcaaagcacaannnnnnnnnnnnnnnnnnnnacctttgtgctcacagcttattcatctttggactttgaagccagggctgctgagctggaatctcaaattgtcttaggacaaggatctctgcacaaggcatgaaattagaaccagcattttccttctcattgtcagtagctctgtgtatacatttcatttttgtatcttctgggagggaccaataactataagatactaacttctgtttgcatatgtttttcaaatctggaaccagtttccaaataatkaataaattcatactgggtcagaaaagggaccagttttggatcctgtccaccttctttttgtatttgttgttgtttttctattgctgtatgtgtccaactctacgtgaaagcacttgtgaaccayacaaatgagattcttttcttttctttctatcttttttttttttttttgggagaatgtgtctcactctgttgcccaggctggagtgcagtggcccaatctcggctcactgcaacctccacctcctaggttcaagcaatactcctgcctcagcctcccaagtagctgggattaaaggaacatgccaccatacccggctattttttttttttttttgtatttttaatagagatagggtttcaccatgttggccaggctggtctgaaactcctgacctcaggtgatcctcccgctttggcctcccaaagtgctgggattacaggtgtgagccaccgcgcctggccttgaatgcttttctagtgtcagatccttctaccagactttgagctctggtgggcagatacttggagatgctggcccgctgctgggcatgtaagaaatggaaaggcagaggaagctgcccagaaaggctgcagatgttttgaggcaagagtatgggctcctggggaccctgggtacttggggcttagaaagagggccctatttctctgggcttaggaagaaagagtatcttccctgtagacacagctcacctcattcacaacttttcctgaggcatagaaaaattttattcagttatttttaccttctctccttccctccttccctccctcctttacttcctttgtttttctctttctctttttctttcttcttgtctctccttcctttttccaaccactcccaatcatttttgtctttcaggattacagctttaattataatattctctaaattttctgttcaccctgccgcagagacacttaactggtgcgattctgtctcccacctacccagtccccactgagtgactggaggtgttctgctgctgaagcctgggggaggtgtgctactggcagtgagcgggtcaaggccaagcaggccactcaacagcctgaatattcaggaaaggtccctccctaaggaattagctggcccaaaatgtcatactgtcaaggatttgagaagtgctgccctggagaataaggatatctatgataaatgacattatgataatattacaagcctgctgtcattattagctaatttttttcttcttaaatctattattctttttttttttaaatcagatgtcttataagaagagaaggaattaaaagaaaaaaaaaaagaaactgtaacaacaaagtcctgggtaacacacagaaagagttaggcctgaatgatttggagttatcacaattttagtattttaaatttttgttaatatgctctgagaacacaggaagagaagattcagtcttttaaaaaatactgaatgttggccaggtgtggtggctcacgtctgtaatcccagcactttgagaggccaaggcgagtggatcacctgaggtcaggagttcaagaccagcctgaccaacatggtgaaacaccatctctactaaaaacacaaaaaatagccaggcgtggtggcaggcatctatagttccagctactcgggaggctgatacaggagaattgcttgaacctgggaggcagaggttgcggtgagctgagagcgcaccactgcactccagcctgtgtgacagacagacactccgtctcaaaaaccaacaacaacaaaaatacacaaaaaaactgaatgtcagtatctcagaacctaattttgaagatatgatatcctttttttaaagccaacttgacttgggcattaggaagaggaaatattttgttcgtttttaaataagaagtttgacagttgtcatcaagattattttaaagagtttgagccttccctaaacctattccaggatttggtactgaaagtctcctaagtctagtaggacaagcaaagtctctacttgtccaagtaaattagaaattcttgcagaattcatawgtggcaaattatcatatggaaaatgacaaaaataaatgattccagaaacataaaaaccctcaatatactagataaaatgtgtcataccagagagtcttctagtgccagtcaagatggagctgcccctttgctcttggtttcctcttaggaccaaaagtccctggtcatgacaaaacaagccagcacaggaaaagaagaaggcggattgcctggtgaccttgggacttaagggacaacacatgatgagttagccccagtcccgtaatatgtccaaagtgccgaggatatgatcaaaactcacttgaattacagcaaaacaggaaagacacccttgaataagagaacgaaatgagttttgccaacagcaagatgaatgagatgttgtaattattgggcaaaatatgtagtatgcagagaaaatacttagacaattacatctaaataatgaggacagtaaaaggacctaaatggaagtaagttttctacacttcactcaaagtgctaagccactctgatgacagtagactgtgctaagttgttgcgttacttgcttgggctgccataaccaagcatcacagcctgggcactttattttctcaccattctggaggctggaagtccaagatcatcaggtttggtgtcttccgaggcctctctccttggttcctaggtggctgttgtcttcctgtgtcttcgcatggtttcccctgtttgtttgtgcctgtgttcaagttttctcttcttatgatttttctttttgtattagattagaacctactgtaatagmctcattttaacatcattacgtctttgaagacccaatctccaaatgcaatgacactctaaagtgctggggcctaggactttaacattcraattttggagggacacaattcagcccctaacatttatgtattcatgttgtaatatccagagcaaccacaaagaaaactgtacaagtaatatactaaaaacattatgaataaaaaaaaatcccataaaatgttcaagaatccctggaaagataagagaagtagaagaatgagaaacaaaggggaggaaaacacaaaaaaccaccaatcatcaatattagcaatgaaacgtggtctatcactatagattctacagccactaaagggataagttgagaatactataatagacttttaactaataaatttgacattattctaaaaatcagaattggccgggcacggtggctcacgtctgtaatcccagcactttgggaggccgaagtgggcagatcatgaggccaagagttcgagaccagcctggccaacatggtgaaaccccgtctgtactaaaaatacaaaaaaaattagctgggtgtggtggtgcatgcctataatctcagctactggggaggctgaggcaggagaatggcttgaacccaggaggtggaggttgcagtgagccaagatcgtgccactgcactccagcctgggtgacagagcaagaccctgtctcaaaaaaaaaaaaaaaaatcagaattaatggaccagtttttttaaattcactatctaccaataaaagaagtggaaacctgaatattcttctaccgattaagtaattgaattagtaattaatgttcccaaaaaagaaatcttgagttttatatggtgtaactggagaattttaccagtcagctaaagaagaattaacaccaattctacaaaatctcttccagaaagcagaagagaaggaaacattccccatcattttttatgaagctaatattacctgataccaaaaccagataaagacagcataaaaaagaaaaacaacagagcagtttctttcatgaacttgcaygcaaaactcctcaacaaatattagcaaatagagtcctgcaaagtttaaaagaattatacatcatgaccaggtgggatttctttcaggtatagaaggttgattcagctttcaaaatcaatctgtgtgatccaccatattacaggcaaaagaaaaaaaatcatacaattatatcattttatgcgaaaatgtatttgacaaaatataatacttattcatgataaaaactctcagcaaactaagaataggggaaaacttactcagcttgatactaagcatctacaaaatgcacgcagaactacaggtagcatcaaacttgatggtgaaagactgaggaccaggaacaaggcagggatgtgtggtttcactgtcattttcaatgtcgcactggaagtcctagcacctgcacgtggcaagaataagcaattattaggcaagtagattggcaagagtaaaataagtgtcctgatttacagataagctgattgtctacatgaaagtcacaaggaatctaccagataatcctaggacttgtgagttcagcaaggtctctggataaaagattatcacccaaattcagttacatttgtatataataacaaaaatcatgtgaaaaccaaaattaaaaacataatagtttttacagttgcttcaaaaaatgaaatacttaggtataaatctaacaaacaggtacagaatctattaatatatgctgaaaattataaaatgcaaatgaaagaaagcagagaagccctaagtaaatggagagatgtattttttcatggattggaagatttaacatagtaaagatgtccatttttccttacgtgatctgcaggtttaatgcaattcctaccaaaatccagacaagcttatttgaaaattttcacagaacagtacaacacctagaatagctgaaatagttttgaaaaagaagaatgaaattggaggaattagtctgcctgatttcaagctatattatatagctacataatcaagacagtgtggtatggcagaggagtagacacatagatctgaatggagaatccagaaatgaacccatgcaattacatcgacctgtttactgacaaaagtgcaagagcaattcaatggaggaagaaggcactggaacaactgggcatccatagacaaaacaaaaacaaaacaacaccctagaccaggggtgtccaatctctcggcttccctgggccacactggaagaccacaattgtcttaggccatagataaaatacactaacagtaacgatagctgatgagctaaaaaaaaaaaaaaaaaaaaaaaatkctgaaaaaaatatcataacgttttaagaaagtttatgaatttgtgttgggctgcattcaaagccatcctgggctgcacgtggcctatgggccaccagttggacaagcttgcccgagactttaacctcacatcctatacaaaaaccaactaaaaatgaaatataaaagatgtaccacgtccggcctctctaygtccatgtgaaccaagccacgccatcgtggactcccctgatgtgggatgtcttccaaagtggatcggtactcctgagctctgtgtttcagcaaggcccgggagtcccattacacacatgggctgctgccaatgttaggagctgggagagctagtcaattcatttcagtcttaagaacataaaattctgaaaattgctgtgttctacacagttttagaaatgagtttggtttttgttatgacttgcttctttctttgaggatttggaaatgactaatcagaatttccacgagggagctagaaactcgaactgagctctaaaaactgattaggaggcctattccttcttatgagaggtgttcagataaatgcctgggctccataataacaataacaacaacagatcataatactaatattaaatttttataaaatcatgcttggtgacaactctgtgcttttggctcactgggtgagaggattttctattatggtcgtggggactgcatttgttacttaaagtctatktggtaagtgtatggaatctttggctgaagattattccttggtcacataactataaacaagttactttcttcactaggtgcttcaggaatacgatgctatgggttgaattacagtatttccaccatataattgtgagcttacttctcctaataaaagtactaacaagtaaatagattttaataaccactaaatgtcatgtgtggttgttaatatcttatttaccgacataagtatataatttgtatgtgttgatactttttcttccatagtactcccccaagtaccaccggcattaaaaactaaccatgtcttaaatattgaaaattccaggaagaacaaataaaactgccattgataaaaatgatgtagctctatttctaatgaatactttctttaattgttttggattattatcctgtaaaaagttgaaagcttggattatgccttcagcattcaggtttgtgaattatgaaactagtcttcrtcctagtctttcttagttgtcagtgaatttggaagatttaacaggtgttgtgatctgtatgaaattgatgctggagcaacacactccaccatgctccacaggtgctcttggaaggttctgggcctgcccagaaaccttacctcttctttgacgtatacatattttccctgtactgacaacccactcctcaggaatgactctattttgttcaggtgttagtaatgtttaaaagttaaaccctttgcagttggaggctcacatgaaacaccactccccaggcacagttaaagtaggagtgtctgaaccacagamccctgagtatccccacagcaggttcacccagggtccacagcaggtccatccagggtccacagcatgtccaactagggtggccagccttctggcaccagaccgtacagggttgcccctgcagctgcagggaatcagaagcaacagaaccaccttaataaataccaaagctcggttagggagcatggagaagagaaaagcaaaattaacccctcccctttccctttaagtgttttttcacttttaagattacaaacatgttacacatccattgtaacaagcatacaatacaayggcctattaaagacaatgaatttgcctttccattccttgttctctctcaaggaatgaccaattcttgaggtcattctctcaaggtgaccgctcaaggtgacctcagaactcttgaggttctctctcaaggtgaccaatatcaatagcttggggcatatccacccacagttttctagctgctcttatatatgtcttcagctatagaattatacacctttcaaatgactgccttgtaaatgctcttttgacatatctgtttcccatggtgaggattttctttaataattagtgggaagataaataagcacttgtattaatgaacaaaaggctggctcagccagaaccttatggagctgtgctgctcaatatttggaaattaccaagttgaggtagtttcattgtaccttacttgtttatcgaggttatagaaaatgaaatggcccttgccttttagtgtttcaagaagagaaaatttaatgaaatgtgaagtcacttaaaaatattagcttctgtttttaggatctttagctattctrcctcaaaacaatttcactaattttatttctatatcacgttttctcatttctgctcatggcaattggctgaatcagtggtacgagccaggacagatgaagttaaatcgaccaagtgctgttgccttccagaggcgtggcatgagtcagtcatggccaaagtggcgcgtgagtttgagtatgaatgtagatgctccctatccagtcttagtaggatgtggactttaaaaatttgtgtttgtttattggttggtttgttgtagttttgtgtatgggttttattgaaactgttctctcattcactcactcactcccaaggaaacactgatatatggtatgtctagtgacgtgctgtgcatttgttccacagacaccaacgaggcatggcttaggtcgcctggcctcagtgggtgttttgcctgtaactttttcttttgcatcatgatactttaaatgagctgatctgcctaggtaggaacaaaagccccaggtgctgtttgcttcctcagctgaatcgaagacagactgtgcaatacactgaaatacactgggatcacacaagacagagaaagccatggtaacaaatcatagaatttctttccactgttgtctatgtggaactatacatttttcaaaccttttaaaagaattgagagaaccagaggaaacagatagaataatttgatattaaatggcagacataagccctaacatgtcaataatcactttaagtctaaataatcaaaatacaccaatcaaaaagtagagattggcagagtggattaaaacattaaaaaatttcgatgactcaactatatgctgtttacaagaagcccactaaaatttaaataacatagattgaaagtaaaagaatggaaaaagatatacccatgtaaatattaattaaaaatttaaaagcaggagaagctatggtaatattcaatgatgtgaaattcagagtaagaaaactattagagatgaagaggaacgttacataatgataaaaggatcgattcaccaggaagacatgatgatcctaaatgtgtacacatcaagcaacagagcctcaaaatacatgaagcaaaaactgatgaaactgaaagaagaaatgtataaatctataattatacttggaaaaggtatagtagtatacacttcctgaattgtcaagcagatttgatcagccaatcaaccaacaagatctaggttacatgtatggaatactccacccaacaacagcaaaatacacattttttcaagggcttatagaatgttcattgagatatactgtatcttgggtcacaaaacaaatctcagaaaatttaagataattgaaatcataaagaatttgttctgcaaccatcatgtaatcggactagaaatcattaacataacgttttaggatggcggttatcaaaaagccaaaagacaacaaaagacaacaaatattggtgggggtatggagaaaagggaaacttgaacactgttggtgaagtgtagattggtgcagtcattatggaaagcagtatgctgatttttaacaaaattaaaaatagaactactatatgacctctcttctgggacaaaatgaaatcaccacttcatatatatatctgctttcccatgctcattatagcgtatccacaatagccaagatatggaaacaacctaagtgtatatggatggacaaatggataaataaactgtggtgtgtatatacaatgcaatattattcagactttaaaaaagaagagatcctgccatttgccacaacatgaatgaacctggaggatattatgctaagtgaaataagccagatacagaaaggaaaagtttgcatgatctcacttatatatgcaatgtataaagtccgtcaactatacagaaacagaaaataaaacaatagttaccagcggtgggtcctgagaaggaaatagggatgtgtatatcagaggatacaaagtagcaatatgtaggatgaacaagtttctagacgtctaatgcataacaggagataataaaattgtactgtatttggcattcctgggaaataagtagattttagctgctcttgctacaaaaaacaaagggcaactatgtaagatgatagatttgttaatttgctttactatagtaaccattttattatctatatgtatcccataacatcacattgtatacattaagtatatacaataaaattattttaaaaatattctgagcagtcctgcaggaaagaaaggaaaaaaagaaggaatgaaggaaagaaagaaatgaggaaagatttcaaaggtatctaagtttttaacttacagaaaatagaaaaagaaaagcaagaagaatccaaagcaggcagaaggaagacagtactaaagagcagaaactaatgcaagtgaaaatagaaaaatagagaaaataaatgaaacaaaaagctggatcttcaaaaagtcaatacaatttataagatttagcaggactgacaaaaataaaaggagagatgatgcaaatcatcattattggaatgaaatgagggatatcactataggtctgcagctattgaaaagataaaaaaggaacactctgaataattttatgctcatgaattcagtagtttgaagaaatggactaattcttcaaaaactgccaactactaaaactctatcagggttcaataaacaatctagccctatagtcattaaaggaatttaatttataattgtagtagtctgccaaggaaatatcctggcctagatagcttcacaaaacaattccatacagtctcttcaattttacacattccttttggaaatgagaactagcactagctaggctttccagtaagatattggagagaggtagagaaaaaaatcatcctcgccatattcttagtcttaggagaaaagctttcaatctcttaccattaaatattcctagtcttaggggaaaagatttcagtctcttaccattaaatatgatgttaggtgtaggatttttatatattacttttactatattgagaatgtttccctgtatttctggttccttaaggtgatcttcatgaatgagtgttcagtgttgtcaagcggcttgtctgcatcagtgggtagaatcgtatggtttttcttatttgacttactcatatggtgatttacattgatttataaatattgaaccagctatacatttgggaaatgaagcctccttgcttgtgatgacatttatgtattcctagatttaatatttttaatgattttggcatgtagctttatgaaaaacgtggatctctagttttctttttttgtagtgtttttatttattatttttgttattagggtaatgctggcctcataaaattaactggaaaagttctctctaattcaattttctgcaacagtttatagaatattggtattatttcttcctaatagatgtttgatagaatttgccagtgaaataatctgggctttgttgtttttttctctatggatggcatttaatcactaatgcaatgtcttcaataaatatatgctgttcaggttgactatttcccattgagtgagttttagtagtttgtgtctttaaaagaattggttcatttcaactaattattaaatttgttgatatagttttattaacaatttatcaaatttgcatagaattttatctagtattcccttcttttaatgttcatgggtgattagtaataacccctctttcatttctggtattgataatttgtgtcttcttcatttttttttcttggttaaacttgcaagaagttcattaattttattgatcttttcagagaactagcttttggttatgttgattttctctattttcttttcagttccattgttttatactcttagtttttatcacctcctttcatctgtttgttttaggcctaattttcttttcattctctagttctctaaagtaggagcttaggaattttgattcttttctaatacatttgtttaatgctaccagttttcctctcagcactgctttaattttgactgacaaattttgatctttattttgtttttaattagttcaaattattttaaattcctcctgagactttttctgtgatttatgggttattgcagagtatgttgtttaattttgaagttttaatttgccagctacctattagtcattgatttttattttaattccatcatggactgagaatagactttgtatgatttctgttcttgtaagtgtgttaagatgtacattatggttcagtgcatggtctattaagatatacattatggtctagtgcatggtctatgctgctcaatgttgcatgagacttgggaagagggcttgttctgctgttgtcggatggagtattcaataactgtcagttagatcaaattggtggatagtgctgtccaggtcatttatatccttactggttttctgcctgctttgtctgtcagttaatgatgcagtcgaatctacctagaatagtggatgtctctgtttctcctttcattactatcagtttttccttcatttattttgataccctggtatttaggtttctacacatttaagataattctgtctccttggagaattgacccctttatcatgatggaatgatcctcctcatttctaataattttttttgttctgaaacctgattttctgtaattaatatggctattccaactttcctttgattaaagttagcactatgtaccttattggcataggaaaatgctcataataaaataggcaaaaagggagagaaagcagctaagagatctcttagcttcgtttctctttttcacctatattattatgagcatttgtgcacaacattctattgtatgtatgtaccagagtttatttaaatattcctccgatgttacacatttagattgttgtaaattaaggttgcagagcatatacttaccccacagtctttctttggatatataatctttttaattaatagattttattttttggagcagttttaggtttacagaaaaattgagcagagtttacagagagttcccatagagtccttctcccactacatgctgtttcccttactattagtgtggttagttgatttggtacaactgataagtcactattaatgcattttgttaacttaagtttatagtttaccttagggttcactctgtgttgtacattctataggctttgctgaatgtgtaacgctatgtatctactgttacagtatcatacagaatagtttcattacctccgatcccctgtgttctacctaggcatcccttccttctgacaaatccctggcaaccaatgattgttttcctgtcgccatagttttgccatccttttacttttaaatactcagagttgtcatatttaaaatggttttctcagccgggcgcagtggctcacagcctataatcccagcattttgggaggctgaggtgggcgaatcacccggactcaggagtttgagaccagcctggccaacatggcaaaacctgtctctactaaaagtacaacaattagccrgatgtggtggcacgtgtctgtggtcccagctactcgggaggctgaggcaggaaaatcacttgaactcgggagagggaggttgtagtgagtggagrtcgcgccactgcactctagcctgggcgacagagcgagactgtgtctccagtaaataaataaataaaataaaatggttttcttaaaaacagcatttagctgggtctggggtttttgtttctttgtttgtgtttatatccactttgtctatctctgtctattaattggtgtgtttaggctgttcatgtttaaaatgattattgatatatttagctatatatcaaaaatcttttaactgttttctattccttgcatttgatttttgtctctttttctctcttgtttcctttggtttaactgagctttttatatgatttcatttatctttttttaagcatatcatttatgcttatttttaatttgttaatagtcctagtgttccaatacatggcttaaaataatgtcaaattactttcaaataacactattctgcaccatgtataaaccaggtaccttgtaacagtgtattccttatttctccttcctatgtctcatacattactgttgttaatttaacttatatatatactaatacattgttactgttattgcttcaaagttatattttagagcaatttaaaatagtaaacataaaagatttttttattttacctccacttattgcttctctgatgttctttctctttttatgtagctctgagtttctgacctatgtaattctgcttgtagaactttttttttttaacatattttttgtagagcaggtatgctgacaacaaattccctcaattttttttttgtctgaggaagtctttatttctctttcatttttggaagcacagtttcactggatgtagaattttaagttggtgagtttttttttctttgaacaatttaaatattttccttcactctcttcttgcttgcataatttctgatgagacatccactgtaattcctaaactcacacttctataggtgtggtgttccccaccccaacccatccgtggcttctatcaggatattccatttgcctttgttttttgcagtttgagtatgaaatgtccaagtgggttatttttggtatttttcctgctcagtgtttgatgagctttctgtatctgtgatttggtgtctgtcactacttttggaaagttcttactwttattacttcaaatattccttctgcttcattctctctttattctcctactggtgttcaaatgatgcatgtgttatattaatatatgacattgcctcatagttcctgggtgttctattccagtttaatttttttcttttccctctttctgtttcagtttgtgcagtttctatttacttatgttaatgttcagtgattctttcctcatctgttttgagtctactcatgaacttttcagaagcattcttcatttttcttgtgcgtgtgtttttttagtatctgcttttgattcagttttagaattttcattttgcttcctttgctcttgcatgtcctctgctttttccctgagagtccttagcataatcatagttacttcaaattccctgtctactattcccaacatttctgtcatgtctgattctgttctgatgatggtttgtcctttcagactgtgtttttacttgcctattgatgtgccttgtacttttttactgaaatccagacatgatgtgttgggtaataggatccaaggtcaataggcctgtagggtgaggtttctcgctagactgctggcagcgggctttgtttcttgtgtgttgtatctgtaagtagcagagcttcacagccttctggtgtcctcatttttgtcttcccctttggatktgggtctctcctgtgtgctgttcttcagagagggtctacgccttgtagctgtttcagctgtaacccgctgctatagtggagctgccttggtataggggctgtatatggggtggagggagcattctgtacttttctgcttcaatctgtcttgtagcaggtctgcatctcagggctgtgagcttcctaagtgtttctgtccctactccagtgatagttttacccccaacctccattccccagggtgggatggattttcacagttcagctcttgcaaagtgatttccccaggagagtaggccttttcatggagaaggttctatgaatgttttacaagttacactccccattcctctgccaggaccaggaggggatctattttggatccttaccatgagaatctggtggaacgcttgaagaaaagttcagtaaagtgtaggatctcccttaaggcagggtcccacagtgttttctgactctcaagctagtccacactcagcctccagcaagtcatcatttcaattcccatcattttatggcccttgtggattctgctccaagcaagcagatctttgcagtgtctctcaggatgaacccatctctccacattttagggtaacagtgttttccggtgacttcagttctctgatggatttagaaaggtcagtgattttcaatttgtccagctttttcttgttgtaaagcaggagtaacaacatcctagctctcaatatatgtatgcgcagattcttgatgtcctctttaatttcttttttattttccccttaaccccgtatcttcagcatttacttatttcattgatttttttttttttttttggtatggggtctcactgtgttgcccaggcttggagtgctgtggtacaatctcagcttacttcaacctctgcctcctgggttcaagcgattctcctgcctcagcctcccgagtagctgggactactggtgccccccaccacagccgctaatttttgtatttttagtrgagatggggtttcaccatgttggccaggctggtcttgaactcctgagctcaagtgatatgccctcctcggcctcccaaagtgctggaattacaggtgtgagccaccatgcccagccacattgattactttttaaaacacaattttgtgatgcttttatgtccattgtgtggacaccctatcaatcagtcagctaaccccttatgagcgattaacttgctagtttacagcactgtggtttgtttacagacctttttccccgttgtattatatttacagctagcaatcccttacaacatggaaactttgttcttcaattctaagaataaagtctagaaatgtttctttgataattttctgtaatatatttcttctgattttcctttatagaattcctacaattcagatgacttctggagggaatcatttattttgcatatattttctccactgcttttcagctctgttttcctaatcattgggcctatattttttcaactttatcttcctttcattctatttggactatcttattttttttccaacagttattttttttctgaacttgtctcttgactgcaataatgattatctctttaagatcaataataataatttattgtgtattatttccctgtacattctttctgtttcctccaagttcccttttcttcctgttgttttagtttctgtttttgcgttaattttttctttttagttctctagtgaccccctttctggtctgctcatagactgacttgatagccatgtatgtgacaagtagatccaaatcatgtcatgacatagaataccaaagaagagttaccggatggtgaatgcagaaactgcagtggtgtagtgacccaggtggagggctgggggtgatgctctggtcattgtccatcagggctttcatgcctatagaggatatacactgtggagcttaaaggcctctgcacagtcattatacatttacagcagagtggccctagcttcttcattggtcagttctttataccttccacccaaggaccccagcttcctgctttgagcagtgggcctcttcaggtattcacttttaagtgaaataagttttaccaaaaatttaaaatctgacctagaacatagtctcctagatgactgaagtatgtttaatcgcaggtggggatgtgatacttctatggggataaacctaagactgcctgattgcctggatgccctaaggtgtaattcgtagaggaaaaggtggacaaatacttgagtctttcccctttacttactagtttgagtgatgctagggaaccagctcattattttgcaaaaatgaccaacatatttaaaaaatacctttctaaaggcaagagataaacatatttgatagatttcaatccattgtgcttattcttactaaaccttattctttcttatcttttgccagtgggcagaaattaaaatttatttccaagacctttggatatactttcaatagtttttaatagattatttgcagtctgttataaaagatgctctaggcttgtctcgtacatttcttggctcaaacatagaatgactaattattcaaaggtccctggtttccttttctaccaaatagtatttagagactgctttccagatcccctgggggtactgattgccattacagtagacattgtttctaggatttttcagtggaatgttgtagaaaatatatatgtttaagctataatacatcatgagctcaccatgatactttaattcaaattcagggctacctgatcttacctaacttcatcartcttatagctgtgcattctttctcccatggttggagattccagttcactgactttattctttatttgctttaatccataacacatgcataacagtcccagtataaccataccaagaagcagtgattgtttgaattctgaagtgcgctttgctgtattctccacaaaaagagaataattttaaaatgttgacttgaaaaatagtcatgaaagtagctgagtgagcattaattaaacatcctgctgtgttttstgcatagttttagctcatgaatgaagacagtgatttaaaattgaaagcagaagacaaagttaactgactagataatgaaaggtgcagacttattaaaggcataagagaatgcttacccaaaggagttatcattctttttttttttcattaaaccccttccattctagcacagaaggattattctatttgctgatggaaatataccatcacatggaactcgcagatgtaattagcatttgcaggtttcattgcaaagatatttattatcattattacctgagttaagtctctcaatagatgctattggtccttgaattctggaaatattaatttttagataaatgttgataactttcttgctgttaaaatttatctttcatattatcacagccaagaaatagttgtaaataaaaatgaaataaagggaagtgagctacttctgtaatttttttttttgtaagtaggctattctttttcactaatggtggcagttaggcaggattctattgctaagaagcctcagaggaccccaaacaaccatgcttacaaagccatggtttattgcaggaaaagggttcaattcagcagcagtattaaataaagaatatccacggcagttaaaggctccctccgggtccagctgcgagctccatttggccttatggaaacacctctgctctgagatcacgaaccactgaccagtgcacagaacacggtggacccagggagctgagggcggaatgtggtcaggatgttttagtactctcctgatcacgtgggcattttcctgccacacatccaacccaaacagcagatacttctgcgtttctcatcaataaacaatgctgaaaagttggtacgaatcccccaaaactccttggatctgtgtttgccatcagtattgccaatgattatgtttcatgcctttactaggtgctaagactatgcaggtacatttcttatttcagtctgacagctcaggctaattacaggcctgctggaaccagtcctcccaacatacctttgaacttcatattatctcaatatatattctaaatcaacatttattttcattgtaatgtcccaaaattctttcatgcatttatgaacagagtaaaactttcaaaattttcaattttcaaatcaaggcagttacatatacatcttgtaaacaggatttaatggtgactcctgtcaaacgaaaaccagagctagacaatgaaggggtaaagtcagattttactcaagacactgttacggtaggaaaatgaagccctcagtgcagaacttgggctcaactccagatttaacaaggaaaagtgagaatttatatgcaaggaacagagggtgggatccagtggagggaaaattactaaggggaaacatcagggttaaagagattctggctaaaccaacctcaaccaacctgctgaaggcaggccatggtggccagatgtcgcccaggggatggaggaggatagagaatgtcatcagatatcaagggtggtgagttctggctaaactgacttagcaggattcatgctacacttgggcccctggggaacatgcccaaagacggaacctagctggactcagaggaggctgattaaagtttggtcaaagagagagtttttgtcattgttccttcttcattttttccgtaacagttacaataatagcctttatgatttgacttttatatatttttttctcatatatgtcttgtgtttgttctatatcattttatcttgcattccttaatggcaaaaacactagaaacatccactatctacctatgtcatccaaggcaaattgccaggaataaggaaagattctagcaaaataatactagtactaccacttctactatgacaactacttttatactaagaaaaagaaggagaagaaaagtgaggaggaaaagaagaaacatagccaccatttactatggttgcagtgtttgtatttctctaaaattcatgttgagacttaatctccaatgcaatagtattaagaggggggccttaaggaggtgattgggtcatgaggactcctttcttgtgaatgggattaaggttttcataaaagaggtttcacacagcatttggcctttttgcccttctacctcttctgccatgtgaggacagacagcattcatgccttcctccctgtaagggtgcatcaagagataccatcttggaagcagagagctgtcctcaccagacactgaatccaccagcaccttgatcttggacttccccacctccagaaccatgagaaatacatttatattattcatamactaccaagtctcaggtatcgtgttatatcagtacacacagaaagacaccatttaatcctcacaacagccatctgaggtaggttctattactgtcctgaattttggttaagcaaattcaggcagaaggatgttaaacaatagctcaagrtcacaaagctaataagggaaggaaacaatttcaacccagacagtttggctttgcagcccaaagcctttgtttcttaccttgaactccctttttaaaaagaaatctcatttcattgaagtattttctttgaaactttattcttgtcytacatatgtaaatgtctttcccaccccctactctgtgaatctgagcactaaatttcagtttgaagtcttctcctctggagccgaacaatactcaaagttttttaggtgcagatactagcagaccacagagaagtgagtcctctctgtgtagcctaaatgagtcatattatcccagccttctcccaagacacacgcattggtcctcctataccattttggggtagggttgggtcaaagggactcccatgaggagcacttgaattgaaacaaataaaatatgttttcatatgaactctctcaaaaacgtcatagaaaatgattggcagatttccaggggtgaggtgttcttcagaacaacccattcccatttcagggctgctcagattattagaaagtttttcttcatctgctaatactatttctgacctctggaatgattcagactaagcctacttcttactagctctttatctaatgaaaaataatttaaataataatgacaacaataataaccaataatgctgataagtgctgctgtgtcctgtatatctttctaagcccagtgaatgtgcttatacattggctcttcaagaatgccctctagagaaaggggctgatattctgatctttgttttacaaataaggaaacttaagtgtaaagggggtaagtaacataacatgcaggtgtaagacctagatttgaacccaagcagtctggctcccgtacttaaccaatgtacggaaccagaatgatacaatggcacattgtccctctcacgacctcttctcttaaccagtttcaaggcttcatctttccagaccattcttcaatgctttagtttatagtctatccattaagtcagtccataatgtaattctttaataataacttattgagtgtcaaacatgctgccatgcttggtggaattctccagatgactctaatttgtggtacttctcaaaagtgaccatggttctccaaggcctggaacagagagggaagggactactggcagcatggcttatgtgtacgtattatatggtacacgagataaggatgatggcattgactaacatggcatttcaacctacttgctttccctccgaacaacatgtcactcatgaatttggtatccaggccctctgttttatgttactaattctgatattgcaaaaagaacagcaccagggcagatgactgagacgtgccatggcagcaatgtccattagtgtcatttgtgcatgtacttaatatacaactactgtgcatctgactyggttcaatttgtgaatcacccagtgccttaagagttccactctgaagctgtttgtcttaccatgtagaccacactggtgcagtctgaataaaattggtaacataaaattttaccaaaagtcataggaaaatctagggttatgtctcagtcattctgctgattcactaatgaggatatgaaatttaaaaaccatacccttcatgctatatttacccttcatgtattattaggactttctgggttcttctgttttctttagatgctttggagtcttggcccagagagttttataattttggcaaatactgatgtcaggtttgatggaatacaccaaatgttgcaacctagtttcaacctagttgactgaggggatcagtacacactgccccaaaatatggcaccgtggcctttgagggaacaacagaagcagaaaggtcactcacagacattctcctaccattcttccctgaagcaggccataaaataattgtctaatcttccactatcataagaacctcatcccagyggtattctccctgtacctccctgtaccckgaggaaaggtatgaaatgtggagacaccaagaagaatctgaacacacagaccttgctaagttctccctgtttcctcrttgtcagatcacacctcctttcatccaattacacctctatgcaactgtccactcttcatcagacccaagcataaacatatgccattttccctgtttgtttgggtcttcgtttatgaaggctccastgtaacataaatcttatactaaatacatttgtatgtttttcttgataatctgtcttctgttatacgagtttcagccatgaaccttacaatggttaaggaaaagatataactttttcagtcctacatgtttatggtgaaatatgtcctgtagacgtggttagtttggtttgcatgatgatagttatctactgctgtgtaacaggggagcacagtggtgtaaagccgcatacacttactgcctcatgatttctgcaggtcaggagtctgrgcatgtcttcagtgagttctttggttaaggtctaatgaggctgaagttattgtgtccttgggctgtgttgtcatctagagtctcaaatggggatgaatgtgcttcactcaggtcattcatagaattcatattcttgtgatttcaggactgaggtcattgggtycgtatggaaaatcatctggaggcttatcacagctcccagccactgctctcagctcccagaggtgccacagttccaagaagccatctccatttccttggcacatgggcattcccagcacagctgctgacttcattaaggcagcaaggagagcccctagagcacatctgctagcaaggcagagtcctgtgcaatgtaatgggatcatgggagtgacgtttgtcaccttgctgtactttattggttggaagcaagccacaggtccttgtcatactcaagaggtggggattaaccgaatgtgtgaacaccaggaggtggggatcatggaagattcctttgagttcgtcggtgacaataatgtttaaacaactgaattcactgctaacaggaaatgtcaggaaatttcatattaaaactccacgtgtccccagatcttagaaagcctgatgccagatctgcttttacatgccagatctgcttttatgtgaccagtatcagtgtgagctgagaaatagctgcttgctctgagcagttgcattgctactcatctcatcacaatcctttcttgcttattgtatgttgctgttgtttattgtcttgcatgcataggtgcttttcacacatctaggtgcttcaattatttgtgttatctggctggcctctggtgacatttgtgtttttataactcctggtctatgtgtgatgttacttctttccttagggatgcatactcttgttgactgttctcattgcttgtggaattctggctattgcttttgccagtgattgtagggaaggtcatgatattttatctttggcccctgataaagtaattagtaattatggagtgataaaaagtaataagcaattatcaaggtctaattgcgtgtgggccttctgcttgtctataggcgctcctggactgggctcctagtaagcaggctgctggctgtcattgccaaccaatactcctttggctgaggccaattcttgaaggccatcttcttgttatcacaaggttgacttacaggaaatgtattaaaatctcttaagttttttgacygtgtctcacataatatagatattcacctgggtcaaaggcagcctgagattatagctccattgtcataaaaatgtcagctaatctccccagttgttaatatctcagtactcttgggagactttgctcattttaaaaatcaatttttgctcaagcgtatgccaaacttagttgaccttaaaataacaaagtaagtaatctgaggtcatccacagcctggcattcagagagtctgctgccttggggaaggaatgccattcaatttttggattccattttcacttcgtttattatctctagctagcaaaattcttttagacaatgagagggtggcattcttacagagtagcttatgggtctggtgcactgcacacgtcagccccatgatgggaaccaggtaaggaatcaaatgtctggttattctggaagctggttaattttctcaccaacagaatggagtttgtgtctggggtcagtctttgaagctgaactgagatgttcacggttgctgtaaggtagatgttcacaggctccagatgcctttgcccttggagagtgctcacattcgtacctaacagcttcagagatgagagccttaaagaggggctcaacttcccttcggcgataccaccctggttccatcatgtctaatttccctttgagcagatggcacctaagttattcagtcaatagctatatgcataactacatagtgactctgggttgtgcagctaatgtgactaacagtgactgtgtagaggctgtgcctggggctgttcagccagccaccaccacagtgatgctgtgcacccctctaaatgctgtgccacctactgttccaagctctttacatacttagaaaggatatgtaatttgcccaaggtcataacgctagaaaatagttgagccagtgtatgaactcaggcagtgtgtttccaccacaatattatacataaccttaaaaggttgagtctataagatctgtttggctaataaaaaagagtgagattctgtttttttgcaacaacatggatggaactggagatcattatgttaagtgaaataagccaggcacagaaagacaaacaccacatgttcttacttatctgtgggatctaaacatcaaaacagtggaactcatgaagatagtagaaggatggttaccagaggctgggaagggtagtggagatggagcggggaagtgggaatggctaatggatacaaaaaatagaaagaatgaataagacctaatatttgatagcacaagagggtaactttagtcaaaataattgtacattttaaaataactaaaagagtgtaattggattgtttgtaacacagaagatgaagccttgaggggatggataccccgttctccatgatgtgattattatacattgcatgcctgtatcaaaacatctcatgtaccccataaatatatacacctactgtgtacccacaaaaattaagaatgaaaaaatgttttaaagatctgttggccaaataatatagatactaacatttatgtgctcaacactgtactgttgtatatgcagtgtgccatgggattatcagaccaaccctgtgatagaagctattattatcttctttgacagttgaagaaagtgaagcaaagaarcatgaaataacttgttcaggttcccacagctagaagtgggttcaaacccagcatctgcactgttgttaaccagtctgccacagattattccatgtgtggaggaattatccctatgactctgctttgcacttggtaaaaaataaaagcaattgagagagaaaagcaatgcaacatgatttcagggaaactcctctcctacagaatggaggtgcagacagcctgtgccctggagaaggtcactgcactgctcgcaaggctgggctggctccatggccaccagttgaaagccttacaccaatggtgtcagtagatgccttggtacgactttagctactgcctcatgctccacaaagtagagaattaggtgacgattgcacttgaagcttagtaaagcagcggagacccccttcacccagagagcttcactcacttccccgtgtagctcattttggtatttggaaaagaggctgtgtttagcatggaaagcaagccgggaaattgtttcaggaaggttagggtggtccccaaagccaatctggcccacctctagtaagatgaagggcaaagatgggcctggctggcagtgatggtgtggagctcaggggatcccctttttccctctccctttccatctttttctaagaagcrtattaccctcacatgctgattttgcctaataggacatctgtgaaatcactctttctctttgtcagtgaaactttaattgaaggttggaatatgctgatgggtaaaataggtgtgtcaatatgttagtgaaaagaaatagatgagttctcattcttgtaggtatcagatatctttttgactcttggacattgttatggtctgaatgtctgtgtccctgcaaaattagtatatagaaacgtaacccccaagatgatagtrctaggaagtggggcctttgggaggtgattaggtcctgaggttggagccattatgaatgggattagtgtgcttataaaagaggcctgtgggaactcactcactccttccagcatgagaggacacagcaggcactgtctatgaggaacaggccttcgccagacacctcatctgctggagccttgatcttagacttcccagtctctagaactgtgagcaatacatttctgttgtttataagttaatcagccatagcagcacaaatggactggcatagacatctcagcccgtattctttgttctagcccatcggaaaatgatgggtgcgtatgacacacagtcccagtggtgtcccgagtgattagcacagtgggagtgataaaaatgactcccattccagcccctgctctcaaacgcttggtgctgagtggggtgaaatacacacacgaggatgataatggaggcattgctgctgtgtacagcaggactcgaaccagggaggcaagcaaaaggggaagccgaggccactgtggaggcacagcagtccctgaggtcactcaaggggttaaggaagctggcttttgggcctgttctgggaagggccattcaccactcactagacattttctggacacccaggcggccggagycttccctgctgactcagccctgccttggaagcctacgctttagtgggctgaattaaaytccagattggtagaggggtgtttggagggcagcggtgaggaggtcaaccctcagcagtttaactcatgttaagatcacagaagaatggtctgtgtggatatcttcttagagcctggggacaaattgcaatgtccatgatttctaccgaaatagacacttctggatattgtaaagccatagtgttagccaataaatataacttgtggaaggggatcattggaacaacagtggtaagaaattccgtttaccacattgtatctagttctgctgtacctaatcttctaggatcttcagggcagccctgtgaggtctgattacactcacttcacaggtgggaaatgaaggccagtggctctgctgctgggctctctgtccaggctgcatgaccaaaccacctctcctcctagcatctggagcagagccttttttccatgcaggtaaggcagatgtccttgccctaatttacagtgtgatccggggaaatggagggagagacgatgatgcccatgacagagtcttgacaatgggtcattgctgaagtcctgttatcattgattaatcatcacggcttcctggtaatgcctcagtctttcagagcctgactcagcgcctcttggctttagataacagctctaccagggaagcaggggagtagggggaaggcccagtagaccctgggggcaacagctgtgggtgcttgagccagctcaccccaggcaccagcttgttgcctcaggcaaggccccataaaggttatctctgcttataaaaccctggaggagctgttctggttcctttgaaaaatagactttgaaagcttgcccaacctttttctttttcagcagtgctgctgagactacctgtttgatgtgttataattacattcactctaattatggctactgatttcttcaaaacctcagcgcactctggtactattcttcctgcttgcttactgctgtgtgggattatttctccctagatgttcaccagactttggcttttaatgacagcagccagttgcatttccaaaacattttaatttaattatatttctcaaaccaaagagatgtagtgtgatgatatgccgaaagactttttattagtaaaaaaaagaaatatttcaaatgaaatgtatcgctgttttttatagccactgttgtacagtggaaggtaattcaaagataggtaaagaaatagtgttgtcacagaaagataaatattgcatggtctcacttatatgtgggagctaaagaaaaaacttgagctttcggaagcagagaggagaatagaggttattagaggctgagaagggaagggaggaggagagggtggggagaggtttgttaatgcgcacaaagttatagccaaataggaatgagtgctgcagggcaagtattgttagcagtaatttattgcatattttcaagaagctaaaagagaattttgactgttcacaacacaactgataagtatttgaggtgatggttatgctacttaccaggatttgataattacatattatatacgtatattgaagtatcactctgtattccataaacatgtacaattttatgtgttgaccaaagataaaggaaaaaataagatattagcattgttagacattagctattaactttgttcgatattagcattaggtgttagatattagtattctttgcgggagcgctgtgtccctgaaaggaagagtatctctcagagggaaacagagacagcagccatgcgccacatagcaactggccgctgtctgccgcaaggctgggttgtgtgcactgtggcactcgtcctcaagtctgcttgggactattgcaaacaccaaatgaaacaccatcttcaactttgcagccaaatgcctcttaatagaatgagggcagataatatgatctattaggagcttccaaatggcatgttccagtaaaaaggaagaactgccttatgcatgcaactcagcagagatgatgattagacacagtgattgcagatcacagcgcaattaaatgtgtcttcccttagcctaaatccacggggagattggagagacacaatctcacgtgcttacagcaaccagcggcatgacataaaaccaktgagtagcaagttgagagaacagggcttctttattttacactttctttactaaacactttatatattgtcttattggatccccacaaatatcctaaagataaatcatattatcaccttaatttacagataagaaactggggcacggagaggctcagtaacttagtcaaagctacccagcatgtaggcaggggagggactcgcgattaggtcttgtctgacttggtgaatccaccgtaacatttgacttgcattcggtcctcaatctttcccaccgacagtagcatcagtactgttctcagagtgcttccaggcctctgacttctgaccatcttcaggagggcacttcctggctgtggctgtggctgcactgtggtgcgccatggccaactggctgggggaggccatgggttttccatggaagcgatgggtgtcacttccaggcctgagcattgaatgctggggcgaggcctttccgagctcccctgccctctgctgtggtgagtcatctccccaaagtggagcaaatccatggtgaggatggaatagcactgagccactgggcaataatgctgttgtttgaggcctctgaacttgcagcaccgccttttgccatagattagtttagcccgccatgatggattcgagacaggtgctagggatggatggcataawgacccaaaacctgaaatatgcagcattggcttcaggtgacagcgatggtgatggagccctgagtaggtggaggacatggtgaccctggcatgtagtgaggtagcattyggcctcaggggcaataacttggaagrcaggtcaggcacctacagacctcatggccagcggagagattggaaaatagatttttaatagtatacattgctgggtattgattgcatttggcagggcattaaaagaaaaagatgatcctaaaaatcaagtggtttcagcaattccacttctaagtgtrtayacaaaagagttaaaaacagggtcctgaacacatctgtgtataccagttttcctagcagcattgttcacagtaattaaaacttggatgcaacccaagkgctcactgatgggatgaatagataaaatatgatagatatatagaatggaatatgattcagcccaaaaaagraaattcttacatgtgctataatatgcatgaaccttgaggacattatgctaagtaaaataagccagtcagaaagacaaattctgtatgattctacttttatgaaatacttagagtggtcaaattcrtagagacagaaagtagaatggtggttgccaggtactgaggggtggggggtgggagccgtttaatgtggacagggttccacttggggaaagtggaaaatctctggggtctccttggaaatcatgtctgcttttaggcagaaagcacagcttcttctgtgaattctaatttctgcacttcacggtggagggagtacttaaagataccaacgaacagaatgccagcccccacacctttatacctgcatggccaacacrtgcttaagcagtgtttgttttggtgaccgcattattccctttttccccaagtcatcaacttagcattcaaagcaataatcattctttaaaaaacaaaactcatacttcatctatattttaaataacaatacaygtgtttacaacaaaaatagcctttggccttggcagatttggacagcacacagtcggcagtaagaatagagaccccccactggtaggtgtggagggtggagatgagcctggacagctgctctgtcctgtgagccagccacgtgggtgctggtgataaagcgtctcctcagtagataagagattacaaagtgagaarcaggaaatgtgacctgggtatggaaggcgataaaatggacacatctcatgacatataaagggaaacctttcatcctttaacatgtggtttgaggccagggatggtggctcacgcctgtaatcccagcattttgggaggcccaggagggagcatggcttgaggccaggaattcaaaatcagcctgggcaacatagtgagaccctgtctctacaaaaaagataaaatgtggtttgttattgcgaatagtgcttggcgtccatatctggtggaggagagcttgtggctgctgtggtgctgtgtgttgtgtgtcgctctaccttgtggagggtgctggatgccacagattcaccacacacgtctcccttcatgcatgatcaacccatgagtcagtgctttaagacttatctcaggtaccggaattatttaaaataattgtccagaaggcttagttttggggagatccattgagcgagtcatctgcccacgccttgaagcccataatcctgaggttgagctgcagccagcatggcttcccttytagtgtgtgaatgttttacagagtatgttgtcacttgcattgacacgttgctgatattttatatatttggatggggcattgatgaaataagtgcaacactgagcatttgtaaagcagaacaatttgacacagttgttttgttagaacttctccacaaccatgggaagaaggcagagatagaaagccgagtccagaactgaaatgacttcttcgcagagccctctggctctagacaagtgacaatttctggggttctcctactattcctattgcaggctgcagttacctgccagcagaacgatactgtgtgtctcattatttcaatgaggtcaattggatatttttaattgattttcagttttgaattttatttataaaatgtaatttacagtgatgtgagaattagaagatatggaatttatatctacttttaagttctcacatatttagataaaactaaaaataatttaagtcaatattggaggtttgggaaatttggggagggtaaaaatatacataacatagaacatgtatggtatgcatataatataaaatgtatcattttgagggtatagttcagtgtcattaagaacattcagattgttgtgctattatcaccactgttcagccaaagaaattttcatcttctaaaactgaaattttacctcctttaaacagtgactccccagtccttgcattccctggtccctggcaaccacattctactttctgtctctatgaatctgattactcaaggtactttatatagtggaatcatacagcatctgtccttttgctactgtttaattacatttagcattaatgtcttcaaggttcattcatgtcttagcatttccttcctttttaaagatgaataatattcattatgtgtatatgccatattttatttaaccattcaatcttagatggacacctgtgttgcttctaccttctggttattgtgaataatgctactatgtgtacacaaatatctgcctgagtccctgctttcaattcttttgggtgtacacctgcaagtaaaattgcggtcatatgataatttatatttttctgaggaactcccatactgttttccatagtggctatgccattttacattgttaccagcagtgcaaagaaatgccaatttctccacatcctcgccaacacttgttagtttctgttttgttttttttttttcataacagccatgctaatgggtgtgaagtggtgtctcattgtagttttgatttgcattttcctaataactactgatactgcacaaccttacatgtgtttattggccatttctatatcttctttggagaaatacctattcaagtcgtttgtccagtttaaatcaggttgttgttgttgttgtttaaatagttgctctgttgtagttctttatatattctggacattaacccattatcagatatgtaataatatgtaaatattgtctcacatgctatatgttgtcttttcactttgttgatagggacttttgatgcataaaagttgattttgatgtagtccagtttatctatttttttcttttgttgcttgtgttcttgtgtcatattcaagaaataattgccaaatttaatgacatgaagcttttccccttggttttcatctaacagttaagttttagctggtatatgtaggtctttgttaaaatttgaatcaatttttgtatgtggtgtaagataaagtcccaacttcattcttttgcttctggatatccagttttttcaacacccttgtggaaagactgtccattctccatttaatggtcttggaacctttgtcaaaaatcatttgacaatatttgtgtggctttatttctgggctctttgttccactggtctagatatctgtctttatataattaccatacttttttgattactgtaactttgtagtaagttttgaaatcagaaactatgagacccccaactttgttcttcttcaagactrttttggatatttggagtcttttgaatttctatwttaattctaggattttcttttcaatgtctgcaaaaatatcattggaattttaatagagattacattaaatctatagatcactttgggtagtattgacatcttaacaatattagatctttcgacctgtraacacagaatctttccattttttggtatcttccttaatttctttcagcatacacgtctgttgtccattggttcagtttatttgagtgtcttattctttttggtactattgtaaatggaattgtttcttaattttctttacagattgttctttgttacgtgaaaatataactgatttggggtgttgactttgtatactgtcctgtaactttacttacttcatttgttagtcctaacaggtttttttctttgttattattttttttggtgtgaaatctttaggcttttctacatataaaatcacgtctgtgaaaagagataattttacatcttcctttccaatttgtatgccttttaattttcttttctttcctaattactctggctagaaattccaatactacattcaatagaagtggtaaagtgggcattcttgtcctgtccgtgattttagaggaaaagctttcagtcattcactattgaatgtgatgttgccagcgggtttttatacatggcttttattgtggtgcattcgttatcttctgttctgagtctttgagtgcttcttttcacaaaagggcgttgaagtttgtcatatactttttctgcatcaattgagatgatcatgtgcttttttttcttcattctgttaatttggtttattgcactgattgatttttttatgtcaaactatccttgtttttcaggaacaaaccatactttttcatgctctatggtccttttaatgtgttgctcaattctgtttgatagcatttcattcaggattcttgtatcagtagtcaaaaakatattggtttgtagttttgtcttcttagagtgtctttgtttggtgttggtgtcaggataaacccaacctcatataatgagtttggaagtgttccctcgtcttcaatattttgaagcatctgaggataattggtattaattcttctttaattttttttaaagttttatttttgatggacatgtaattgttatacatacttacacggtaaaatgcagttctatttttatttttttgaggaacagccatactgttttctgttatacctgtactaatttacatttctacctcatcagcggttctcctttctccacatcctcaccagtgtttgttatttttcgtctttttgataattggggtaaggtgatgtcttactgtggttttgatttttcatttccctgatgattagagrtgttgagcattttaaaaatatatatttggccattttcatgtcttcttttgagaaatgtatattcaggtcttttgaccaattttaagttggattatttatatttttgatattgagtagttcaagtttcttataaattctggatattaaccccttgtcagatgtataatttgcaaatattttcttccattctgtaggctgtgtcttaactctgctaattgtttcctttgttgtacagaatctttttagtttgatgtaatccaatttgtctatttttgcttttattgcctgtgcttctgaaattttatccaaaaaaatccttccccagaccaatgtcatgtagcatttcccctatattttcttctagtagtttcatagtttcaggtcttacatttaaatgtttaatccatttgagttgtttgttgtataaggtgaaagataggggtctagttttattattctgcctgtgattatccagttttcagagcacaatttattgaagagaattctcctgtgaagccatctgttcctgggctttttcttgtttggaggtttatgattactgattcaatcttcccagtagttacaggtttttttttttttttttttttttttttttttgtggcttattttctttttcttcctgattcaactttgaaaggttgtacgtttccagaagttttctatttcatctgggttttctatktattggkgtgcattttttttartattttcttgtaatcctttttatttcattaaaattggttgtaatgtctctttcatcttttggtgctgagtttagttacatgcattttcttcatttattagtcagtataggtaaaaatttatcaattttgttgatttttttcaaagaatcaactcttattttgttgattttttttcctatttcttattccatttatctgtgctctaatctttattattttcttcctttgctagctttggggttagttcatttttctttttccagttccttagagtgtaaacttagattattgatgtrtcatctttcttctttttaatgtaagcatttacatctctaaatttccttctcagcattgcttttattctgttctataattttttttatgtggtcttttaattttcatttaccgcaagatattttctaatttctcttacgatattgtttttctaggacctgttggttgtttaagagtatgttgtttatttccacatatttgtgattttttaagtttttttctgctttagatttatagttttattctattattgagatttttttccctaaactatagagaaaagtgaatatgatcatccttccatcttaacatacagctggctttctattagaaaatactactttttttctaccagcctattgagaagttaagatgtttttaaataatagattcattttttaaacatgtgtcctgaattaatacctatgaatgttygggttctccacttccacatgccttttctaatcagttatgtattattaatggagactcccactcctgtgtggtgttacacccccatttcagagtcacagagtgacttcctgtagccattgcccaaggcgctggtgaggcagcctgtggattacttatggctcaatcctgagctatgaatttccctttcctttttttctgttttatgcatttctacctttgaaacaggctcctactgacatgtttttatactgacaaaaggctagttgctctgcttccaagtatttaatttgctttctaaaatccaaatatgaatttctctgggagagctttttattagtttttatgamaatgaagtttttcttgattaggcaatttgtgacaagttaattgaatttgtcatgtgcaaagatgaagagcaaattgttacaaactgcaaatgcaattgggctgttaacttcaacatgataaatcatttttgttggtgtaaatgtctaggttcatcttacggtatgcacttttcagatttcacagttcaacaagacccacacactttagtgggtaaaacagttctcacagaggattaaacatttgaagttctttggactttttgaattttataattgcagaaaaatcaagaatattttacttatgaatcaaagagattatcatgtagcaccatggctcctgattcttaaggtctctctgtaattaaatgctttgctgtttatctcccaccaccaaagggaaagcgaatttcacatcactgagcttgtccataggcatcagaaagaatgatcttacacttccttcattttattctttagggagttacgaatgttaggaaatggccttggctgtgaacatgattggcctgagaccagggttaaaaatgaatgtcattaacttaagcatacactttattagcgagcagactgcaggtactaaacacaggatttgtgcaagagacaaaacagcccttgtcctagacatgcttcagttccagccactccttgtcctcaccatattaaaagaacctcccccatctcyaattttctgtcagggcaatcccccaaacctcccttttttagaaacacmctcctgttcaagatgaccaccatggtgactctccgctctgttcaaagttagcctcctctgtttggcttctgggggctctgcagtgtgacaccccactgtctacctagcactgctgaggccctgtggtcaccacactgggctctggcctagtcccacccatgcccggcttctcctttcacttccctcctctcctagtgttcactgtcctyctcagaaagacccaggtgcacgttgtcatggttttgaaggtgtcgctaaagtcacctcctccaggaagccctccagggcttctgctgctcatgttggtcttgccctccacagaggtactatgcgatcattgttggcattgtggaattgaatactctttccaaagcagatgatattatgaaagaacaatattctctctgagagaatcaaaattcccctgaagctagggatccttcctggagcttctgtgttgcacttccaaatcttacagggctggtcctccattgactaaaaaaataagatacaaatttccaggagtgcattaaggtgttgcccacgttagagtcagctttacaaagtgcaatgagaacagttatgaccttgaatgataatatgggacttttagacaccacacaaagggacatcagtagtctcttctgaaaacttttattctaacatctaattatactgatgagcaaacatgtgtttttagctatagtaaagagaaatgcttatgtaggcagtgatgcctcttttctatcatggtaaatttcactagttttgatagatgggattgatatatggcatatgtgtgtgtgttcctgcttaattaaaggaactaggaactgatcttaatcaagcagaactcattaatagctttgagaataagagccagtgtggccaggtagagcttctttgaatgaacatatgagggctaatttcctaagtggctgttcttatgtgcttgaaagcagtctgttctcataagcagcgaggggaattctgtgcccagtcctcatttgtttagcagatctttcaaagtagctccactatccagtacttagtgtagatatttaaggctgatcatttggatggatcagacagaccatgtctcaaagcatgctggttgtatgagctagggcaaataatgtcaaatttttagcactgacttgagggttcttgtgagagttaaaggagataagggaggccaggcgcagtggctcaagcctgtaatcctagcactttgggagcccgaggcaggtgggtcacgaggtcrggagtttgagaccagcctggccaatatggtgaaaccccatctctactaaaaatacaaaaattagccagtcatggtggtgtgcgcctataatcccagctactcaggaagctgaagcaggagaatcactcaaacctggaaggaggaggatgcagtgagctgagatcatgccactgcactccagcctgagcaacagagccagactttgtctccaaaacaaaacaaacaaaaaacaaagcaaaacaaaacaacaaaaaagagagagataagggagagaaagcacaaggttgtacccaaagcrgatsstcagaaagctcagttcctcccttccctctaatgggagctgtgaagagctgacagcaccacgaggggtggcagggagtccacagctccttaatgtcctgaaggaagagtagtggtaggctccatcctttgagctccagcatgccttgtgaaaggggtgctatgaacatgaattaaatatgaatgcagtgatwaaacattttattctttttaaggctctgaagagctatacttgtcagaatgatttctgcaccagggaatcatttagattggtcttcaaagagtgaaaatttggaactgagttctataatggccaacatggaatgtaaaattgacatatataagctttgaaagagtaattttcaagagatttttttgactgcatgttctaatacccttaaattatgtctgaacataattgaaagcagattcagataaagtgtaggttttaactttagagggtggaaggtggctgtgcttaatccatgtatcttctgtgtcttaccagcttctgtttaaaagtgtgagggctggggtgatcgtgtttcaggcatgggatcagctgtggatgacagagaccatttctccagtggatgatctcccgtaatgtgatcatagggcagctgccttgaattctgattatgtggaaatgggcaaacttttttttaagaataaaaaatagcatttcccaattatgttatcttggatatagtattctaaatttactccccatcctagaaagtatgaattaatcctagattcctcctcatccaactcaaggggtaagtcacaacatctcacaattccagcacctgaatgctcccagggagcccaccctccccacctcacatttctccgatgactgctacagccctaacctagggggctctctcctgtcgcccccgcctccaggtcactccttttattaaatactgtaacaactcccacttgcctcttctccaagagaagagcctgacgcccaccaggatggatgagatgcttccttacctgaaccaagccccagctctcgccgctccagcccagcatcctgaggagctgcctgactcgtacctgcctataaaaggttccctgttatcttaatgctctgggcctttgcctgggcagccaccctgcttgccgtcctcaagatgcagttatcaataccccaggaagccttttytgagccctggccccacactcccacggttagtctttgagtactcctccatagcatctattgagagctctctttgcatctctctcctagtccatggactctacagattcgtccctaccactgtctccaatgaaatacacatggcctagcacgtggtgggtgccaaatgaaggctcctggacaaacaaaggagcctttctctrtaagaayagagcttgaggaaactcgtgatagaattgtgaccaagagaagcagttgatgaaaaagtctccaaataaatgctggcaagattctctttccaaatgtgaaaatacacctgtgaaaaaaatcacatgatgtgatttttcttttaagaattagatcagtgtccatttcatattaggtcttccacacaccctgcatacatactctctggacaatgaagcctaatgtataacatgcattaatactgagagaagtcgtgtgaccaactgtttcataacactgactccctaacttatctctgttttcaaacacagagttcacaggacttgtctctagttgtaggactttgtggctacatccaaggcacatgtggtttttcgtttcataaagcgatagatattctgtggcaaatgctcaggtgacttcttgtctttctcccctttcctttggtggtggtgggtgggcaaaggttacttttatttttgtttaaggtaagtaaaggttttcccttctacttgttgatctgcctctccaggggctgtgacaaagtctttgttaggatttgacacccatgcacccatcaaagaaggtggtgcaacagcactttcaaaaatatctttacattttctgaattttcctttgtgctcatttaacttgttattcctaccctatattatttgtaaatattttaaagcataacaacaacaagaatattataattttcttaatcctatttcccagtggcaaccactttcagccttttcagctatttattctgatatttatgcctgtagttcagaataatctgcatatcctgctcttctgatccaactttagacacaaacaatttgtcttcttataaggattgctggggactgtgggttagtcatgccccttttcacacccctcctggtaactacatctaaactggataaacacaaataaaggctttttcttctgaccacgtaaatatggktcactcttgggctgtactataatatatagcccaagtgtaatataacatcctttctcatcaaactctgkttttccttggactaaaaaatgggcacttttttcccaatgttcttggaatgcatcactaaatcttccttcagcctccaaaagtttgtaaaatatgtctccacagagttctttacacatgagttctgcatgcggattatccttccctcttttaagcctgtcctgcttcctgtgcacttggagtgcccccctggatgccttcatctggacacctttcttcaccctgaagtgttggacgtcctttgtgccaatcccaggctttcgtcatcttttgttatgttccattgtagggtggaaaattattatccctcaggattctgaaggcataattccattgtcttttggttttgcctgttgtgagtcctatatcattctgaataattatccattgtcctgtttttcttctctctggaggctttgggaacttttcttaattcctggtgttccaaaattttattacaatgtggatagaaatgtttttttctcattcattttcttgagcattttaggagcttttttctgtcttgggtactgtataactcagggttctccagagaggaagacccaacaggggatgggtggataggtgatagatagatagatagacagacagacagacagacagagaggtatatgagaactggacagacagacagagagagaggtgtatgagaactgsttcacaggattatggaggctgaaaagtcccatgatgagctgcctgcaagctggaggactggggaggcccggagcatggctcagtccaagcctgaaggccttagacccagggaagctgatgatgttactctcagtccaaggccgcaggcttgagaaactgcggctggtttggggggtgcagagaggggatggtgcaagtcctggagtccacaggccagagaacctggcattctaatgttcagctgtaagaaaaggagcttcaggagagagagagagagaatttgcttttcctctgcctttttgttctatctgggccctcagcagaatggatggtgcctgcccacatcaggtgatggggatcatcctttctccattcactgattcaaatgccaatttctttcagaaacaccctcacaaacacactcagaaggaatgctttcccagctatctgggcatcagtaatccaatcaagttgacacctaaaattaactctcacaggtacttactttttctgaaattttttcccagaaattctatatctgaatttttaaacattatttgtgatactataaaacatatatttggtctgtgaccctgtttcctggcatacaactccccaaatccttagaatctcccaagaaatgtgttttgtatgctaatgagctgactgatggctggcagtccctaggtaggtttaggatggggccagtgaccagaaagatcaaggcaggatcaaggggttgagacttttagccccacccccaaccactggggagcagaaagagactgaagattaagctgatcaccaatggccaatggtttaatcaatcatacccacatagtgaagtttccataaaaacccaaaaggattgggttcagagagcttccggacaggtgaggatgagcagggccccggaggcaggtgccagggagggctyggaagctccacttcctcccacaggccttgccctgtgcatcactttatctggatattttgcaatatcctttataataaaccagtaaaggtaagtttcactgagttctgtgagatgttctagsacattaaccaaacacaaatagggggttgtgggactcctaacttgaagctggctgagggcctggacttgtgactggtggcaagtgcggggcagtcttggagactgagccctcaacccgtgagggctgacgctatctccaggtggacagtgtcataattgaattagaggacacccagctggtgtccattgtgggttgcttgcttgcttgttgatggggagaaatccctacacgtttgggcacagaagtcttctgtgttcattgttgttgtggagttagagaatatcaaaagaaatttgagtttgagtgtttttaatctcagtatttaattgatagtttatcattttattcccattttcccctcctttttagaactgacatgaactgggattggaccatcagctaatattctgtttattagtcctttaggtttttttaaattttattttaccttctggggaatttccccaactttaatttacaaatttctattgaactttaataatatttcttattatatacattctaagacttattttcttgttctctgattgttccttcataatagtatcttattcttgttttatgtatgcattgactttcatctttttgagaatattaattgtagttattttaatattttcttctgcgctgtatgttgtttattcatctattgattttgttgtctgtttcatggttctgattctctgatttttgacatctcatttatatttaagagtgagggactgaaaacggttaaaatgtttgtgtgtgagagagagctttactgtaaggttagctgtcgtccttcatattttctcgcggtagagtccaaaattgtcagcctttgtgtggttgctttttttgttattgttgttctgtggttccctatacagaaaagtgggttcagatgccctgccttagaggtagtgttttgggtggaatagtggtggatagaagcttagcttttgacattagcctttgtgattgtgggagaatagattattattcctgtaaaaagccctagttcactgagaagcagccctcacacaccataagaattagaccgctttgtctagttatttgctttgatctgaaaagacagtaagatatctcttatttccacaaaaaggaccaaattgttacagcccagactagatcctaggttaagctccaaggtgcaaggaagattggagtgtctgtttttctaggtattcatatttcaaggaggaaggaactggaaacattagacatatttctagggctctctggttcctgcgagattttattcacacatcaaaagattggatttaggactcaggtctattgcatcttctaggagactccttcaggagatgcaaaggaaagctgccctcttcctattcataagcaaagaaaaatcaattttccttgtcctgcacctctgaggtgtccagctactcatgtaggacaaatggcttggtgtcactctagggataaggtctatggcaaagagggagggtagtggcagttaacaaacttcttatttaccataaagtatttaataaaaaatatgtctctctgatcctgctcatcctgaacaatatgtgtgcaccattcaggatacagtgaatgaagacccgactgaaaacctagcaataggactacagaggaattagtctgtttttctcttttggggacgtgttttygatgatgcactgcctttcctggacttgttggccgtttctgctgtgtgctcacccatctctcatctgtctttgccattgctttctgtcttcatgtattttaatgggttttaaatatttctagttttatttcagtttataatcctttttcttttctttgatattttttgagaaaagaattgagtggaaaagtttttacacattcaccttgattttaaaagtatttcagatgtcctctttttaatttgaatttacattcagtatttcacaatttataatttcataatggaactctagtttaactcattatataaaatctgtataatttttccatttttcattgataacttattcattcattatattttggtctgataactactctgtttaagagtagaacaatgtattagtccgttttcacgctgctgataaagacatatccaagactggggatttacaaactgaagaggtttaattggacttacagttccacgtggctgggtaagcctcacaatcatggcagaaggcaaggaggatcgagtcccatcttacatggatggcagttggcaaagagagaaatgatgaggaagacgcaaaagtggaaacccctgatcaaaccatgagatctcgtgagacttattcactaccatgaaaacagtatggggaaaaccaccctcatgattcaattatctcctaccaggtccctcccacaacatgtgggaattgtgggaatacaattcaagatgagatttgggtggggacacagagccaaaccatggacacttcaaatgagtttaccgtgcatgacttttccccttggtcaaatttaaatggcagtgttttgggcaagtcagtcttccctacacacaagtgtgctttatcacttcactttatcccttcatgttgacaggggttactgaggatttgtttgtttgtttgcttggtttttttttttgagacagggttttgtctgttgcccagactggagtgcagtggtgtaaccatggctcctcaagtgacgctcctacctcagccttcccagtagctggggggactacaggcgtgagctaccacatctggctaatttttgtagtatttgtagagataaggttttgccatgttgccaaggctggtctcaaactcctgggctcaagtgagctgcctgcctcagcctcccaaaatgctaagattacaagcatgagctgctgcagctgataagattatttggatttatktatgtatttatttatttattttacagtcagtgtctcactctgtctcactgcactgaagtgcagtagcataatcatagctcaccacagccttgatcttctgggctcaagtgatcctcccacttcagcctcccaagtagctgggactacaggcatgtgccaccacgcctggataatttttaaattttttgtagggatgggggtctcgctgtgttgtgtaggctggtctagaactcttggactcaagcaatattcctgccttagcctctctaagcactgggataacaggtgtgagctaccatatctggctgggtttcttataagaagaagcaacaagagagtgtagtgcaaccctgccttaaatagtagatttgtctcagcagtgtttgtcagttattctcacaggttgacatttatttgatttatcaaatgaaaattttaccaaagaatctttcatgctagcagagaaaagcaaatcaagtcatacattctcaataaatggaaaagcccaggtgacaggatgatatttcacaacaacatttgagatgatgccgtggaaagctgcgagtgtatcctttctatagacttgaaaagtgactaacattctgctaaagctggaaggatgttttggggtgagcgaccataacaataatgtaaaatgttatatgattcactttgaaatgaccctttctaaagtaacaacttggattgctaaccagcattgggttcttttaaaaaactgatttggatgtttatgtgtccctctctcaatcaattcataaatttgttgaccgtgaggtttggtgtgatgaagataaatacaccttcgtagtgtagagaaataactagaaaacgggaaatttatttctcaaataaaagataaggcaatattttgttactttttggaagacattttaacacaacccagattgccattaacaagccttatgaaatattaagaaccctaacagttggtaagaagaatagtagagtcaggacccccataattaagatactcctccaaaaaagcaataacaatgctgacaattggcaaatcatcctttcaaaaatatgcaattaactaaaggcttgcaataatctaagtagcatttattcaagtaaaatatctcagtcttgggaagaacactgactgtgtggcatcttaacttgcttcactttcatgaccccctccccagctctgagatatccttgaaaaccagcagcccacagatcatgctgaaaatcagcagcctggtagcccctggaagaggcagcatgggtttgtagttcccctaaagcaacattcttagagtattgtcattattcaaactgtctggtagttctcaggaaaccaccattcaaagggcatgtctttatttgacctaaatcagagctctcccagtagaaatagtcttttcttcggagtacttgttgaaaactatttgtcacaacacctgcctgagatggcaatacaagttgggggagagaaagctcaccaaaaaattcraaggaaaagctaaggagtgagatgtgcataagaggcctttgaaaagatggaacatattcctggaaatccagaagttcacatatatggcatatgtgcagggctttgggcatgcccagtgtcatatgcatacccagaaaatacctaagaaggccctgtgctctcacttatgactgaccttggaatgctaagtgaatgttaataaagaattgtaacatatctacgtgagaattgaaggtgtattcccaaaaaggacacacagagcaacttggcaaaggctgggagatttattacttctaggcatttaagaaaatttctgcccaaccactaacttagctaagatgtcaatagccacagataacaaagaatacagcctttacagaattagttcagaaaagctattaacaaacaaacaaacaaatacagcaacaagaaacaggaacaacaawctctgggagaaaaaggaatttgatatcacaagatttgccacattatgttacttgaaatgttctgtttccaaccaacattgtgagacaaaccaaggaaaaataaggaatgaaccatatacagggaaaaataaggaatgaaccatatacagggaaaaaaccgtcaatagaaactgtccatgaggaagttcagtcattggacttcttagacaaggactttaaatcagctaccttaagaacattctacaaactaagaaaaccatgtataaagaactaaaaagaagtaagaaagacatctcaccaaatggagattgtaaaaaaaaaataragcatataaaaatgaatcaaaataaaattctagagttgaaacataccatatttgaagtgaaaaattcactaaaggtactcaacagcagatgtgaagtgtgtgaagtgacagaagagagcatcagttaacataaagttaggttgattgagattatccagtctcagcaacataaattttaaaaatgaagaaaagtcaacagtctcagagacctattactctctatttactctactaggcatatatacatatatctatctctatctatctatctatctatctatctatctatctatctatctatctatctatctatctatctatcgtgccagaaggagaggtgagaaagagaattaatatttgaaaaaataatgaccaaaatcttcaaacttgatgaaaaccatttattttcatatcaagtaatctcaatggactctcaataggaaaaactcagagattcatgctggatacagtttaatcaatctgacaaaagccaargagaaaaaatcttgaaagcaacaaagagaagcagctcatcatgtacaagggatcctcagtaagcttaacagttaatttctcctgaaaacacatagatgttagaaagtgtggaaaaatagactcaaagtgttagaaaaaaaagactgtcacataagaattctatatccaacaaagtgatccttcaaaaatgaagaagttagacatcccaaataaaaaagaaaaaacagaaaacgtatcactagcagacttgcctgcaagaaatactaaagagggactataggacttaaatgaaaaaacaccaaacagtaactcaaatctacgttaagaaataacctgccaggcacggtggctcaaacctgtaatcccagcactttgggaggccaaggtggatggatcatcaggttaggagattgagaccagcctggctaacacgttgaaaccctgtctctactaaaataaatacaaaaagttagccaggtttgatggccggtgcctgtagtcccaactactcaggaggctgaggcaggagaatggcttgaacctgggatgcggagcttgcagtgagctgagattgtgccactgcactccagcctgcgtgacacggtgagactctgtctcaaaaacaacaacaacaacaacaaaaactagtaaagatagctaaaaaggtaaatacaattcctccctcaatatttttatttgttttattttttctcctatcaaaattaaaaagcagctgcayaaagcaacaattatattctctgttgatggacatcrtaatataaaatggttgagttggtatgataatagcacaaaagtgaagagggatggaactatataagtgcaaaatttttgaatattgttaaaattaagttggttatgcgagctagcttattgtaaattaagatgttatttgtaattcctagggtagcaactaagaaaataactaaaaaataatgtagtaaaagaaaggacaaggggattaaagtgatgcactataaaatattcatttaacacaaaagaaggcaaaagtaaaggaatagaacaaaaaagacataatatataataaatagcaaaatgcagatataaattctaccttattcataattacattaaatgtaaatagtttaaatattgcagtcaaaaggcagagattggcagaacggcttttaaaaaatatgacccatatatatgttgcttatgagagacagtttcagttcaaagacacaagtaagttgtaaatgaaaggacagaagtaagatataccatgacaagagtactaaaagagagctggggttgctatattaatcttggacaaagtagactttaacactataggaggcaaaaaagatacacatttatcttatatgtgtatataatattaatgtatataatgataaatgagtcaattcatcaagaacacataataaatataaacatataagcacctaaacaagagagccttaaaatatatgaagcaaaaattgacagaattggaggtagaaatacataatgctaaaatagtggttggcttgttcaataccccactttcagtaatagtaagaacaagtagacagaagattaacaaggacatagaatatttgaacaacactctaagacaactagacctaacagacatctgtacaacccaatgacagtggaatacatattcttttcaagtgtattgtaattctcctttattctctgggtgagtgggggacacaattgtgtattatgccattaaataagttttaagaaatttgaaataattgaaatcataccaastgtatttcccattcaaaatggaatgaaatgggaaatcaacaacagaaagaaatttggagaattcacaaatatatgaaaattaaccaatatacaccaaaataaaaagtgggtcaaataagaaaccataaggaaattagaaaacactttgaaatttaaaaatgcagaaacacagtattctagaacttatgagatgctgcaacagcagtgcttcataaatagatagctgcagttgactatttttaaaaagtgagatttcaaataaataactttacctttcccctaagcaactagaaaaagaagaggacaataatccaaagcaagcagaaaaaagaaataataaaaattacatgagaaacaaatgaaaaaagaatagaaagcaataaaaatttaacaaaaccaaaagttgtttttttgaaaagatcaacaaaattgacaaactcttagctacactgatcwagagaaaaagagtagacgcacattacttaattagggaatgaaagaggagacactactactgacttcatggggtgggggaagaattacaaaagaatactttgattattagattryaatctataatatttagattattacctaaattagttgcagtgaatttattaaacttaattagatgcaataaattcctagaaagacacaaactaccaaaactgaatcaagaaaaagtaaaatctaaaaagcctcataacataaaaaaagaggtttattttagtaaccagaagccttaccatcgagtaaagtgtagacctaaatggctttgctggagaattttaccaaaccttttaacaaggcttaacactattctttgacaagcttttcytaaaaattgaagagaaaggaatgcttccaagctcattctatgaggccaatattatcctgatctccaagccaaagacatcacaggaaatgaaaactacaaatcaacacctcatacaaatatacaaakactgttgcaaagattctcaacaaaatactagcaatctgawtccagcaacwtataatatgattatacaccagtgaccaagtagtwyctaaaaamtgcaaggatggttcaacataaaaaaatcattctatgtaatactctrtattcatagaataggcacaaaaataacagaatcatctctatgggcagaaaaaatcatttgacaaaattacgcattcttccatgatgtaaacatccaacatactaagaacagaaggtagctttcttaacccaataaatgtaacctatgaaaaatccgcaactaatatcatacttaataataaaagtctaaaagtgtccatcttaagatcaggaacaaggtaagaatgttgctctcaccatttctactcacaattttattggaggttctacctagtgcaggcatctattaataattaaaatgataaaagtcgtatttttggaaagaaggaagtaaaactgtatttgcagatgacatgctcttgcatataaaaaattaagagcgtctgccccctccaaaagacattaaaataatgaatgagttcaacaagttgtaggatacaaaatcaatataaacagaacatattgaattttatacattcgcagtgaacactgaaaattaagagaataatttcatttatagtaatatcaaaaatgttaaaatattcaggaataaatttaacaaaataagtataagacttgtatactaggaactaaaatattcttaaaagaaattaacaatctaaataaatggaaagacagctcatgttcatggattggaagacttaacattgtgaagatggtaatagctccaaattgatctagattcagtagaatccctgtcaaaatcttcagcctccttttttttgcagaaattgacaagctattccaaaaatgtgtatggaaattgcaagcaatccagaatagcaaaaaacaatcttgcagaagaacaaagttggaggattgacaatttgcattttctgaatctactgcaaaactactgcagtcaagacaatgtgatactagtataacgataggcatatgcataaatggaatagaattgaacatccagaaataaactcttacatttatggttgtatcacatctcagattctctcgtagaacctccggaaggagcacaatcctgccaaaaccttgatttttgacaagggctaaagataatttactggggaaaaatagtctggcttccctctaggcttcagtttcatttgaaacaaggataagcaccatccggacagcacctacctgagaagctagccataaatactcaaaaggataaagttttaagcacttggtttagaatttaacatataatactaagcagacatttattactactgtgtgatcttgggcaagtaggttaatctctgattttcagatttactgtgtgtaaaataagtgtaatatctttcttacaagagtaacctgagataacgttagaaactcaattaactaccccttactcctccttcctgaaggtgtccagaggtgatacaaccatcatttagatgtttcttttgggaataggaagggttgaccttctttctttcctttttatcacatttattttttattctgattataaaagtgatatatttttaaatacagaggaaaaaatgtgaacctgtttacaccaaaccattaaagtcagtttcctctggggagtgggagtggcaaatgggtgttttcattttgaaccttattgtgcttgtgtaatgtttgaatattttacaaccaagtattactttagaattaaaaaatgcatgtatactataaaacagtattaacatatctttattttatttagttcagcgtttctcaaaatgtattccgtaggcaatagttaacaagatgtttccatgaaaaaaatgtgaaggtgggctggccgggttccattgtcaaataattttggaaatgctattaaaacacgtttgttcttctctagagcactcacaacaacttctatcaactrcgttgatcccaatgaaaatacaaaatgatttcactactaacccttgccattttccatgtaactcctactcactcatcagaaggcactttgtgaattacctgtgcactttgccattagtgagtacctcacacaactcgttactggcagagtgcagatgagggacctgagttttccagcctgactacttacagcccactcttctgactctgtaagtgcaacctttagtagcagggggttgggaaaggaacaggcacttcagagaagagagaatttggtcaagctgctgaattgactgtgagttttcagagggaggagttcagcagggatttttactggctgctcaggtaatgatgaagaaatcctgcacaacatctcatttccaaatttactgatttttcccaagatagctgagatgggttttttaaaattaaacattttattttgggatagctgtagctttatatacagaagcaaaaaataatacagggattcctctgtagcctttacccactgtctctcaataatgacatcttgcaaaactatactacagtatcacaactaggatgttgacattggtaaagatagatagatcctgttcactgcaggatctgtcatgttgcccttttatgaccacacacatttccctcatgctctcactccctacttaactcctggcaacgactaatctgtcctccatttttataattttgttaattaaagaatatgacacaaagggaatcacacagactgctaccttttgggactgttttttttttttaatcaacatctttctctggagattgatccaggttattgtgaatatcaatagatggttactttttattgcgagtagtattccgtagtatgctgggcagaataagagcctacctaaagatgttcattatctgatcatcagaacctgtgaatgtcttgtgttatgtggaaaaaaagactttgaaggtgtgatttggttaagaatcttgagatggaaacattaccctgaatttcttggttgacccaacgtatcacaaggatctttatcagggaaagagagtaaagggagagtcagaaaaataratgtgaaaaggaaagcagaggccagagtgattctgtgttagattaactcaacccaaatggaagaaggagaccctgactcaaggactgcaggaggcctctgaaaccagaaaaggcaaggaaactgattttcccctagcgcctccagaaggagcactgtctggacaacaccttggttgaagccccttttggccttctgttgagttctgagaacactttatctattctaggtacctagtcctttgttggatatgtggtttgcaaatattttactccagtctgtagcttgtgttgacatcctcttagcaaagtttttcatacagcaaattttttaattttgatgaagtctaacctgacaactgatctttttatgggtcatgcttttagagaagtagacctttttttataggtctaaattgcaaatattttcttccttagttttcctaaaggttttatagtttcattaattctgtgatacattttgaattactttttgatataggtcaaggttagttaatctttttaaaaataaatgtccaatttttccagcacaatttgctgaaaagactatgtttcctccatgaaatcccttttacactttggtcaaaaatgagttggccatatatttggggatggaggtctttctgggttctctattctgttttatttatctattgttttcctccaccagtaccaaaaggttttgtttaccatagttattaaaaattcttgaattaggtaaattcattcttccaactttactttttaaaaattttaaaaaattggttttgctattcctgttcttttgcatctccatatgcactttagcataatcttctctgtttctacagaaatcttgctggaattttgatagaatttttattaaacctgtctgtcaatttgtagagaattcatatctgtattatgctgagttgttgaagtcataaaaaccatctgtctttcagtgattttagatcttctttgatttctcatcagtattaaatgtcttttcatatcttttgtcccttttctaattggattttttacaacatgaaaaataattttgttctttgcatatttcagatatgatttccttaagtgcttttcagcaattatttgacaccagtggagcatcctacaattcaatttttcttgtatagttttacatttaaatctatgatccttttcgagttaatttttttttttttttttgagatggagtctcgctctgtcgcccaggctggagtgcagtggcgcgatctcggctcactgcaagctccgcctcccgggttcacgccgttctcctgcctcagcctcctgagtagctgggaccacaggcacccgccaccactcccggctaattttttgtatttttagtagagacggggtttcacmgagttagaccaggatggtctckatctcctgaccttgtgatccgcccgcctcggcctcccaaagtgctgggattacaggcgtgagccacggcgcctggcctgagttagtttttgtataagatctcaggtgtaagtcaaggttcacatttttgcttatgaatatctcattatttcagatggttattgagattatctttttttcattgagttgtctttgcatctttataaaaaaccacttagctctttttgtgtaggcagtttctaggttctctattctgttccattgatctatgtgtgtatccctctgacaatatcacacaatgttggttactgtagctatacrataggctgtaatatctggtagagtgattcttcctgcactcttctttttcagcattgttttaggtactttgcttttacctataagttttagaataattgtagctctatatatgaaatatttttaaataatttttatacaattcgtgttaaacttacacattagtttggaaagacatctttacgatgtttaatcttctaatccatgaacatggaatatctttttatttagatcttctttgatttctttcatgagcattttgtaattttcaacatatatcttctcaacgtatatattttttctgtttcctggcttctttcagtattttctcttattctttggtgttctgaagtttacttatgttacccatctgttctagtgtgttgtgtacttatttagagtcccttatattaattgtagctattttaaattctctgataattccaaaatctgtgtcatatctgaatcattctactccgatgtttgctttctctcttcagattgtgttttttcttgccttttgacatcacttgtaaattttagatgaaaggaagacatgatacatcagtaacaggaagtgaggtaaataggccatttgtgtgaggctttatgttaaccttactaggagttgggctgtgcttagtatttgttgcagtatatgtaacaggaactccaaattctttatttttgcctccccttcctgtcttttggcttccttaagaatccctccttgtatagaatctgcaccttgaggtctttcagctgtaaactaatgttatttattatagtggagccctgttgatatgtggcatggtgtagcaagaggggaaatttatattatcttatgatcaaatctgtcttttagtagccctgtatcttcaggctgactaaattttggtcaagcagagaatctttttcagtgccttttatttctttcttttrccttcttacactggctagatcttctagtactgtgatgaatgagagttgagagtgggcatccctgaattgctactgagctcaaggggggaaatattcagtaactcaccattacctgcaatgtttactctatgttgtagatgtttatcaagttgaggaagttctcctctgttcagtttgctgagaggttttactaagaatgggtgttgcattttgtttgatacttgctctgcattgtgacttatccaatcatgttatttttcttcttgagcctgttaatgtggaagattatattgattgatttttgaatattgcatcagccaggaatccttggaataaaccccgtgtggtcattgtatataattatttttatatgttcctgaattctgtttgttaatatgtatctttaaggtttatgcacatatattcatgaggaatattggtttatacttttttttgtccttgtctctattattttgatatcaggatgatggggcttcataaaattaattaaatttagcaacgttccttccttatctattttctggaagagattgtatataatttgtattatatttttaatatttggtagaattctcctgtaattgacatgctttctgtcaatttttgagtactttttcatccttactgtctttccattcttcctggacttccatgacacaaatactagatcttttgtctgactggtctctgaggctctgtttattttttcagtctgttttcttgctggtttttcagattgtgcagtttctattgttttatattaagttccactgattctttcctctttcctcaattctgctgctgaatgcaccagtgaaggcttttaaaaattatttttgtcatcaaattttttagtgctaagattttcactggggtcttctttatgtcttctactgagagtttgtttctttgctgagcctttttattttttcatttgtctcaagcatattagtaattgcttgttgaaacatttttgtgatggctgcttttatcttttattattttttaaaatctttgccacataattttaacatctttgccttcttggtatagatgtcaactgattatcttttttccttcagtttgagawctttctggttcttggtagaatgggctgagtgtttttcagttgaaaactgaacatttcagatattattttatgcaacagtytatcttatttaagctgtctgttttggcgttctgcaacagcactctggtggaaagggagttggagttcatcacttccaggttgctacagaagtccagtttccgtccttgggtttatttattgggtttatttacccttggaggctgtctcctaatcattgctggatagggagggagttctagcttccctctaggtccctgcagatagtgtgctggctggacgggtacaagtacctgcttccacgtggtctccaactatatcattaggagaggaagctcattactgtttagaggaaatcaaacgcctgtctccctcgtcagcactctctgaaaccaccttagttgagggatggatgccttattgtagcccagtaagggtagaattcagggctccttactcagcctttgtgagcgargccaagtccaccattttatctattctgtttggctagaaaagagtggttattgtttaaaagtattctgtcgtggccaggcacagtggctcatgcctgtgatcccagcacttcgggaggctgaggcaggcggatcatgaggtcaagagatcgagaccatcctggctaacacggtgaaaccctgtctctactaaaaatacaaaaaattagctgggtgtggtggtgggcgccagtagtcccagttacttgggaggctgaggcaggagaatggcatgaacccgggaggtggagcttgcagtgagccsagttcaagccactgcactccagcctgagtgacagagcgacactctgtctcaaaaaaaaaaaaaaaaaaaagaaagaaatagaagtattctgtcttgttaggatgcccctttacttgtcctttaactagagagagctggcttctgttgagaatttttaaaattcccatgcattggtgtgtctgagtttttagcttcttcagttccaaatctggaatgaaacgaaaagcaaagaaagcccaagatactcgctaccatgtcatcccttgggtcctgatgccctaactggtttgccttttgtctaattctcagtcttattatgattsttttacatgtaatawccagggattttagttgcatttagcaagaaaagtagagacaagtatgtctcttccatcttaccaaaatgaaatggatttatattttaaaaaattttcctcagctcactgttttcttgacaagagaaatttttgattttggttgaagatgaatttgttttccagcttttactctgaaggtgatcagcagtcagakttttgttcagcaatagggccatgaacatttggaacttacagatagaattcgatggtgtggagtgttttcctgtcttttacaggcttatttgccaccactgatttctaagcagttcatgctttgaagaaatccacacctgacaagtcatttcttcccatcattttcctgcctgcctgtgacttatgtgtagaatgacattattttctaaaagcagagttgcaggagatgaagactccctcccccagccccaagtccaacagagaaagaatcmtatttctgaagtggaagagaagaatatgttattggaaaaattatttgcacttgcaggtagagagtattgcactataaaaaatgaaacacagatgactcgaattcaattgctgcatgtctggaatggaagattgggaacttatatttgggaaaagaaaaagactgaattctttttaaaaattatagtttgcaaactcataagatttatctagcgttaaacaaatccttagggcactggagttttattcccatgtgatagttttccccataatagttggtaatatatgaaatgtaagtttttcaggattcaaatacaggaatcataagctgaagaaaagccagtaatcrtttgtcatttgacagcagtggattaaaaataatagacttgaatttctttaggcycttcccgtatttcatatgccccctgttgtctatacccctgcctttcacatattttgttatcaacctgaactttacaaagcatgtgagatacttacccttgtgctcaagtcaatcctgagcttggagagtaggcagacaggttccaactctagtttggccattactacctatgtgacactgggtaagttatcagtctaacctccttacctatacactgagggtaataatataacctgccttagcgatagttcttacrcagacatattgcaatatcaacgcataagtgctcatcatcttaatcattactgtagtgagacatcacaacagacaaggcacaatataagactgtgtgcacagtgtcagaagttctgatgtttgatagcagctccccaaatgtcctgttcatggaggtcccttgctgaatataaatgataacctgcttgttccatgtgcagtcattcatactccatggaatcctgcctcactttcctgaatgaagtgggtggcgttcttacattcttagtcagctcacaagtacttcctgggcatccacttctagtacgcaggctctggcttctggctgttaaacagtgaaccagacyatgagctggctctccgggttttttcctttgctttcttgggtcaggtgaagttttcaggtgggaggaacttcagggatgcaggtggaaggggaaatacagctgcgaggaataagacctgagttgaaagctatttaatacatggaaaatggtctggttgatttagggtaaattacaccaggacagagaaataggaggaagataaaatatacctggatctgtaaattagacactgaaggacattgtgcaacagtggacggacagcatccatggtgggggtggatgtgtcaagtctgtcatttggtgccgagcccctcaattaaaacccatactgatcctgtacctaagagtccatgaagaagtgactgttaaagatgattttcccttattccatgtttatttcaaagtgatttttcatttactctcaaattatacttataaatactgtttacatttgctttatgttaaagattttgtgcaattatagcagtaattaaaaggaattacaataatcatacctgttttcataagatttctatctgagagagacaaattattttatcttcaccatggacctgggatgagtttctttttaaataatgtgccaagggttagaataaactgctatgtagctaagttaaaaatttaataacaaataaatggcattattgtcaaatattaaaaaaggaaaaataaaaccttcactatttccatgataaaccatgtcatgtggggaatacctccttattaggtgaacacatcttacagctgaaatttttcgtatggcaaattaccacctgaatatttatttagagaatggtctctcatttcactctagtttgaaagatgttgtctttaaagccatcatattcctcacccacacacactgcccacctgtttccaccaaagtgctgtacttcatcagccacaggccattgtagtcaggaagtcatgtacagtgttctctccaaaccgctcactttgcttatggcacctacaaaggactttattttttattttctcctccctcttcctccacgccctcctcctccatgttctgctataaaacttatatttatctaagcaatttaatttttatggttaaaagaataakataatactaaaagactcaaaaagaaaaatacaggccgggcatggtggttcacgcctrtaatcccagcactttggaagtacgaggcaggtgaatcacttgagctcaggagttcaagaccaatctgaccaacatggcaaaaccccatctctactaaaattacaaaatttggccaagtgtgctggtgcgcacctgtaatcccagctactggggagactgaggcatgagaatcgcttgaacctgggaggtggagattgcagtgatccgagattgcgccactgcacttcagcctgggcaatagagtgagactccatcttaaaaaaaaaaaagtgcagctccctccatcctgcctgaacctgggttcattttccattctttaagggatttcttctcttattttccatcatgttcctagtaatatccttatatgaacatttgattattcsttctcagctacattgatgcctcctggaaacgctagactttccctgtcttacactctacscattttccccttttgttcccccgctcaccttccaaaacaatcatgaaccaagatttggtcagatacacattccctgcttacaatgttacagtcatgtaattactgaactttgcagaatgtcctrgtgtgacctgcttaccttatggggaggaggtcrcatagattatgtttgtccagaaggcgattaagtccctttaaaagaaaataatgtctgacatccaagcactgtagtgttttgttggcagctgtgatggaagcacacagccctctccatgggttggaaggctttagccaacctccatggccacagactcagattaccctccctcccattcccacagggctgcctgccacagtggcccacctgaacccctcactgtcatactgcaagaccctcctgctctttcctgggtggactccctggttccccaccagatcttcccagtcttggtcattctgcttccttactttggtggagaatattctccaggaatcttctgaggaatgttgcatggaaggtaactttgtgaatgggtagaaaataatttcmcctgagagttgtgcaaacatagatccactgcttgtgggtgagttctgggccatctttccttaggtcagtctgattgtgagctgcttcttgccccaaccccctttatcctcagccacaaccagaaaggtcttcccccttttattctggaatttcaaatggtagtatttctgattttcttttcatatgccatggactaggcaagtcttaactatatgtaaagtcatttgattattgagattgtttggtattatttctttgataattcttttattacttttctcttttataagacttctctgtttggttttatgctagtttttgggaaatcccttcaaatttaccttccaactactgatttttttttaatttctgaaggatctttctaatacttaggatgtttcttttttacagcatcctcctgttatttcaatgaaccagtaactttttttttttcttttggaggatcttaaccatagtttctggaagttttcttctggtctcacattgcttctgtttgtyttggagtacatcattcatgatagagcatttccctactggcctctcatgaataagtagatatgaagcactcctggctggttggaagttctctatgggcctcatattaggatgaaaactgggaatttcagagaagtactgcttgttagtatttccaggtctttttactttggcttgttaatttcctcagatggaagatttttttttttctattgttgcctgggaagttgcaaacctacagacaaaatgctgggagcctgtcaaggaaaggggctggtgcacccacctgttgtctctgtatgtcactgaatccagggtttctctgagtcagcctccaatcaacagctctgtggctcgggaatcttgagttctctttcttctgttttggacccatcgtatgttactacttagagatacgtggaacctccaactcctgtggtccttcagagtttcccctgtcaaaacctatgatggtctgagatgttaccttacttgaaagctagtaagttggcctgccatagtgtcayggtttctggaagaagacaagagatgcctgggtcagagacaaaggacattgttacactgtaggcattgatgtcacagcaggcattgtgagcttcatgtttgcctctgttctccttgccycccaagttccatgggggcagtgtgaaacagccaaccagtttgtgccacagcagaggaaccctgaacttaggaaacctccatcttttacaatgtctgcatacstttttaatgatgctttttgatgragaaaagctcttaaagaagttaaatttgcttgccaatgttttttcttttatgtttagtgtttttgatgtcctatttacaagttatttgcttatttaaaagtcatatacatttgtatttgcttttttcttaaaatttgaatactttagcattttgaatatattagcattcacattttggtctgtaattcacctcaaattaatttttacttgtggtatgaggtaggagttcaaggttcatgtttttctcttcatactgatatctagttgctacaggaacacgtattagaaaaattagtttaaagcatgtgcagaatcttaaagaccaggaaggtgatactgtagttaatacatcacagcttctataaactaaaggatgtgaaacctaatgcagctgccattattgtgtgctaccaaatgacaggctcttcaaaggaaacaaagataaaagatatcctccctgtctttaaggaacttaaaaatatatgcatagaaataaacttacacatacactataattttatttataaaagtgaagggaaaatttatgcaataaaactgataatgattctctaagactgtttacagcttactagtactgaagttgtcccatctgacccaaaatatctggggatgcttaggaaaaaattaaggatataggaagaattgtatattatgacatattgaggaatttcctgggagagagcccaacccaaggacggtgaacttgattcattagcaaagctttggtccacagagttagggatcacgctgagtgtagcatttggtactctgttcactccttgggtacctgagaaggaggtggtaaggggaaagctaaaactgtttcactgaaatcatggtaaggtattgacatggtaaagcagccatacttttggccttcttagatatgggtctgtacaaaaggataaagtgaatatctcctccctgtgccactggccactgtgcagctttggtcctcttgggctagatggaatggtagtggcacytktttgacttggtaggtaggggccagatcgggtgcagtacctgscagtaatggatatcaatggtatccaatggagaaacacgccaaatggaaaagggagtacctagggtttkctagaattggaatagggaaagaaaatgggcatcacaggatgactggccagagactggactgggcctgctccttagcatgtgtgaagcatcttctgatgcccctagatatagctgatgagctgaagaaacattggcaggaggtatgagggttctgcattcacagttgggataagggaccagcagaaaattagcttgcacacataagggtaaggcaacatcattgttttcagaattcaaaacattgaaatcctcttacttatttgatcttagtagcaacccaagggactgcagctgtttttctaaaatgaagagctccacgtgatcacgtggaggttacgagattcacctacaatcttagtaggtgacccagctctggagcctgggctggtggccatcactttcactctacctcttcttgccctcgccagtctcagtgtcccatgtggctgctccctacattacctctcagctcccccgacccacctgcctaccaagcctggtcccagatgaactctgctgaaatacacctctcaccatgtctcatctctactcagtatcctcagagactcctactgccctctaaattaaatctaggctgggcaccgtggctcatgcctgtrgttccaacactttggaaaaccaaggagggaggatttcttgagggcaggacttgtgttcagcctgggcaacttagcctcagcctcccaagtagctaggactgcaggcacatgtcactatgcccagctaattttcctatttttttgtatagatagggtcttgctgtgttgccctggctccagagtggggtcacctactaagattgtaggcaaatctcataacctccatgtgatcacatgagcatttcattttagaaaaacagctgcaatctcttgggctgttactaggatcaaataggtaataggccgagaccagaagattggttgaacccaggaatttgaggttacagtgagcctacgattgtgccactgcactccagtgagaccctgtctcataaatacataagtcagtgcttctcagcatggtggccatatccacactycattttttatctctcactctcttttattctccagcctgagtgatttcaattttccaaacctcttgagtgtccccaaaacttttgtgaacttatctctcctaatgtaagcatcactgtctaccatgtgcgagtgggcttgcttgtcttaaccattccatgaagtaaacagttctgtgtggcagggaacgtgcaggtcttcttggcatctctcccctgcaggggctgtgagagcctgtgaggggtgccagtgtcgctcagctgcaccttaggagcggaccaattcagttacggggggatggaagaaggaaatgtcagagggacccatgtccatgttcgcaagcaaattttattgtaattacacatagaataaattagaatgtttcacacataaacattccaaaattgttttcccacttttacttggaaaatgctcaaatgtaaagaaaagctgaagaatagtataatagacacctatttactcttcacctagattaattgttatcctttaccacatttactgtctctccaaacacacacacacacacaaacacagcttctcttttgccaatcctttgaaaataagttgcagacattacatgtcagtcctgaatatttcacatgtaccacctaagaatgaaaacattcccccgcatactcacaatacggtaaatcaaagttgtcatttagtatcaaatctacagtccaaaaatactactacccctaatgttactgtaattggtattagcacattagtgttagtattagcacacaagacaaatagtactactgggttctcagttgcagctgaaagatctttcatagctttgatccaggtttgatccaggaatcaaagcttcacccttgacatttttacttgttgtgtctctccaggctcttttgatctagattggcaccctcctattcaatttgatgtatttgtcatgrcatttactttcctgaagattccagkgcagttatctgttagacgggtaaaatgtcctgcattctgcaatatctgatagctctatgatgatgagatttacgtcgaaccttttgtggctgtaatatcacattggtgaaatcattttagacattaagtatcaagtattgcactgactactgttttgaaaggggatcttctcatcataatctgtacacattcattagttctttacaaaataaggaagtgatattaatacaggtgggctcctctcagtggaaagtgatgtctctcgtatcaagcgatgttgcttcatgaagtgtttaraaagccagttccaaaagcagatcagtaatcaatcttggataagaacttttttcaaaccattcatataaatgttgtccaagacatttaggatggcaaaagtgcttctgaatatttttactagtgaaatttgaaaaaaatatagaatttagaatttgacataccaaaaactgatggttcttgagatcaaccattcagggctatttagtttcctctcccagataattttctttcctttttgcctgatatgaggcagatggagtagggcttcatgccagagtaccttgttactggtggtatgtttaccgacarttagacttccagcattgggcagtgctggcgaggtcacctaacccagcattccacctccgcccaggcgctgatccccaccaagcacacaatgacctccatgacaaagcctctgtgtcagggcatctttgacaattgaaatgctggaaaattctgtgtgaaaatgtcctcattctttcactggtcaatccaggttctagttcttgtcatgctttatccaccttaaaacccttcaaatatttgaagattgctcttacattctccraagatgttcttctccagtgttagcatcctgagctccttctgcctttcctcttcaatctcccaagtgcatcatttctgcttgctttctctttaacatgtgtgctctagcattctgtctcccctctcttcctacagttctttcctcacacaataatttaagtctgccatgcacatgtcatgcctgtgaaaaccaatataaactgctggtccttagggagctcaccagtcagtgagaggaggatcaggccagcagaggatgctattgacagtgagatggtacctgtctggggcacctgtcatacctgtcgcaaaggaggaggtggttgctagccctagaggaagaaaaggcaacctcagtattggaggagtggctgttttctaggtaggggtgggcatggcataagtccaagaagtgagagatgtaagaagacatgcaaagctacaaagcaggggagagcaagacaccagacagtgggatggggtgggatgcagcgaaccagcacagtgagccttctgagcctttctcagtggctctgattacgtctttaggcaatgsgaagcttgcagaatgagattcacattagagtgtagtaacagggacagacacaccttttattttagaaggaagttggatggaaaatgcatccatatccatctccatatgagatagtgaactttctcaactaatattcagataatattcagaaataacagaggggaaaagtacaaaaagaagtgtattcttcttttctttgaacaaattttcttatggtatctcagctgattgcaaatagagtatcaccattaattccattttagtattgatttgctcytttaaaaaatcaatttaagaaatgccctaatgtggacaacatcttcttctttgggttttagagtggtttgttattttgtaggaagagtgaaaggtgtttctgtcttcttcttccaagcttgagactcttcaggggagcctctagggtaataaaggtcttgcagggaggccactgcctgcgcccctggcttggcccatgcatgaaggccgtgtgtggaatgatgcctttcagctcccatgactcrcagcccaccccctacaccagcaggcaccagccacacctatgatgttccagcttcccgcaaggaactgggattggggtggcaaagcaaacagctcctgctgtttcctaggaaatgaagacactccacttattattacaaatagattatgcaaataaaatcacaattttacccagtgcagcaaagaaatccattatactgcagggtgcatgtctcaatgcaaagacaaagcactgagttccttagcacgtattttaaagatgataggatgtctcttctggcctgaaacccactcccttgtcacctccgaggacttcatgttgcaacaagactctttattgaaaaccgaagagaaacagagctttattctccctgggtttaactctcctgctcagtgtgacctgcactaattttgctcagctcttctgagtaaatacttctttagctatcagcccctctctccaggccctctcacatagagcaggggctgtcttctcatgcctgtgtccccrgctactgcacaccgaaagcttagtctctgtgctttgtgcctgttgcctgggtgaatggttgaagggatgactgcagatagcccatgcccgaggtcccctgkgcctcctctgtcatgggccccctgattcttttcctctctttccwcatctgctaaagtaagaagtacatttgtcttttgtcctttagagcacttggccatttgaaaattgctttctctccctggacttatctgctgtagctcccgtgagaaaggcagggtggacattgtcatcccatgtagagaaagagcacccaaggtgcaaaaaccaaaattaaaaccaaratgtcctggctgggctcagcttagctgtgctcactgtctgcttcagcactgcctgcatgtggtgggtggctcagagtgaggctattgttcttagttaacagaggctaaaactaatcagattttaaaaataacataaatccctccacatactactagttggagctcaaaaatgagacccctctcaagggcgcccacctggagtgtcccagaggaaagacagcagaggaaacagctgctcctcctctgacgtcctcactccagctaggcctcccagctctgcaggcctcccctctgtcctcaagcctggtgaggtgcacaccgggagaaaagcttccaactgggaagaaagtgactctctctgattgcgctgcatcggctgccagggtccgtagggaaggagtggctgcaccccatggcagtgggggtggaggtgcgatcaaggcgatcactggtactgttaccctgcacagtgtgcaggaacagaggccctggcacctgggactgcagaagaggctccctcgcagtcagatgcccgctaggcgagcagaagtgatggagggacccggcccaaatctcactctaacaccagctgtgtagccataggaaggtgactcaggggaccccccttttctttatgggaaaarcagcacttggtcataaagctgttgtgagtgatctctgagacctttctaaagaagctcagttaaaaaaaaaaaaagggaaaacagacatctcccaatacatggcttgacgtccaaaaccacttgatgtcatgggggagcagctggagttgagaatgtgctcatgcagtgtgagcatttgaaggttgaagctctcattcaatcagattgaagctctcatttttatcatgttgaaactctcattcaatacctaagttccctccaccactccccagcaggcagtcgccccacacatgtctgaacacacaccgtgattaagcaagttcccctgtgaagggcacaacgttcagttgtttaggtaagaagtttctccttctgttttttcttaggactcttgtatcatctgaatgtttgtgacacccccccacccaaaaacagttcacaccataaagcctgtcaacataatgaactatcaatccagagtcagcccatcaacacagtatcgcctaaggtgatgtggtaggaggtgagacctttgggaggtgttaggtcccagtggggagccttcgtgaatgggattatttccctcaaaaagaaacttcagaaagacatcttatcccttccactgtgtggggacacagcaagaagatgtggtctgtgaaccaggaagtgggccctcaccagacaccaaatctgctggtatcttgatcttggacttttcagccttcagagcgatgagaaataaatttctcttgtttgtaagttgcccagtccatattattctgtcatagcagaatgaaaggactgagaaaaccattctagccaagttcttgcagaggaattaagcccaggsctgaggagagagccgtgcagccatgacctaatgtgtttggcagtcaggtccttcttgctctttgttaatgagtctattagaatagatagctgagcacacaataggcatgtgggccaagtactgtgccaaggactgggagtgcaatggtgagcaaaatagacatgggcacttgtctttgtggagcaagacaagtgcagggaagagccactagtctcatattcacagaaaacatacttgtagatattggtcagtgctacagacagatgtcatgaaatgtacaatgggagaatttatctgattagtaaaggcagagtagccttccctggataagtgctgggtgtgttggaacctggaggaatatcatgagttgagcaagtgaattgtacttgggagtggaagagcacttcctggggagggaggaggaataccttgcaaaggtgtgaggctggggaagcaccgcccattggaggaactgattgaaggccagtgagtgaaaggaggggagggacgagaagcatgttggtasgtgggtctggaaaggtaggttagggatagatcatttgggcctggtgagtgccgaaagctatgggaaccatctgaggggaggccgtggtgatggggatgtgatcaaaactgtgctgccgacatttcccatggaggtcacacacaagaggagctgcagtcgatgaccagcaacagcatagcccagcctctttagatagcagccctcccggccactccatctcggcaggctcaggctgccataacagaataccacgggcagggaggcttggacaaaggacatttatttctcacagttcttgaaaactgggaaaatcatactcaaattactgaaagacaaagaaaaaaatccaaaagcagccagaggggaagaaagacattacacagaggaaagggaatgttagtgaaaagatgcttctgctatcacagatactgcagaccaaaaacaatggaaaaacatcctaagtactgatggaagagggagagagagaggaaagaaatcttaccaacaaaaatcctgtatccgggaaaataccttttaaaaataaaggtcagataaagctattttatgattaacaagtgagagaattcatcactagcagaattgcattacaagaaacagtcaaacttcttcagattgaaggaaaattataccttggatggaaacgggagcctactgaaggagtggagagctcagacaaatgcagacatrtgggtaaattttttccattccttcatttctttaaaagatgtttggccatctaaagcaaaaatagttgagtttataacatgggtagaaatgacatatgtgacagcaatagcccagaggacaagagagggaaagtgaaaatatactgttgtaaatcacatagaccatgtaatgtgcacacaagatgttcttttgtaatagatactgataaatatatacatatatgtatatatacrtgtgtgtgcatacatatgtatatatattatgaaccctagagccaccattaaaaacaacactgtgaggtaaagcttaagagtcaataagggagataaagtagaaactctaaaatgctcagctgatccaaaagaaaacaagagaagaagacagaacaaaaacagatggaacaaagagaagaaaaagcaggatgaaagacagacagaaacatataagtaattatatcaagtgtgaacagaccaaatgcctcagttaataagttcagtccatcagtttcccagtggaggtatcagtgctctcaattattttgagaacatgacagtggaggtgtgttccatggaccatgtgaatcatgtaaagaatgtaacaartaagatgtgggcaagaaatatatgatctcatttttattttcgtagcacttttccttagttgtcctgagtgtttaaaatggaaaggctgatgtaaaaatgtgccaattaccagtgtattatttatgcgtccccaaatagattttgaatctctcatctcaagcaattttcaaattgaaaatatataattactactttcaagtctgtcccttccagattgggcttttagcactcgctcttagctgactcagacgattcatcaggtgacagaaaagcagggagcggggcactgtctggtgctggctgaggatgctggggaccagaggagaggaccagtgtctcacagccatgatgctcaggttcactgctcagcaggggctgggggtggggtgaaagcctgggcatcaaatgtttctgctaaaatatagtctgtacacctagtaggactaataaaacatcaggyttgtagaatccaggcccctagttaagaaatgaattatagctttgaatatctgcatcaaatttttaatcatggaatcctttcactttatttcaccttgtctcttagtagtaaatgaaaattatgtttttatttcccctggcctaccaatgtaaaagctagaaataaaggaacgttgtcgtacatagatgccctcattgagtcactacattgagtcacttggaagttcccaagacatatgccatgctatcacttttctccccaaattgtgtgtgtgtgcatgtctaacatatatatatatatatatacatatacagatgtatacacatgtatatatatgtatatgtatatatatatakagagagagagagatgctataccaacaattaggaacataatagaaagaaaaatatattccttttcttgctacctgacaccatagcttttgtctgtttctgtctagtatgtgtatatattcttagagatgttacctaattcttaggccaaccaagatacatatgtgtggtgcctgcttgagccaggcactgcctttctatgtgcagtgaggaactatgaataaaggagattttagcttccaaggtgtctgtcttacctaattttctacgactgtaatagaatatgcagactgggtaatttataaagaaaagctgtctatttggcttttggtttttggaggctggaaagtccaagagcatggtgctggcatctggtgagagtcctcccgaggtggaaggtgtcacatgccgaataagcacgaaagacagaaaaacggggccaaacttacctttaatcaggagctcgctcttgtgataactgacctgttccatgatcatggcatgaatccatttgcctgataacctcttaaaagccatgcctcttaataccattacaatgggagttaaatttcaacatgagttttgacaggacattcaacccacagcagtgctcaaaggagaagagtgtatacgtggagcaaaaatgtgatatgacgggkctaggacagtgtggacaggtgcatggaaggaagtgttatgataagtgaagctttgcacaggtccttggagtagcccttttgaaatcttggaaggctccttagttcttagtgtgcttgtcacttagtggctttcttggctctagagttcctctggggattgtcaggactgggctctacgctgaccccacccccaactcccgccaccaccctttctttctcccttggctctgagcccttcacttgacgtttgtgaatgggattgtttatcctcaaatttgcatactgcacttttrcaaattaaactcctctgcgacactctgctgcccacttccactggctgttcggcactcagaacatcattacctggtctcctctctcttctagctgcaggaaaagacctggtcatcgcctcctgcagtgtccaggtagttaatacataacggccaacatgcacttgaaaccttagtccacagtgagccagaagtggccmctgaatcccttttagtcaagttaaatatgactgcagacccggttacccagggcagatgccttcctgcccttccaggtatccagggttattcttggtattctcaacttttgagaagggcccccactccatagacagcgtcatcgtccaggtctgttcacctggaaggagggagctcattcctctcgggccaactgtgatccaggattaattagtgggtctgagaacagctaccctgagtgaaccacacaaatgaggccgccagcagcaatttgtaccctgcgtcatttgggtggcctgaattccactcattcatctgtsaatgcacttaaacaaacattcctccttcctgcaaacttcactctgggattaggaggtctacatcacatcaaatggttagattcatctcctgtgacagtgcatcttaacactccattctaaaagtctagaatcattttctagctctaaagttgatctgtcaggtcttccttcctgttgtattttacctacctaatttatttcaaaatgttctggatgtgatctactttatagttgcagagaaatgtatgcaattagagtcccgttagcagtacagcaaagaactattgcatcctaacagggcygcagcactgagaaagtaactcaaacttacatacccattatacctcctccttggttaatgattctaagccatctggatatgggttgatttagttttattgagaaagagagagagattctgaacagcattcctcgctccaaaatattttaagagttttcttttcacctgaacctaattataaatatgtatatttggagtacttttcccttaccgtaacacttgtaagaaaattttgttatgaaacatttagaccaggcatggtgcctcatgtctgtaatcccagtgctttgagaggccaaagcaggaggatcactggaaaagagttcaggagaagcctgggcaacagagcaagatactatcgctgccaaaaaaaaaaaaaaaaaaaattaaacattagtgtggcatggtggcttgcacctgtagtaccatcgactcaggaggctgaggcaggagcatcagttgagcccaagaattagaagttacagtgatctgtgatcatgatactgtactccatcctgggcagcagagtgagactgtctctgaaaataaaaaaagaagataaaatgtttaaatacctacaacatcaaagaaaacagtataataaaactctgtttacctatcatctgatttgatagctatcaagatgtttttgcaccttttgatatttttgatggtgaaatattttaatgcaaacccaggcctcttatcattttgctcctacatacttgagaattcattgctaaaaaatacggacttaaaaaaaaacgaatggcaatgttattttactaccaacacaattagcagcatttctctggcatcatgtcttacccagcccatctccaaacaccattgtgtggttgctttgtttaaattagtatcagactgtccagtgcatttggtgatacccacatgtcttttgagacatgtccttgattctcaagcattgatttgttcaaaagatttgtctgcttgctttctcatggtatcatttaacttgttctattccccacattttctgcatttcatatgttgtaactcatcacaggccattttttcctcttttaatagccagaatcctttggtacaaagcagctttccctcatcagttagaactatttggttctcccagaaagcctattgtacaggaaagggaggataaatgctgaaatctctccctttatatttgctgagtgggtagtgccctagttatctccagtgtggaccagtgactgcctctctctctcgtctctctctctctctctctctctctctctctctcactctcacatcttgttgactctcattataaacttgtaggtccttatgttttcaatgcattttaatcagataccatcattactctatrtgattctcagattgtcctatctttggctaacggaagcccctgcaagttggctttcatgacttttgacctctccttagtggtcctygggcatcacatgctgtcccagcatttctgtacatttctttaccaagccctagaataggttgatcctctaaaagggactctgcccctctcagaggggaatggcatttagaaaataccatctgacaccttgggcatcggcacatggacacgtgggcattgctgttaggtcgtcacagtttctagaaccttccattgctctgagctaggaaatacatattgtttaaaaccaatcaggaccaagattggcccctaatcctgtgtctctcggccttccaggggaccttcttctggggatggtgggttttgctgttgtgaggtctccctggcatgtgcttcctgtgcacccctcccacccagggcactggctgtctcccttaccccagggcttctgccctgctcgaggaaggtcctacctccacctgcaatgtggagcctgcaggactcccccagccttgtcaccacatgctgtcttattgcccctggtttagggggtatgtgtttgtggacagcctgtggggctcaggtgtcccttgcatcatccacagccctgacaccttggtgctaaccccttgcagggctcactgaagtaagtgctatggccacactgccagtatttgcgggagcagggggtttcctgatacttctttgtttgcttgtttctaaatatatcatccataggttttccaggttatcctgttaatctgtttgacttgcagtaagaatttggaaaaattcagaaacactgcagccaccctgattccattgcccactaataatgtctttaactaaaagcagtctgattagacaagagctagacatgaggctctcacggggacattactggcattcccagtggagacgataaaacaaagcaaatggtaaatggtaggaagcatggcaaatgggcccacagtactccagacatcccttgagattgccctggagagcagatgcctgcattcttttccctgtaccatgcattctgacttttgtgctaagaataatttagttgttgctttaaacattctagttcacctgtaagtgctggttacagtgaaggaaaagagacattgttccttcctctgatcagcctgctgagcctcctcagagaggcctgggcagcaggcctggggcaaattatgcaccagaaaaggcttagagagtcagatcagctactttgctttaaaaaggcatagggcatcaagctgggattctggcctatgtaaacagtatgctgggaaaaaaaaaaaaaaagaaagaaaaaagaaaacaagccaraaatgcattctatagctcacatttgaatgctaatgaaaattaaaccagttcctttttttaactttaagagaccacacagcttttactatgctaatgtgtaatgtgaatttctcaaagagctagccttcagcatttcccatgctaacttaaaccactcatccctttttatgcctttattttaagagttccacctctttctaaatccatgctcccacaaagcactagtgcaagttgagtgctgtaggggctattgtgcttattagcaccaaaacgctgagttcaataaaagtaatagtatttcttttctaaccactcattttctgaaccagtgtttactgaatagcttagtgttgttctaggttatgccaaaggatcttaagcttaggactctactttcaaggagacacaagtgttaatgaatcatgataataaaacatgaggagtaccagcagttatggagtataaggaactgcaagtaaaggcatgagtgatcctgtgctaagaataacagttgtcactttaaacatctctagtgattgactctgccttagaaagtcaggaaggctgcccagaagaggtgaccagaaggtccaagttctagaacttgcatgaaggtcctgggctttgttacccttgccctagccaggcatcacaggacagtagcattgatagaggctggcatgggggcttttgaaggaagtatctagagtcaaaaaagacttagggcatgccatagggtggggagctgagggagctggggatgggcagcccagctacctgcgtttactattatgtgctggaaagagagcttggaaaatgctagagatgagatgctgaactcactgtctaaccacccracagtttcttgcccactgcatagaaaagccaatacactgagacagcagtgttgcaatagagagaaagagtttaattattgcaaggctatttagtgggaggacaagagatatttttataatcattctccccgagaactcagaggctagggtttttaaggataacttgatgtgcagggggctagagaataggtactgctgatttggtggggatgaagtcacaggagtggcaacactgtctttgtgtgctgagtcaatttcttgggcagcagcttataggactggttgagtcagatccttggtatgagttacaggtccaggggaagtcagttggttgccacaatgcaaaagtctgagaaatatctcaaaaccagtcttaggttttacgatagtgttgttatctaaaggagcaactggggcagctaaaaatcttgtgacctccagctacatgactcttgagtggtaagcaattatagaatagcaagcagcttatcattttactatgcctatattttagcagtattcaagccccatgatcctaactttggccttttgttagtcttacaaaggtggttttagcccccagagggggtcagttttgggaagggactgttatcattcttgcttcaaagttaagttataaactaaattcctctcatagttagtttggcctatgctcaggaatgaacaagggcagttatcttgtgaggttagaagcaagatggagttaactgagtttgatttctcttgctgttataatttttacaaagacaatttcaactgtttgattttaaataaggtagcaaaatagcctcagagactgagtcaaagaaaaccagagctgggcagtggtgaaagcaataaaaacagattttgttttggactattgcagtaagggaaaagaagcctcagaatagaactgggctcaactctggacacagcatgggcaagtaggaatttgtagccaatgagcacagtggtggtcaraggatggaaaaattactaagaagaaacatcaaggggaagggagatcctgcctaaactcacctaacaggactcttgccggaagcagaccagggtgataagacatctcctgggggatggtgggtgggaagctcaatcaggtattgaggggggtcagatacccagatggaggattcttgtcaatactggattgcacagggatgtgcacaggtgggccttgttggggaaaaggttcaggagcctgactaaagtttggtcaagaagagaatttttgtcaactgtatccaagttattaactcttgggctaatggagtattgtgtggaaagagttgatggtttggttgtgtgagtcacacctacctggttgtctgactagtttttgcagttcactagttgtgggatgctccttaacaactgtgatgtgcatttcaatctcttgasaaaaactctgcaaggatgctgaaaagattagcttaaacaaatcctggaaagccatgcttggcatatcacargttctccaaacgtgataagtattattcactcatttaatacttgctcttggtaaatgaactgtacggggccaaggaagagctttctctttggctctccgaaggtttgctgaaaagtcggttcacaaaaggaaggttaataggagaaaagacatacacatttatttaacatgtatatacaataaccttcagactgaagacccagagacacrggggagattgtctgtttttataattagtttcaacaaaatatggacagttgtgtagaaatatgattaaacaaaaagggtgtgatctaatggtcatagactgagtgggaaaatacagcaaggcatatcggtctagattcttcttgggttctctgaaaacatattcctcttttctgggtatgaggcaggcccctctctagaatgggggtctgatgacctacagtcaaacaaagtagggcagataatgtctttatgggccaggttttacacagatagggcagagggagtggtacgtaatactttttagggtttatggctggctttgtaggaaaacaggttctggtttctatgacctgccttggggaagagggattcttgtttctatggcagcctcagaggagaatgggactgagaggagagcaggagaaggtcagagraaaacttttctttttggggccttcattttgggttatagttttctatccccaataaaacaaataaacaaagaaaactcatggaagcttacaagtcagaaattatgaaaatcctcttcagaaattctaatcaatgcctgtatcagaaatattgcttactcctatcatcaatgcattgccgtgatttgccatttcaaacatgccccgcgtggcaatccaccttcccctcaggagcagctgtaacaatttcccacatgtggccaatgcactttatcatatgtgtccgtgagaatagcacattagccacattcaaaataaggtacgttgtgctttttccatttttgttgataatgatgccctcagttttgtaattgcttatttaccttgtttgcataaaatcttcccctgatttttgtgatacaatttcgctggctttatgcttggtctggctctgagaaatttatcattttccccattggtagagtatgaaaactttaagcaagaactacccaagtgagcagtttccagtttcaaattgttcagaattcactcatttccagactacaaagatgcacagaaccctcgagtcctgttgtcctgccgggggtccattcatcttgtatcttcagaagttttgtttgattctctatttgttgccatctgttctgtgtcttttcatggtgtgaattttgaatgctgtgggwaagatggaagccaaagatgcaccgggtctttggaaaagaaaactataatgattaaagggaggagagctgcgtagaagagagacagtggggtcctcttaggccttgtgtgcataaaataagctgaatgtttgtgccctgttaccagattgttctcttgattcacagttcatcgcctcctagatgaggctgggcgtggctctgaagagctgcagcacttctctctggcggtacattttgcacactcatggttacatggaagtggctaaatggccttctgcagagccactgcctgatcgaacatctctgtgagtcttggccttccccaggagactgtggggctcrttgcacttgttttaccaatcacagagctcacaaagaagttgtccaggcccggggggtgagatacataaattgagcctgcccataatgaacacacactttttctgaaggaccttagcacggtctaaataaagtttgtaaaccactgatgtagaagagggagtagatgtacattctggtcacaatagcaactagagtaaacgggcaaatggcttgagtgaaaggaaaaaaaaatgagattgaacaagaagagcaactgtagaattcttcaggttatgactgccatgtgctttgaggcagtgcatttgcatcctgaggtcacgttgtgcatccattgtcacactcgggactctctgcctaccctatgcttgcactagattcatcacgaagcaccgactgctgcgcttccctcaacaaaccctgctccacgtataccctcaggttcaactcatcgctctaaccatgtcatcctgattcactcaactttaccccaactcagattctgtttctaaggtraacttacacattgtgccatgtgtgtgtctgtctgtgtgtgtttgtgtgtgcacgcgygygcaccccaggtcagttctagcaataattgaaaaacagaaacctattttctttaattattttactaatttctacttgatacctcctggccctaaatccactgactaatgctcttatccactcacattttgtcactatcagcatatataccccatgtagccactgaaaaggtctrtcttatgtctacttaaggctggaggcttggactaaccaatctaacacaggattatcgttccagtttagtattttagggttgaaaacccctctcgctttgggtgttacgttcagctgctgaattgtgctgacttcttaggagggccgtagttcacaacttcatgagatggcacagggcagtaaaggcctaaagggttgaagggctgaccttgaataaataaatatgtgtccatgaaacctctgtggctcccagcatgcagggctggaggcattgaatgcaggcacctgtggggaggagcagtttgtggcaagcagactttacacggggaaggaccaatgctagctgcccacgagcacaggcagtagggtaattgtctgcagaggatctagaatcaatactccccaggctgtctctcatcaaaccccaaagtccttcattctagagatttgccaccagggagagaaaaacaagagktagttctcttacccatgcacacctttatttggtagaggctcaaccaagactcttgttttgggggaagatttgtatgagatttctatcctaatacaaatggctgcggatgctgcagatggggaaggctgtaatacagacttgtggctgcacagagccaccatacttagggcatcaggctgatgttagggcctggaaaacaggtttgaagatttctgtctgaatgaatttctccctctatttgttctatgctatatgcaaagccatctgactctactcgtacatcctgcccacgtctttgtggaagcagttgtttctctttctgttatatatctatggcaaatacttattcctccacttaatatacacactttaagtggctgctgcatgtaagcattcctgtgagtgatggtaggaaaacagcagtggacaaaagatcccaacgctcagaagtgaggagttctggtcattttcagattataaggtcatagctaagatgtttctgggctttttttattcctgtcaaactctaccagatacttagcaatctttctcatccagttctgtacacgagaaatcattgtgaattcttcaaactaccaaacaccactgtaacatagcatttctactataatataatttctactatgatatgctatataatatataatataataatattataataatataatatgaatgtaactgaaaacaaaatgcaaccccattgagtgttagtagtaagtagaaagccacaaagttgattgtagacacagatgttagagtgatgtgctggagccagtacaaatgcagattccaagacatcaatttcacatcagctctggggatagtccctggtggaagtcaccgtctacagtttctgcagctgacctttaggccacatgttctatgctgaaatgcaggcaggtgcctgggaagcaggggtggctgggacctatgtaattcactcttactcactcgtcgtgttaggttgttattcgaatgtgtacggtatttattcaaaattacaggtgataaaatgccatggacctaagaaattactctcaaatactaaagactttggcagctacatccatggattgtacaggtttggctgggctgtatgatttttgtaaatgatgtttaaaagcatgtagcaggaaatcaagctgactgtgtttgaatgtgaacccgccatgtgaaagcagtgactttagaattggacacccctgggcttccgctcctggtctataaaatggaggtaatgattctctgtgcccagtgtggtcctgagagttgaatgagatgacgggagggggtgcttagctgagaggctggtgcacagaaaagcactccccacagggccgccaagcaaagagatttgtgctggagtcaagtgctccattggatgtgctgtgcgctcgctgaatttgcaactgctgggaattgaaagggcttctgctcggggccaggctgtgtggaggctcaatgacctaatgaamaggatgtccatttggccgagatgagctgctgctggtgcaggccgctaatgggaaaccagtgtttacgggaaacctgcaaaatcatcctttgatagctgaggatgtcgtctgagggtgagatcaagccaaatagagcgaaaacaatagcaagaacataaaacttctgcttttacgaatcatttttagcttttagtgaagctgatcaattcgttttagcgagaagagccttaggtggttgttttctttaaatccttaatgtctaatttgtgaaatattattttacagatgactttttttttcaatttttttttccctatgaacaggcagcgaaataatcagccagaggttagtgtktgacaaacatgctttattttctttctaatatgtatctgatcatgttgttgtgtatctgaatacaatataaaaaagctatcttactctccctaggccacagaacaactggaaaggagaaaataaaacaaaacaaagcattaggcttggctttgcagcttatgtttagctcctggccatgagctgatggcagcgaaaagggagggaaggagtgatggagtagcctgcctgaggttgcacagctgcgtcgggagctgattgaaagccaggcagcgtggatccagactccatgatttcatccaccacactgcacatttaattaacaaaagtattattgtgaagggggtgaagaggtgattgaaatagcactggaccttaaaaaactgttgaaggctgtttgcctattgaagcatgcattatattcttcttcgaattattttaaaaaacaaacattggagtttcagaagtaatgcacaagcatacatttccaattaaaaataagtataaagagcagagagttgtattatgcaagaggaatttttccctctgttactcatccacataatcttgttccrttcytttcaggcaagctctgttaacaattttaagcgtattaatcagacaaatttaatatatatttaatctatgtgttttaaatgcatatgtttgcacatagtactctaggatgttctctgagggattttcctatgcatggttattcatcacctcacatttattcatcactaactctgtgccaggcactttccctctaccattctgagtaattaactcttacctggggtaacaaaagacattaacaagagaaaaacaaacaggagtttattaacgtgtatttcatatacacatgggagatagccagggagcaagtcattctcactgaggtggcttagaactccaacttatataacatcttcacaatgaacaataaagttttagcgaagtgacaagacaaagataaaggaccttgaatttttagggaaggcaaattatgggaaggaaaaacaaatgggaaactaatgatagatcaaggataggaaggtttgtcatgcaggtgcctctgctgctgtctccaggctgagaaggatatcaagttgttttcagtggctaccctttcctctccctgacagaaagggtaactgggacatttgtgaacatttacatcctgttttcaggcaaaaagggagagggcagagagtttttcctgtatctggattcttctcgattgccttcagctcaaagtaatctttatgccaaaacagcacattttggggtggcatattctcatcttctacactggcaactgaaaatatagatatagttattggtctcatgaagcttatgctctggtggaggaggcagaatttttactttaaaggaagcaccaaacacaaataatggaagaaattgtataaaattgttgttgttaataaatcttgaaatgtttggtagagttctccagtgaaaccatctgagttcaaacacttattttaaggaagcttttaaattatggatccaatttatttaatggttatgggaccatacaggttgtgtttaatgtagtttgaattttggcagtttgtggattttgaagaactggtccacttctttttaactggcaaatttctgagtgtaatattctatatggtcaccaccattatccttttaatggctgygagaggtgtagcaagatcctstgkttcactcctgatatttggcaatttgcgtcttatttttttttcctttgtcattcttgttagatgtttattgtttgcattgatttgaagaaccagcattttgtttccttgatttttcctctattgttttctattttcagtttcattaatttttgttcttattttcattatttccttccttttgctgactttaggtttattttgctcttctttttcatgttgcttgacataataatttaaattattgatttgagaccttctttcctaatataagcctttacagctgtgaatttctctctcaacaatgctttagctgcatcccacatattttgatatgttaaatattcactttcattcagttctgtgtacttttaaaatttttcctttgacatatgttcttcacccatagattattttgaagtatgtcatttaattttcatgtgtttggatatttcccttttgtctttctcttctttatttctcttttgactcgttatggtcaaagaacatacttccttcatgtgttttcagttactttaaaattcttgagatttattttatgttgcaggatatggtatatcttggtaaatattttacacatgttgggagaaaatgtggattccaatgttattgggtagagttttcggtatatgtcaattaggttccattggtggattgagtaggtcagattaatgttcctgataattttctgtctaatggttctgtcagttgcttaagtaaggttttgatgttctcaatgatagctataaatttgtatctttcttcttcaggcctattagtttttgcttcatgtattttgatgcttttgtttggtacatacatatttgagattgttatgtcttcctagtggaataatctttttatcattatttaatgtccatttgtgtcactagtaatttttttctctgatgtctacttcatgaaatactaatatagacactactgctttttcttaaaattaattttatatattttttcatacttttactttcaacctacttacactgtgaagattctatgctgttgaatttgatgtgaatttcttataaacaatatgcagttgcatcaaggtttttaaaatctgtcttttaaatgttgtatttaaatctttttttttttttttcaaattttattgtagaatcgggatacatatgcaggttggtaacaaaggtatattgtgtgatgctgggttggagtatgaatcaatctgtcacccaggtagtgagcacagtacccaatagacagcttttcagatcttgrcctgctccctctttcctcgagtagtccccagggtctattgaccccatctttatgtccatgcgtcctcttacttatatgtaagaacatgtggtatttggttttctgtttctgccttaggtcacttaggataatggcctccagctgcatccatgttgttcaagggacatgacttcattattttttatggttgcatagtattatatggtatatatgtaccacattttctttatccaatctaggtgttgatggatatgtaagttgactccctgtcattgctatcatgaatagtgctgtgataaacatgtgggtgcatcgtatgtctttttggtagaatgatttattttcctttgggtatatatccagtaatgggattgctgggtataatggtagttctgctgtttttagtcctttgagaaatctctaaactgcccttcacagtggctgaactaacattttcaccaacaatattcccttttctctgcagccttgccaacatcccttattttctgacgttttaacaaaagccattctgattgttctgagatagtatcttattgtggttttgatttgcacttctttgattacaagtgatgttgggcattttttcacgkttgttgtcttcttttacaaagtgttcttagtctttgcccatttttcaatggggttatttgttttttgcttgttgatttcccattccataggttgtctgtttactcccttgatagtttctcttgctgtgcagaaggtctttaattaggtttcacttgtcaattttattttgttgttgcaattgcttttgaggactaagccattcaattctttgccacaactgatattgagaagggcatttcctaggttttcctctgggatttttatagtttgaggtcttacatttaagtctttatccatcttgagttgatttttatatatggtgataaataggggtctagtttcaatctgctgcatgtggctggcagaccagttatcccagcattatttattgaatagagagtcctttttccattgctttttattgttggctttgtcgaagattaaatggttgtaggtgaggagctttatttctggttctgtattctgttctatgggtctatgagtctgttttcataccagtaccatgcattttggttactgtagccttgtagtatagtttaaagttgggtaatgtgatttttgcttaggattgctttggctattcaggcccttttttgattccatatgaattttagaattatttatctaattctgtgaagaaaatggcattggtagtttgataggaatagtgttgaatatgtaaatcactttgagcagtatggccattttaatgatactgacttttccaatccatgagcatgggatgtttgtccatttgtttgcatcatctttgatttctttcatcaacgttttgttgttctccttgtagagctctattactyccctagttagctatatycctggatattttattctttttgtagctattgtaaatgggattgtgttattgatttggctctcagcttcaatgttaattttttttattttattttattattatacttttaagttttagggtacatgtgcacaatgtgcaggttagttacatatgtatacatgtgacatgctggtgtgctgcacccactaactcgtcatctagcattaggtatatctcccaatgctatccttcccccctccccccaccccacaacagtccccagagtgtgatgttccccttcctgtgtccatgtgttctcattgttcaattcccacctatgagtgagaatatgcggtgtttggttttttgttcttgcgacagtttactgagaatgatgatttccaatttcatccatgtccctacaaaggacctgaactcatcattttttatggctgcatagtattccatggtgtatatgtgccacattttcttaatccagtctatcattgttggacatttgggttggttccaagtctttgcttttgtgaatagtgctgcaagaaacatacgtgtgcatgtgtctttatagcagcatgatttatagtcctttgagtatatacccagtaatgggatggctgggtcaaatggtatttctagttctagatccctgaggaattgccacactgacttccacaatggttgaactagtttacagtcccaccaacagtgtaaaatgttcctatttctccacatactctccagcacctgttgtttcctgactttttcatgattgccattctaactggtgtgagatgatatctcattgtggttttgatttgcatttctctgatggccagtgatgatgagcattttttcatgtgttttttggctgcataaatgtcttcttttgagaagtgtctgttcatgtcctttgcccactttttgatggggttgtttgtttttttcttgtaaatttgtttgagttcattgtagattctggatattagccctttgtcagatgagtaggttgtgaaaattttctcccattttgtgggttgcctgttcactctgatggtagtttcttttgctgtgcagaagctctttagtttcattagatcccatttgtcaattttggcttttgttgccattgcttttggtgttttacacatgaagtccttgcccatgcctatgtcctgaatggtaaagcctaggttttcttctagggtttttatggttttaggtctaacgtttaagtctttaatccatcttgaattgatttttgtataaggtgtaaggaagggatccagtttcagctttctacatatggctagccagttttcccagcaccatttattgaatagggaatcctttccccattgcttgtttttctcaggtttgtcaaagatcagatagttgtagatatatggcgttgtttctgagggctctgttctgttccattgatctatatctctgttttggtaccagtaccatgctgttttggttactgtagccttgtagtatagtttgaagtcaggtagcatgatgcctccagctttgttcttttggcttaggattgacttggcgatgcgggctcttttttggttccatatgaactttaaagtagttttttccaattctgtgaagaaagtcattggcagcttgatggggatggcattgaatctataaattaccttgggcagtatggccattttcacgatattgattcttcctacccatgagcatggaatgttcttccatttctttgtatcctcttttatttcattgagcagtggtttatagttttccttgaagaggtccttcacgtcccttgtaaggtggattcctaggtattttattctctttgaagcaattgtgaatgggagttcactcatgatttggctctctgtttgtctgttattggtgtataagaatgcttgtgatttttgtacattgattttgtatcctgagactttgctgaagttgcttatcaggttaaggagattttgggctgagacagtggggttttctagatatacagtcatgtcgtctgcaaacagggacaatttgacttcctcttttcctaattgaatacgctttatttccttctgcctaattgccgtggccagaagttccaacactatgttgaataggagtggtgagacagggcatccctgtcttgtgccagttttcaaagggaatgcttccagtttttgcccattcagtatgatattggctgtgggtttgtcatagatagctcttattattttgagatacrtcccatcaatacctaatttattgagagtttttagcatgaagtgttgttgaattttatcaaaggccttttctgcatctattgagataattatgtggtttttgtctttggttctgtttatatgctggattacatttatagatttgtgtatattgaaccagccttgcatcccagggatgaagcccacttgatcatggtggataagctttttgatgtgctgctggattcggtttgccagtgttttattgaggmtttttgcatcaatgttcatcaaggatactggtctaaaattctcttttttggttgtgtctctgctgggctttggtatcaggatgatgctggcttcatcaaatgagttagggaggattccctctttttctgttgattggaatagtttcagaaggaatggcaccagttcctccttgtacctctggtagaattcggctgtgaatccatctggtcctggactctttttggttggtaagctattgattattgccacaatttcagctcctgttattggtctattcagagattcaactttttcctggtttagtcttgggagagtgtatgtgttgaggaatttatccatttcttctcgattttctagtttatttgcgtagaggtgtttgtagtattctctgatggtagtttgtatttctgtgggatcagtggtgatatcccctttatcattttttattgcatctattttattcttctctctttttttctttattagtcttgctagcggtctatcaattttgttgatcctttcaaaaaaccagctcccggattcattaattttttgaarggttttttgtgtctctatttccttcagttctgctctgattttagttatttcttgccttctgctagcttttgaatgtgtttgctcttgcttttctagttcttttaattgtgatgttagggtgtcaattttggatctttcctgctttctctcgtgggcatttagtgctgtaaatttccctctacacactgctttgaatgtgtcccagagattctgatatgtcgtgcttgttctcgttggtttcaaagaacatctttatttctgccttcatttcgttatgtacccagtagtcatttcaggagcaggttgttcagtttccatgtagttgagcagttttgagtgaatttcttaatcctgagttctagtttgattgcactgtggtctgagagatagttttgttataatttctgttcttttacatttgctgaggagagctttacttccaagtatgtggtcaattttggaataggtgtgtggtgctgaaaaaaatgtatattctgttgatttggggtggagagttctgtagatgtctattaggtcagcttggtgcagagctgagtttaattcctgggtatccttgttgactttctgtctcattgatctgtctaatgttgacagtggggtgttaaagtctcccattattactgcgtgggagtctaagtctctttgtaggtcactcaggacttgctttatgaatctgggtgctcctgtattgggtgcatatatatttaggatagttagctcttcttgttgaattgatccctttaccattatgtaatggccttctttgtctcttttgatctttgttagtttaaagtctgttttatcagactaagattgcaacccctgcctttttttgttttccatttgcttggtagatcttcctccatccttttattttgagccyatgtgtgtctctgcatgtgagatgggtttcctgaatacaacacactgatgatgggtcttgactctttatccagtttgccagtctgtgtcttttaattggagcatttagtccatttacgtttaaagttaatattgttatgtatgaatttgaacctgtcattatgatgttagctggttatcttgctcgctagttgatgcagtttcttcctagtctcgatggtctttacattttggcatgattttgcagtggctggtaccggtttttcctttctatgtttagtgcttccttcaggagctcttttagggcaggcctggtggtgacaaaatctctcagcatttgcttgtctgtaaagtattttatttctccttcacttatgaagcttagtttggctggatatgaaattctgggttgaaaattcttttctttaagaatgttgaatattggcccccactctcttctggcttgtagagtttctgccgagagatccgctttagtctgatgggcttccctttgagggtaacccgacctttctctctggctgcccttaacattttttccttcatttcaactttggtgaatctgacaattgtgtgtcttggagttgctcttctcaaggagtatctttgtggcgttctctgtatttcctgaatctgaacgttggcctgccttgctagattggggaagttctcctggataatattctgcagagtgttttccarcttggttccattctccctgtcactttcaggtacaccaatcagacgtagatttggtcttttcacatagtcccgtatttcttggaggctttgttcgtttctttttattcttttttctctaaacttcccttctcgcttcatttcattcatttcatcttccatcgctgataccctttcttccagttgatcgcattggctcctgaggcttctgcattcttcacgtagttcttgagccttggttttcagctccatcagctcctttaagcaattctctgtattggttattctagttatacattcgtctaaattgttttcaaagtttttaatttctttgcctttggtttgaatttcctcctgtagctcatagtttgatcatctgaagcctccttctctcaactcgtcattctcygtccagctttgttccattgctsgtgaggaactgtgatcctttggaggaggagaggtgctctgctttttagagtttccaggttttctgctctgttttttccccatctttgtrgttttatctgcttttggtctttgatgatggtgatgtacagatgggtttttggtgtggatgtcctttctgtttgttagttttccttctaacagacaggaccctcagctgcaggtctgttggagtttgctagaggtccactccagaccctgtttgcctgggtatcagcagcggtgtctgyagaacagtggtttttcgtgaaccgcgaatgctgctgtctgatcgttcctctggaagttttgtctcagaggagtatccggccgtgtgaggtgtcagtctgcccctactggggrgtgcctcccagttaggctgctcaggggtcaggggtcagggacccacatgaggaggcagtctgcccgttctcagatctccagctgcgtgctgggagaaccactgctctcttcaaagctgtcagacagggacatttaagtctgcagaggttactgctgtctttttgtttgtctgtgccctgcccccagaggtgaagcctacagaggcaggcaggcctccttgagctgtggtgggctccacccagttctagcttcccggctgctttgtttacctaagcaagcctgggcaatggcrggcgcccctcccccagcctcactgccgccttgcagtttgatctcagactgctgtgctagcaatcagcgagactccgtgggcgtaggaccctccgagccaggtgcaggatataatctcctggtgcgccgttttttaagcccttgggaaaagtgcagtattcgggtgggagtaacccgattttccaggtgctgtctgtcacccctttctttgactaggaaagggaactccctgaccccttgcacttcccgagtgaggcaatgcctctccctgcttcggcttgtgcacggtgcrctgcacccactgacctgcgcccactgtctggcactccctagtgagatgaacccggtacctcagatggaaatgcagaaatcacccgttttctgcgtygctcacgctgggagctgtagactggagctgttcctattcggccatcttggctcctcccccgcttcgatgttaatttaagctgtttacatttaaggtagttattaatatattaggagatacttgcattctagttgccattataatgtttgttttctctgtctctcattcctgtttctttttacttgttttcacatggattacttgaatagtttttagaatttaatcttaacttatttataatgtctttcaatattttgttttgtatgattttcttcatggttactgtaagaataaatacatacataattaaattataacagtctcaatgttttaccacattaagtaatgtgtagaaactttactttcatttagttccctagtttctccttgccttttgaatataattatcttaggtatttcctgtatatacgttgagcacaacatcagatggtgttatgattcaaccatcaaatgctgttttagaaactcatgtaaagatggattgtcaattatatttttatccttactcttacatatttccatactcttctttcttttgtgaagttccaaaccttcctttattgtcatgtccwttcagtttagagaacttcctttagcaactccttaagggatatttcctaggcacaaatttgcttgatagttctttggctgagagtgtttttatttgtcctttatttctagaggtatttctactaaatgtagaattcatagttgacagctctttactttcagcacttgaaatatattgtccaatttccttctagcattcatggttttagatgagaagtgtgttatcatttgcattttttaaacctatatgcaatgtgttatttctctctggctgcttttaagattttttaccttatttttcatgatgatatttctgagtatggattttgttgggtttattttactcgaggtttgcttagcctcttgaatatgtaggcttatatctttctccaagtttcagaagttttcagccattatttcttgcaatacttccaatagtgtttcaatcctctctctctcttctccttccaaaattctgacagtataaaagttaactcttttgaaattgtcgtactagttccctgagaatgtttgtttgtttattatttattttacaatctactttgtctttgtggtttagattaggtaaaataattttaatctgtcctcaattctatacagtctgttttgtggcatcctcactattaagctcatccagtgagtttttaaaaattgtgttttcatttagttattttctgagctttttcttttaggaatttctttcaagagaatgaataactgcttgttgaagcatttttatgacaactgctttaaaatccttgtccgacaatttcagcatctgtatcatcttgatgttggcatctgtcaatcttcttttccatgcatcttgtgactttctggttctgggcatgatgagtaatttgttttctctttctctccctctctttctttctttctctctttctctctgtctgtccatctgtctcactctgtcaccaggctggagtgcagtggtgcagtctcagctcactgcaacctttgcctcccaggttcaagcgattctcctgcctcagcctcctgagtagctgggactacaggcatgcaccaccacgcccagctaatttttgtatttttagtagagacaggttttcaccatgttggccaggatagtctcaatctcttgacctcatgatctgcccgccttggcctcccaaattcctgggtgagccaccatgcctggccatgtttttgtttgtttgttttgtttttgtttttgagaaagagtctcactctgttctctaggctggagtgtagtggcatgatctcagctcactgcaacctctgcctcccaggttcaagtgattctcctgcctcagcctcctgtgtagctgggattacaggtgcccaccaccatgcctggctaatttttgtatttttagtagagacggggtttcactattttggccaggctggcctcaaactcctggtctcaagtgatctgcctgtctcagcctcccaaggtgctgggattacagccatcagccaccgcacccagccaccgcacccagccagcatgatgggtaattttctattgtagactgaagatttgggatattatgagactctggattctgtatatacttttttcacaggcatcttcccttggaggtgtagttggaaggccacatggcagtgaatgctcagcatcccttcagccccactgacaccacccttgcaagagtggagcagtaacccgatgtctcattgcagatgagtccagtggcatttcagctccatcctagccctgcttatacattcctggtcagctcttttgtctgatttcctcttcttataaataacaccctcttccttataccagtgttaggcatccttcatgtttgagtatcaccaagaccttgctcccctgctcccctcagccctcccagagccctcctgttcctgctctctctctctccaggcccctgcccgacttgctgtctgctcaaactgtgctcgctgtgagctgctgggaactctcccagggctcagccttgccatttctttgcttaaaatgccgaagtgtcttttttgcctatcaaattatgtataacctcctccccagggaattaagggctcttgtttctaaaatatgctctaaactgcctctctgccttttctcctttccaagtgaaaacctcacagatcagtatatttataggaagaccttattatgtaatttaataataattcctacttggatcctctgtggcaggcactgtgttatgtcctaatagacaacatttaattaatcttcatggtaatccaatgaagtaacagacgcacaaagaagttaagactttgggatctgcggttgtcagccccaggtacaaatcccatctggatcgtagctcttcctcctgaaatatgggcagtagcctcaggattgttgtgaagcctaaagaaggtaatgcataagagctctcagcatgaggtgctgtgcacagtgagcattcagtaggtgatgtagttgctgctgttgccagtatttagtattattgccatgctttagagtgaggcccagtgaggtgaaacaaatagcccaagagcacacagctctattaagtaataaaaggcggatgtcacactctgcaacgttaaaagcacagggtgtgagaaggaatggatagaacgatccttctcattcctcccagatatctacagataggccctgatttatgctgatttgaattgtgattttttttatttaatcatgggttgattggtgtactaaatgcgttttggattcctgatactttggacttatgatggatttatcgggacatatctgcatcagaagtcaaggagcatctgtacttatatgaaaattctagaccaaagactgaaatatacttttcatttaaaattcaatgttagctacccgcttctgccccaaacagctttcatgatgaaacttgcctttttgatccattatgtgagcaagaagaagtttatgttcacagaagggcttttgagaatactaatggcactctccatagcaacttaagcccccactctatttcctttaacggctatttttttttttttttawcatcagtaccatgtgaatgagagagccactgcatgagccctggaggcagcggccttcagggttgatgttcttagggttggggtgatgttgagcggtgcatttagaagtaaacattgcacgtgcgttttttttgtaaactgtctcaaaagaaagaattaaggataaatattgcttggcttagttttagaaggaatggtaccagctcctgcttgtacctctggtagaacttggctgtgaatctgtctcgtcctgggctttttttggttggtaggctattaattactgcctcaatttcagaacttgttattggtctattcagggagtagacttcttcctggtttagtcttgggaggatgtgtgtgtccaggaatttatccatttcttctagattttctagtttatttgtgtagaagtgtttatagtattatctggtggtagtttgtatttctgtgggattagtagtgatatcccctttattatttttcttgtgtctgattcttctctcttttcatctttattagtctggctagcggtctatctattttgtcaatcttttcaaaaatccagctcctaggtaataccattcaggacataggcatgggcaaagacttcatgactawaacaccaaaagcaatgacaacaaaagccaaaattgacaaatgggatctaattaaactaaagagcttctgcacagcaaaagaaactaccatcagagtgaacaggcaacctacagaatgggagaaaacttttgcagtctatccatctgacaaagggctaatatccagaatctacaaggaacttaaacaaatttacaagaaaaaaacaaccccatcaaaaagtgggcgaaggatatgaacagacatctttcaaaagaagacatttgtgtggccaaaaaacatatgaaaaaaagatcatcatcactggtcattagagaaatgcaaatcaaaaccacaatgtggtaccatctcaagccagttagaatggtgatcattaaaatgtcaggaaataatagatgctggagaggatgtggagaaataggaatgcttttacactgttggtgggagtgtaaattagttcaaccattgtggaagacagtgtggtgattcctcaagaatctagaagcagaaataccatttgacccagcaatcccattactgggtatacacccaaagtattataaataattctgctataaagatacatgcacatgtatgtttattgcagcactattcacgatagcaaagacttggaaccaacccaaatgcccatcaatgatagactggataaagaaaatgtggcatatatacaccgtggaatactgtgcagctataaaaagaatgagtttatgtcctttgcagggacatggatgaagctggaaaccatcattctcagcaaactaacacaagaacagaaaactaaacatcgcatgttctcactcctaagtgggagttgaacaatgagaacctatgggcacagagaggggaacatcacacactggggccttttgggggttgggggacaaggggagggatagcattaggagaaatacctaatgtagatgatgggttgatgggtgcagcaaaccaccatggcatatgtatacctgtgtaacaaacctgcacgttctgcacatgtatcccagaacttaagcatataaaaacgaaagaattaaggaaaaatagagccaaaggttactggaacaaacgaaccacgtattgacagactgctttgttttttattgtgttgttaggatagccattatatgagtctggtcctggacgggatgcacttttcttttaaatgmatttgttccttactgcaacaaaacaacatttcccagaatatttctcaatgctaggattaacttgattcccgtttgatggagtatgagcgaaagagaatgtgttcyccactgggagggtgaggactctagcccaaactacatccactggtgtagtttggatatctgtcccttccaaatctcatgctgaatgtgatcgccaggggcctcgtcagaggtgtttgggtcatggaggtggatccctcatgaagggcttggtgtcctcccagtggtaatgggtgaattcttgttctatgagtttacgagagagctggttaattagaagagcctggcatctctcttgctccctctcgccagctgatgtgcctgctcccccttcctttccaccatgagtaaaagtttcccaagrcctcaccagaagccaagcagatgccagtgccttgtagaaccataaaccaaataaaccttttcttcgtattaattacctagtctcagatatttctttatagcaatgcaaaatggactaagaaacttaccctttaaatttttgtggctggtttgtattttgttttgtctttttttttctttcttcctccctccctgcttccttccttccctctttcccttcagccatttctctttcccttcatccttctctctttcctgtcatcattctctctttcccttccttcctccctctactcctctcttcctagctttctcctttccttcctcccttactttctccctcccttcctctcttccttctttccttcctttctttccagaatcctaaagctttgcctctgcctcttccaaacaaaaagtaaaacaaagcaacaagtaggattgtttaccagctgctctgtggccactaaaagaaataagttgtagtgggtatagaccagtaatgtttattgattgacattgcctctgtgcagctgttgacctgttaactttaaatttagtttatgtgggggcaggcatrgctgtcacactcaccctaaatcttctgtctattacagaggtggaattccatgagccatrttagaaacactaccttctcattcttcactcttaaaatatatgcttccttttgggagttttacatgaagtaaaatgagaacctcatctgtgtgtttcctgggtgggcctttgaatcaagaatgcaggctgttccttccgtgtgttaggtgctgcatgcaacctcgcctctccaggtgccccagacacattactgaatacagcagggacagacccctccttcacggagctcattttctggcacaggcaaagtgacccttttcacctctyagaggagcaagttggcaaagtttttctgtaaggggctagataataaatccttgggacgtgtggaccagcggatttctatggtacctactacggccaggcagtgaaagcagctgtaacttatgtgcaatgatgggtatggtgatgtctcaataacattttactcacaaaagctggcctcggggtggactcgagcccaggtgtgctacccgtgggttacwgtcttcacttctgacagaagtccttatttaaggcctcgagattttcttcactacaaattttttactgaggctgcctgccctcctggctgctttgagctgtcttcagctttttagctcatccatacttcatgagacacaaagaacagcatgtctgcattctgtgtacagatactcagccttctccatgccctgcctctggaatagtctccattaatccgaacaaatgtagagttggggaaagaaatagagcagaatatttgtgtttagcccttgtctscttggataatggtgtctgctttgatttctcaagaagactttaaaaataaaccattctctgttgagcacctgttgagttctgggagtgtgctgagtcctcagaatacacagctgcaggacacagcttcccgcccctcaagtatggacaggtcagggagagagttagacaagcagatactcagcagaggtgaacacagggaggttggtggacagagctcaacacccgatgccagtggggcatggggagtgaggggtgcgtgtgtgtgtgtgtgtgtgtgagagaaagagagagagaaccacagagagagagagaagagaaagagaagaagacagaggagagagaagagagggagaaagagaaggaaaaggaggatgaggaggaaaacagagggaaataggggagggaaagtgagagggagggaggagggagtgtgagctgaggagaagcagcagaaatttccattaagggtctgtaacacttacaccttgagagctggattagtccaaagaggaggcgctattacacagcatccctatagggtgtgtaggagctgacttcagccaagccacaaggggtttaggtcacagaggatatgggtctctggtcttttatccttttattccccttttagtgctgtttataatcggaacaataatgaacttataattctaaataattgtagatataaaagtaaataatttagatacagataaaaatgcgacattatgtgttcttaaaatgatacagaatatactaaactaaattgaatggcagagagtaaacatgaagttaaaagtagcaatttgcacatcagggaacagaaaatctaagagctgatttctgtaaaatagacaagtttgtggtaagtttaattcattaaaagagmaaaaatgtaaacacaaataccatcatacaagtatattcagcagcatttcattgccaattttcattttgctatcacctttttacttcctttccccatctcctctctgcttctatcttctaactttttgtcttctccaagagaaccaacggaagtaacccaatgcataccctttcatacatttctctataatcatataatcctatacaaagacatatacccatatatatttttgtttcctttttataaggttagattcttattaaagatatttttctatacattcattttttttctgtttcacttaacaatacatcttggtcaatccttcaggtcaacagacacagaaatcattcattatttgtaatggctacccgctttcggttttccccactacaagtaatgctacacaaaacatctttgtctgtattatattatgtgtctctgtagaaggtatttatggcatttgcattgctggctggaagcacatttgtaaattttaatagattggcaggttgctttccaggagagatgtggtaattcacattcccaccagcactgtataaatgtgaccatttccctacatcttcaccagaaattggcattattttaagatgttccagttttatcagtgaaaaactggtgtcatattattgctttatattgcatttttttgcttctttcagcattatttcttacgttaattggtcatttgaattcatctttcgtgaattgcctatcatattcttacccatatacctcttttctcttttatatggttttattatcaaggaactgctctttgactattatgaacatttactctttatctgttatgtatttttgtgaagttatttcctcagtctctcatttcctttatgatcatacaaaatttttagtttttatgtggtaaaatatgttcatttcccctcatatatcctgtcttgactaataggatatacctctcctaacggttacacagtacttctactaggttatcttctaaagtatttattgttctaattttttaccactaagtctttaatctatatggaactgttttacctttccaacttttattttaggttcaaaggatacatgtgcaggttttttacatgggtaaattgcatgttacagggatttggtgtacaaataattttgtcatccaaggaatcagcatagtacccaacaggtagtttttcaattctcaccttccaccctccaccttcaagtaagccccagtgtatattgtacccttctttgtgtccatgtgtactcgatgtttagctcccacttataagtgataacacgcagtatttagttttctgttcctgagttaattcacttaggataatggcctccagctccatccatgttgctgcaaaggatatgatttcattcttttttatagctgcaggtattctatgatatgtatgtaccactttttctttatccagtccactgttaagcatctaggttgattccatgtttttggcattgtgaatagtgctgtgatgaacatgcacatgcgtgtatctttatggtagaatgatttattttgtctttgggtctatacccagtaatgggattgttgggtcgaattatagtctgttttaagttctttgagaaatctccagaaagctctctacagtgtctgaactaatttacattccccagtagtatatgtgttctcttttctttgcaacctcaccagcatctgttacttttttgactttttaataacagccaatctgacgggtgtgaggtggtatctcattgtggttttgatttgcatttccctaaagagtagtgatattgagcatttttctatatgcttgttggctgcatgcatgtcttcttttgagaggtgtctgttcatatcctttgaacattttttaatggagttgtttgtttttttcttgttgatttgattaagttccttattaaggaagttaagtttctgaaagttaggcctttgtcaggtgtatagtttgtgaatattttctcccattatgtaggttgtctgtttactctgttgacagtttcttttgctgtgcataaactctttagtttaattaagtctcacttgtcaatatttttgtcggaattgcttttcaagtctttgtcatgaagtctttgccacagtccatgtccagtacagtatttcttaggttttcttctagagtttatgtagttttgggttttacatttaagtctttaatccatcttgagttgatttttgtatgtggtgaaacaaaggggtccagtttcaatcttctgcatgtggctagcaagttatcctaacaccatttattgaatagagagtgctttccctattgcttgttattgtcagctttgttgaagatcagatggttgtaggtatgcagctttatttctggtttctctgacttgttgcattggtctgtatgtttttgtaccagtaccatgctgctttacttagagttatagtatagtttgaagtgatagtgtgatgcttccagctttgttctttttgcttaggattgctttggctattcagactcttttttggttccaaatgaattttagaatagttttttctaattctgtgaaaaaaatgttattggtagtttgatagaaatggcattgaatctgtaaattgctttgggcagtatagccattttaacaatattgattcttcccatccatgagcatagaatgttttttcatttatttgtgtcatctctgatttctttcaccagtgttttataattctcattgtagagatctttcacctccttgtctagctgtatttctacatatgtcattctttttgtggccattgtgagtgagattgcattctttatttggctctcagcatgagtgttattggtgtgtagaaatgctactgatyttttgtacattgatttttgtatcctgaaactttgrtgaagttgtttattggatctacgagtctttgggcagaaacgatggcattttctgggtatagaatcatatagtctgtgaaaatgatagttcaactwtttttcttcctatttgtgtgtcttttttttctatgccttttatttctttctcttgccttattgctctatctaggacttccagtactatgttgaatagcggtggcgagagaaggtatccttgtcttgttctggttttcaagaggattgcttccagcttttacccattcgatgtgattttggctgtggatttgtcatagatggctgttattattttgagatatgttccttcaatgcctagtttcttgaggatttttaacaagaagggatgttgaattttacagaaagtttttttgtctctattgagatgatcatgtgctttttgtttttagttctgtttatgtgatgaatcacatttattgatttgcatatgttgaagcaatgttgcatcccaggaataaagcatacttgattgtagaggattagctttttgatgtgctactggrtttggtttgctagtattttgttgaagatttttcatctatgttcatcaggtatattggcctaaagtgttctttttgttgttgttgctgtatctttgcctggttttggtatcagaatgatgctgacctcatagaatgagttagggaggaatccttcctccttgatttttttggaataatttccacagaattggtataaactattctttacatacctggtagaattcagctctgaattcatttgggccagggcttttcccggttggtaggatttttttttttttattactgattcaattttggaacttgttattggtcaattcaggtttcagtttcttcctggttcaatcttgggaggttttatgtttccaggaatttatcaatttcttctagattttctagtttgtgtacatagaggtgttcataacagactcttagggttttttgaatttctttatggttggtggtaatgtctcctttgtcatttctgattgtgtgtttttggatcttctctttttaaaaattagtctagctacttgtctgtcaatgttacttattctttcaaagaaccaccttttatttttattgatcttttgtaagccatttcgttcacttcagctctcattttcgttatttcctttcttctgctaactttggaatttatttactcttgtttttctagttcctctaggtgtgatgttacattgttaatttgagatctttctaactttttgatgtgcacatttagcactataaactttcctcttaacagtgctttagctgtgtcccagagatctggcatgttgtatttttgttttcattagtttcaaagaatttcttgatttctgtcttaatttccttctttacccaaaagtcattcggggtcagattatttaatttccatctaatggtatggttttgagagactttcttggtacttatttctatttttattgtgctgtggtctgaaagtgtggctggtatgatttcgttttttggaatttgttgagaattgctttatgggcttagcatatggtaaatgttagagtatgtggcatgtgcatatgagaagactgtatattttgttattgggtgcagtattctgtagatgtcttttaggtccatttgatcaagtgtcgaatttttatcccgagatcttcgttagtattctgccttgattataggtctaatactgtccgttgggggttgaattatttcactattattttgtgtggttatctaagtgattttattagtctctacaaacttgttttatgagtctgggtgctccagtgtcgggtgcatatatatttaggatagttaagtgtttttattgaatggaaccctttattattaggtaatatccttctatgtccttttgatcattgttggtttagtctgttttgtctgaaataagaatagcaaccggtgctcttttttttgttttctgtttgtctgatagatttttctccatccctttacttggagmctatgggtatcactgcatgtgagaggtctcttgaagatagcatacaattggctttggcttctttatccaagatgccacgctgtgccttttgagtggggtgyttagtccatttatgtttaagattaataacagtatgtgcagatttgatcctgtcatcatgttgttagctggtggttatgtagacttgattgtgtagttgctttatagtgtcagtggtttatctcctccttctgatcttggactagcaaccaagaaataaagcacttagcacgagtgccttgggctcaccaacactgtaattcaggacaaaacccttgtaattttgcaaatgatggggtttttaaataggctggacttcaacaccttgttttctaaaagggaaaaatataaccatgtccaagacatagcttttctcacaaacgaagtgactgagataggtccaagggaaatactccaaagcagtggattccgaactcaagccttccaaagattcacattttgaaagctctatgaatttaggagagtccttcaggaaaatttgttgcccacctaagggcttctttgtgtaggtaccattaatcctaaggaaataattaaaatacagcctctagtggaaagttctgtccactgacaactgatggattgtcagtggacaagcttcagaccttatgatgcgacagcaatatctctgcacagcacgtggaaactgtgggggacaccaggggggcacagatgtggtaaggagaagagcctgtgtttgcacagctcctttgctagcrctcaaggtgctgaggtattcactcaggaagtatccaagggtttgggaagggcaatcatgaggggccccttacatcccaggccttacatttctgcagacctcctgccctggccactgagaatcatgcaggctataggacttccctctctgagtccccacttcagggaaaagacatcataagttacagaaacaggacaaccagggagcaaggatgccctccttagcaagcttcatgtagggaagtggcccaggacttgttgagacagacttgagggcaagtggctcgtgatgctgggatcagggtacagtgtcacaggataccttcaaccagggcctctcccactgaacctctcgagcaaaggtggtaggggcaccccagggtttcaccttcccctccttggctagtttgtcattgagatgrcaaagctgagccaggaacccatcattggggctgatctcacagttctgcctcatgatactcaggatggacttgatgtccaacttctgacaatcataaggtacatgataactagagctggagatggctgtaaccttcccagcactggacgagcacctggccattttgagccaaggcctggtcagtgaagtctgtagccctttcmaagtaggtgctgaggttgaactcctgcacttcattggccttgatgcccaggtaggtgatgccagagtccttggagaagttggcattgtttatgtgcatgaaagacctgccctcagtggtattcagggcatgaatactgcctagtttctgaagcttggggatatcctgatccacagatgtgttgcccatgtaaatcttcagggtgacctcattgcagggctggcttgggaggctgtagcagccactgctgtctgagagcaggtcactgagatcttccatggagcgtttgaaagggcctgtcatggcagcagtggggcccggcatgctgtgcaggagccagcaagggggagtctggcaggcccttttgtcctttttaattcactgaagttttcctaccaaataaaataatgcctggtacatcataggagrtcaatgtttgttaagtgaatgaatgaatgagtgctgctgagagccagaaattaatcttgaggtcagtgggatgtcatatacggattctatgcaaagaaactaatataatctgatctgaatttttggaggacactacagagcaaccctggccacacatataatttcacatttgtatacaaagaaactgaagaaaaaagagagcaagaaactcacccaagttcacagagccattgattccctgagcctggcggaccttgttgctgatgsttcctccccacatggaaatggagacagaggccagcacggctgctcagggcacacccagctcaccgtggctgaaatggagatctgtgtctgcgagggattttggaacatttgcatcattgtcctgatcattggccatcagtcacagcacccacttgctgtccaaaacagaatggagagtcctgtcatccaaagaaggagttcaggccagccaggccaaacgaagagtggttctgagcagcacgcagatgatggcccctttctgggcaatgggaagcagtgttcttaagcactgggaaatgctctttytttctttctttctttccttccttccttccttccttctttcttttcttttctttctttcttttcttttttttttgagatggactcttcttctgttgcccaggctggagtgcagtggcgctatcccggcccggccggtgcttcttaacagttttggtctacgcaagcaatgtaagaggaagatgtctctgaggccagaaacctgggtcagggctgccctcaagacaaggaaaggccccagtacccagcaggggcaccacacatgagcccattcccttgggtgctgggctgtgcccaggtgggtgggcctccctggtcttatacagggcagctgtctctggaggccaccagagcgaggccacaggaaccctaggaaggggaatttgctggtggctggggcagctgtaagagaatgccacagactgggggctcaaacagcacacatctcctgtttcacagtgctggaggcaggaagtccaagatcaagatgtcagccaggttggtgtcttctgagayctctctccttggcctgcagacagccaccttcctgctgtgtcctcacacggtctttcctctgcacgtgcatccctggtgtccgtctgtgtgtcccgatctccttctcataaggacatcagttatatagggtcagggcccaccctgatgacctcatttaacccaggttacctttttaagggcttcacctccaaaatcagtcactttgggggttaggatttcaacatatgaatttggggggacacagtttggaccataactatgggatgttgaagcaggatgctgaaagcttccaaaggaggtggccttcctttgaagggacctccaagggtcgggtgaatgtggacaggcagccacctcagagaaaagggcccccattcctcctcagcaccaagaacacctgtaactcctttggaacttttatctccgtatttcagaccacatgcacagtctctgtcttacagatgcgaaaataagtgagtttagatgagtaatcatgaacacgttttcctgcatgtgggagattttctccttttgactcatgtagttttcaagggcatatcctgctattgtcctcctggctttgagctgcctgccgtgtgtgcattctctttccatcacacacgcgcacctgcgtgcacacacatacacatgcacacacgcatgctcacatgacaaccccaaattgatacacaattgcacttccagagcattgcccaccctgacaagcaccacgtctactgtgcctgataaatggagactagtatgtattctcagagtgcatgcagacagcagaacatgcactcagtgatggtttatgttgaatgtttaaacactgccattttggaagtcaagtgtyagcagggtgggaggtgtggtgttcccacagctctgaaaagaacaccccatgaagattcgagcaggcccctttggggacacagcctccactgggaggagccaagtgggctggcgctgtgtgagcattttgcttgacaagagttgttagagtagaccagaaggcctgtttccgggaaatattttctccatttcctctctacataggtctctccaaatttcttagaagatacacaattaaggtgtctccttaaggactattttactattttccagaaagtagaaataaaagagggggtagagaaatatcagaattatcagagcatgtcttagcctgtaagggagtagatttttgtcattgtaggagctagaggtagaaaaagacatggaaaggaatgaaccaatgaggaaacaccgctgcttggcaggccagcatcttgaatgtcctcatcacacgagtgtgtcctggatcccacccaaggccctccaggagtggatctgcctctagatttcctgctcttatccactctgttgytagatcacagaagcagcgccatgatttattatttaataacctacaaaacattattatagaaatgaaacattcaacaggaactgtgaagccatttacaatggaatcaacaagacaacaagacgtttgatgtaagagagaaggactgcttaggaaacaawtaatccgtgaagcgtggagccgccccatcctaaaaacaaatacactttagagtaactgaatttaaatacttctaaatcagatacagtttttaaaaatgtatccttttatattatagtcatgctgaattaagtttgaggactattgctctgcagctatacacagatacattgcaaaatgactaacagcttaagctaaaatggttttccttttactgaattgatagtacaatttagaattacaacttttttgaggctagctagactagcctgctaaccacccctaagcattctgtgcagtgtgataaaagttatccacatccaagtccacctctctgtggagccagttccatcctcccacctagaattgtgcttttgtgcttttctgcaggacttactatatattcatgagcttgcatgaattactgtcatttatctgcaaaaactactacattgagtatattctcctagaggatggaaccacatctaacttatttctagatgagttaccatgcccagcccctgagaaactagttcttgtttgctgttgcagatcactcgagggtcatctgtaagagcctggaggccgacccagctacagtgaagaagaatttcttaaaatatcccttcagtgttggctctgtttcctttgaaaaacagagcagaggctatggtggctagacccaagggatgaaaggaaaattggtatataaactgcagttgttttcaagctgatgtcaagtctagagaaaacaaatcagtgtaactgtatacacctgtcttcccaggacctaaaggggaagacaagtgattacggaagcagtagtgtctgagggacaaacagtggcatacatgtaatctactgacagggactcaggaatctggcatcgctccgggtgtttcagctcaattataaggcatttaaatgatcaagtagctgatatttggcccagcttcctcagttcttcacctcagtttcagtaggcttaaatgatagttgaagtcttggctttgtttacagcatatccattcagtatttggggaaataatttttaactgaagccctagttatggggtaagtttcttttaggaaatcctttacactattattttttgagatgtcattttcttctgtcagaatgagattttaaagaaaatcctcatgctcattattttgtggtgaaatacacatccaccgtaccatcttagccattttcatgggaccattcactagtgtgaagcacattcacgttgtcgtacaaccgtcaccaccrcccatctctaggaccttttcatcttcccacactgaaactttgtactcacgaaacactaactccctttccctccccctgaccttggcaacaactgttctcctttcagtctctatgactttgatcattctggggtcattctagggatctcataccagtggagtcttatggtatttgtccttttgtgactgacttactttactcagcatcatgtcctcaaggctcatccatgttgttgcatgtgtcagaaggttcttccttttgaaggctgaataatattctactgtatagatataccacatgccacattgtgtttatccatcccctctccaatgtctcctggccattcatactttaacaattcctctctagttgtacactctctttacttcagtctactctagtgctgtattacataagaaaatgcatttgggccaaatgtctgaaggtacatgtttagcttagagatgtgactaaggaccaccaggggaggaggcatctaaaactcctcagtgacaaaaaggaggagaagtacaactgcctggtgtgggacaagagacaactagtcacaactagtgagaggcttcacataatttcagcttctcttcatggttatgtcaaaatacaattaccaccaatttagtttaaagattaattggcttttatttgcaattctagaattgagaagctcctcattctgtaaaacagagtaagtgttcagatgaaatgagctgatgaggttggcttcctaggcacaaaagggctgaagaaagcagaaacagggagcaaagagtggactggtcatttcagttactttcctcatagcgttaaaacacaggggacttcattgttacattaactcagataaactagaacctcttggggatttttgaaaactggcctgtttcaaagttcagttggattatgtggaacatgagtgaggccatcctggtttgttctgagatgctggggccttgtgcaggggctcatccaaaacagcggcctcccataaactgtaacacttatgcacagagcttcttaaaggaaatcattcccatgaagttatatttccaaagctcagacggtgagcaccttttggaactttgtttcaaccatgtaatgtttcaccactgtactggccttcaaactccactgctccacatattcagctccacacttgtggtgaaagctgcacaggcaggaacgtggagcaggtgtgtttgcttgtttgcaacctgggattggaggtgagtttcagcgaagggggaaactcagagtttccaaagtttgttacggagtgcttccaaggtaacagtctattattgaccatggatttggtgaagtagagcagtattttttagcaggtaaaatcacagactttggcttcgctaagatgtgtgattgagtctcagtcttgctaactgagacaatctggagaagtcacctcacctctcggagccaacttacctctgatgggctcaatgtcaggattcagtctatagggttgctgtgaagacagaaggcattgttaaacaggtgggggttgccagttatctagtaatggtagtcatagcaacagcagtgtttttaaccacggaatgtgaaatgaacattctgattagatgcaaggctacttacttaaggagatggccatgagatgccgacaaggcccctgtaatggccatgatggccgcgtcgggtatgctggggacagatcctcctctcctcctgagccctggtcccttttcctaaaggcaaggtttacggttaaatactcaaacaaaaacagtgtaggcattgagggcgatagcctctgacttaacttttcagttttgggtaaactacgtgtgaagaaaaaagctgaatcttgttattaaaaaaaattctgtatactttctatacatttctttctatacatttctaaatgaattagaaggttaaatgcaggttcctcatcttcttaactagcttctttaattcaaaaatttctaaacaaatttagccataagtctaactgaaactctcacatccacattttttttttttttttttggtaggaagcttgactcatttcatcaaatagcctttgagaatcctggtcactggtattgaaacaacattgcagggtattgagtatttgtgcaggccctgctggtgaggtgagactcatctccttctttggagagcttcagggagagtaaagctccttctctgccagtctgttcttcgaaaaacaaactgaaacatagcaaaacccaaaaggtccaaatcctgtgattagctattaaaatgagttgcatggaaccctatggctattagtatcgtcgttggtattgtgtaaatgcacacacactacgaggatggccagattgcagatttgtgttttgcatttctttccatggccttcatttctttttcttttgtcctagataagtctgccagtttcttagctaatttttactctatgtcatattcctccaatatgcctttaaaaagaagcagctggcatgttttagataactccttgcagggggaagtgagaactctgaaggaggaagaggagtcagggaggctcttggcagggtgatgagggccccttgcctcgacagcccctgaactccctggcttctctttctcttgataactgttgggtgctctgactttgctgccctcaaaaacatgttacrtttgccttggcaagccctcctcatgtacttttcagtgcatttcctaagggccaggattggagagaagcaagggctctcccagatgcaccccattcttgccatttaacattatctatgctaccctgcagttacactgtctgcaagctctgacccaatttaggctctatgtctaaccttaatagattgttctaacctcttcctgaacattgcaaggatcctaagacccctttgtcttaggatggcaaaggcacagttttcctcttcttagctgcacccgttattaaacacatttgcaaaacttgcatgggaggcttgaagtccatttctcaggtatgaatgacaggatgaagaccagggcattctgattgctcgagtcaggggtgtgggtcatgccatgaccagtttgtgctggatgaatgtgggcagtgaccctgtgtgatgtcagtaagctttgctgtgcctttgtagtcccagggatggattcgactaagccatgtcctctccttccaagtagttctttgggcactggtgaatatgtgcgtgttgttacctataattaggtgtgcaatttacaaataatctatrctcgtgtctttttctgagctgtgcttgctggcccagaagaggtgaagggtggcttcagtccyatttatgtcacttaatgaatggaaggaattggctgggataaacctccatgctatcaaggagactctgcaaagatctctgcctcactgatgttctaatggagcatttgctcagttgcagcatgttgcccagagcagagagtagccgtcctgtagatggcaagaactaaggaggtggatcccaggctgcctttgtggrcattgcagaccaaattcgggtgcagggccctctgcaaactcaggttgaaaatgcaaatcaggtaatggagtcagtgataaattgatgagcgaagrtgaagtatatctagcttttaaaaaataaaagggaggatctgccacaagtggtaacccttagagacagtgaacatgggaaagaggcagctagctcagcccagcacctctgcacacagggttcactctgcagagctgctgggagtggagagggagtgggcattccacagctacatctgcaaggcaggaccgttgccctgggtgcagtgcagaggcaaagcatctttatgaccaaggcacatcctcagcttattctgacatttacctccatccgtgtgtttttaaggcaaatccaccgcacatttctgaaacaccctcctgggaatcgatcgttagtcaccaaatttcaatggaactcaaagcagagctcatgctgtgatgaatgccttttctgtttctaccagtgtgatcttccaggctttaaacttgccattacttctgaccaattcatttctttttttttttttattttttatttatttatttatttatttatttattttttaatttttttttttattatactctaagttttagggtacatgtgcacattgtgcaggttagttacatatgtatacatgtgccatgctggtgcgctgcacccactaacgtgtcatctagcattaggtatatctcccaatgctatccctgccccctcccccgaccccaccacagtccccagagtgtgatattccccttcctgtgtccatgtgatctcattgttcaattcccacctatgagtgagaatatgcggtgtttggttttttgttattgcgatagtttactgagaatgatggtttccaatttcatccatgtccctacaaaggacatgaactcatcattttttatggctgcatagtattccatggtgtatatgtgccacattttcttaatccagtctatcattgttggacatttggacatttgggctataaagacrcttgcacacgtatgtttattgsggcactattcacaatagcaaagacttggaaccaacccaaatgaccaattcatttcaattaaggaatttttgagtgtctcctatggccctttgtaatatgatcagtggactggaagtgaagccccagccaacactgctctaggtatctgacggagagcttgatgtctcttctgtttcttttcacccaccagtgggtatcatgcttctgagacactggccccactgccctggcttcctggccctacatgggaccttctgatggtcttgtccatttttattgtcctgtgggatctgccccaggttctagaaatgaaagctctgcccagcccagcagggagcctccaggatcctgctccgtgctgtggcctcagaattttgtatctcaccctttcttactccatgtagtgctttgtattttacacaccaacgagtatcatagttaagtgcactctcactacgatttgagtcactggcacacacagagggacgaaggaaagcaaaacattctactctcaacataggcacacatagtgtcaaaaagaggacttggctgtcctctcctggcaaggycacgtgtgggcacaccctgaggttagacacaggccaagtcgccacaggtgccttcttcccagcgggacggctgtcctgcctctccctgagctggttattgatgggaggagggtgaactgcaaaccagccgcagggacagagtagggaggcggaggagaaccagggccagtctgtcgccttcagaggtgacctgaatttgggaacctccccacttctccgaactgcaggggagcttcccgcgctgtctcccaggctggagtgcaactctgcgattacagctcgctgtagcctccaccctccagcctcaagtgatcctcccacctccgcctcccaagcagctgggactacctacagatgtgtgctaccatgcctgcctaatttttttttaatgtttaatatttgttaaagatgaggtctcaccatgttgcccaggctgtccagcctcagcctcccaaagtgttaagagtcacagrtgtgacaaaagcacccagccctgttgtcaacgttctgtcttattcgtggcaggaaactcccttaagaggggttttatggcaatcctcatttctcagaattttatgctcttattcagaaaaggggaattctgagaaggcatctttctgcacttgttgattctcaatgaccttttgctcaaaataatccacatcccaaagtgacatattttggggtgatgtcttctgaacccctttactcagcagtgatggaggcttatgtcccagggctgctgctgcttgtgtttccgttgctcagcgtctccactcggttcccatctgtctgactcagttgagtgtggtgtcctggctggatgcctcctgtccctgctgaggccgagctctgagagtgattctcacatctcattcctaccctcaatgcaaatcttatgtgctgggtttttcatataaggaartgaggtttagcatagtgctcgggagtcagatgtcattgattttgaaccgctgcgactgatggtaatgggtggtgaccgtggccaggtcaccttccagaggagtctgcctttcctcaccccacagtatgataaaggctctgcatccatycacattcacacacggagaggaagttagcttccattattgtgaatcacagagtaatgaggaaatgaacaaatggatgcaaatccccctggtctcctctctccctgatgaccctggccataccggggtctgggagggcaagcattctctccaccartctcccaatggaaccacgcgtgctctgacctggccttctcctctggctacagccccaagtcctagcttcttcccctgagactccagagtctttgatatgctatctcttggctagttatcattctctctcgcagatttcaagtcccaaggggaccctgtgccatattattttctatttctrttgctctacactgtggagaagccagtattttcatgtgtgcagtgctcttggcctcagggcgggctggccttggggcgggctgggttttagtttgggaccattgtttgtgctcctccaaggtaggcagagtccaatttgggctcaatccctcccttactctgagtcagataaggtctgggcaagataacctccattccctttatggtttttaagttgtggaactgagtgagacacattctgtgggtctgcctctttccaccccacagtccagctcctgcacctgtgatggggcagctcagggtgggcaggacgaggacagtggtcatgtccatggatcctgtggccctggatgcagcatcccacccctctgtccacaccctccttagtcctccccacctgtgcccagcacctctgtgcccaccaggcagacagcgcccaacctcccagctgcagcccccagactcttgctggctggccactgttgggtgtgcctaacggggagtgccaccagggactggagcatcagtggttacagagtccagaaaactgaatgcctgttccctcctcgccttgcctataaaacatctgcctacaattagtatgatttacttaacacatgttttcagaaatgcattaattagatcagtgtctgtatttgcagggacttgtgcaactgtttttcataagaacgactccttattcttcaccagcaatagaggagggtggtcattttactagttagtagkggatgcttcttcttgtcaccaaactgaacttgggtcggctcacccagcatgcagacaagaccaaatactgtcactgggattcgcagcaagagagaggcatttatcacagggcacccaacaaggaggatgggcagctcacacctaacctgaccttcttgatggcttacaggcaagagtttttaaaggcagggtacatttcaggaaagcagaagttacaggcaaaattttatatcaacacatggaggttgtacattggtttggcctaaaaaggtgggatatcttgaagtgggagtttataggtcatagatagattgagattcttttatttatagttggttaaggaaccaaagctttgtctaaaagatttgaggtgagcagaaaggaatgttaagggctgaccttaacatatggtagttaggataaggaaccctggtgattgtcatgtggtgttataccagagtcaggtcaccagggtaagccacagtatgcggggccagattagcaagagtgatggcctgtagacgtgaccttctttaggctcctcaggaagaaatttagaacaaagaacgtggtcagaattcagtcccgtttcccccttatctgaggactgtgtgatgtgacagcagtgggcattttccatctggtaggggcctgggtttctgaaaaacaactcaagaacatatgctaagatgttctatagagtccctagaacatctgcaactctaacctgtttggagactgttgcttaagttcctactgtcttcttgcctattgggttgcccatttatttctctggggtcactgggtgcctggaatttccctggaagggrctcagaacttgaggattcaagatttttcctttatttccatgccgagggtggggtggcagggccctaagggggatctctgccctgtttcatcatcttcattagctgtaatcagtaatcgcagatcaagtattcagttcgatcttcagaatggacaataatgcaaagcattattcaacctttccattggatgaacctggaattgcttcttttttttttcttttttctgccttttattcaataaatattatgatgtccttaataaacaagattcagggaggaaattgctcaagcttataggattaattaaggggagtcagaacatgctctaactagatggggcattttacaaaacagatgattaaaatcttatgagacgtttgagagagatcgacctgttcagagagacagaagcatgatgcttctcctttcttcagtgaccttttttgtagacatttgctrtgctccttgatggacagtgtgctgatctggtagagcaaggttttattctcttgccatctgcttgcaaaagagtgagaagaccagccagttccccatgcgttattagtttatgttactgtactttctaactttaaatcacaaagcatattgataaccacatgatttgaaaaagagttgaggaaattagaaaacaaaaacaatcaacaaccacaaactaaactaaggtagactgcatgggtgctaatttttagtttgaaaatacacagaaaattagcctgtttaaagtgatgccattctcaaggtggtctctcagagagacccggagagtcccttggggtacaaaggctggggggctcccatggcttacctatcaaacatttgatctaaatcatatttccagttgtctctgtgaattttgtcttgttacaaccaagtagctgttttctagaatgtctaaatggcccttaataatttctcctgtatttgtctggatcaacgtagcctgttttagtttcataaaacatttctttcctgtgtttctcaagaactcaaaatttaaggtcaacaaaatgaccttgctcatccagatggcaaataaagatgatgaagatgctgttttctatctatatttttttggtaaagccatgcactaggagtttgtatgattgtccccaaatgggctacatgattgaaatccatttagtttgaggatagcaggtgcttttggttttcctgagctgaagttctacattatttttaaaaatctttaatgtattctttctgcctttcaaaaggcaaattttcctcaatcccattatctcttccctcctcattttcttcctggagaaccttagtcccttaaatctctagcacgttcttccacagaagatgccccaaatggctctctgctttgtgagtgctacacctgggkggaatcacccctctcctctttcacagttgagagtcagcagctagagacgtcccagccagctgcgcaggcttgaatgctggcttcatcatttactggcaatgccatctaaggcagcagtgcacccacatgcaaaatgggggaacagaagaagttgttttacagagatccaaagtgcttagaagagtacctgagagatacttaataccaaataagtattacctataattactattaatatgattcctcttggaccttggacttcatgctggaactttctgcaaaagatccacaagcaaactccttattttctaaagtgaattagtagaggacatggactttggattccaagtactttgattcgggtacttgagtcatgggtgcatattgcaggaacttagtcacttagtctctcagtgtaaacaatgacctaagaactagaaatggcaaaggacagaatgcacaaccccaagagaggagctctgtgcccatgartgtgattaagaccttaagaagtcttggagtggattcttacattgaattagatgctctacatgactcattacaaaccagatatcatggtcctctgattccagccatggcgactgcagtgttcccgggagaccactggctgctgtccagtgagtgcactctcctgggaatggttccccacggccctggaacacacagagtggccatgccttaattctccacacagtctcacttcagaatcctggccatacttggacatccagaggccagagtggaatgaaaacaatcaactttcaagcataagagattctcccacttcttcctttgttcacaagttttgttgattcttatttacttttctgaggatagatatggtataatccaaagtcatgattcattcattttaaaaggatgaaaagtgaggctgtgaataatttaaagatgcaacatccatttgtatctttatagcatttcattttaatccaatattaatgtgggtcagccctgatgaaattctcttatcagcaactgtagtattttgtttattgtgtcaaaatctgagagcagttaataattagaatatattttttctactgaaataatagaaatgttaccaaaaggccagggactctrtctaggtcccttgcatgctgcacagaaagccaaycgctgagacaagtattgccagggaggaggagcctggatacggcaatctgatgagtttcagttctttgctggagggtggatttcctgaggaaggaactcagatgagacaaatgtaagcttcaagttttaagaccagagggtcaatttctatgtttacttaaaaactcataaatatttatgtgggacacttgggccagcttcagaaaggcattacaaaaaaaatggaatatgaagaaaataatatttaaaagattcacaatcttactactgtaacacagccacttctcacatttctgtagggtttgcaaaaatgtttaaaatactagatgtgcagataatgatgctggacagacggatgggtatggaaaggtgtctagtaccttgtcccccgtgccacacttcacactcactgtgctcttgcctcccctgctgggcaacactcaggtgaacccagtgagtgctgcccctgaccctcctgacccacgtcctcattgcaggcacactgattgcccccctttttgtgttacagaacacttgcctctaccatctcttctgtattttggatcatttctttgagataaatttcaraacctgtctgggtgtaaggtgtgctgttccttaacactgtatgtctgccttccctttagtccctttctcccactggagctggagaggggaagatgcaggtgaraagcctggcacctgggtggggtacccagagcgtgtggactgagctccgaggaagtaccaggtgatgtacgtggaagccgtggactgagctcccagtggcctccaacttcccgggctgctccctgcatggcggtgagggccttgctgaggccaggggtttgggggtgccgcatgttttcatccccggtgctttccgtgtgtgccagcacctaagaagtaaaacatttttcaaaggaaaagatcatgttttcaccaagctgctaaatttaaatctggattttagtttccctaagtgcagaaccgttttcttagaaggcctgaaatgctgagtagtgttagccagccttaccagctgcataggaagtggttctttgagaacctaaataatgtctaatgctacctgaccctcacagctacccaggaagcaggtcctcacctgggcctgccctttctcccacctgcactggcartgctggctgatggggtagcctccagttgtctgtgttaaagcccagggtgatgtcatgcaaggcatcctctctgtgcctcagtttcctcacctgaatgcgagtggactggatttcaacaggttcttcttgcaatgcttttcactgtcctagcaaggaattgccacagtcacgacttatgatgagaatgtatttgatctctcaggtatttaagatggaaaggttaagaagtaacagatttgattattttcacatccctgcaatgaarctttcttgcatgctgtgcatrtaggataacgttagtgtattccatctatcattctggcagtgctatttgtgagcttaatggagctcctctttcattcacaaggctaagcatttcatagccatttctgtaggaagcattatttaatgggaccctaggtttccttccaggaggggagctgaacatggtcactcagttgctaggaatggtggatgcctctggtgccacccaccgcctggggtgaggagagtcttcaccctccttggaagctcccacctcattctgttgctctgacaaagactagagttccttcttccttcctccagggtgtggtcatcacatttatttggtgattaatmatcaaatgatttgttcttcctaactgaagtatcttaattctgttgactgacttaaaataatcacaatgtagtacacaggcttttataattttaattgaaaacaacagatatacctgaaagctgtcttcccttgtccttcccatgacagtgcccataaactaaagcacagttgccttcgcttcccagacaccgccctgcaggtagcagaactggagccgccacctccccgcccccctccacgtggaggcaggcaggtagcagaatcggagccggtgcttagggtggactgccaattgtttagtctgaagattttactyacaagggtgggctgccgattgtttagtctgacgattttacttataaagtcggartaagtttacctgtagatcaagatttatgatgtttttcattcctgtctgaagaagaatctaagggagaaatgctgggcatttgggttgttcattccctctatgcttcccacctgccttccacccagagggatgaagaggcaagcatggaatcctgcttccctacccaccaccaggctattgagggcatggcccaggaatggtgtgagggactttgtagcctgtctagtaaaatgcatctaaagttggcagctgccctctaacaggtgccctccacctgccctggtcttcgagaagtcctccatcagaatagggtgctgagagagctggtgcccacaggaagtgcatgtgggctgctgcagatggagagggagccctaagaacagactccacatggccggagcttccaggggaggaggaggagcccagatgagagacccagagcctgtgactaagatgattggcagattaggggctccctttggaaatgatgaccactttttgcatttatttctctggatgtgtcttgcaggcaggcacaggcacagaaatggcarcatggatgcttttggtgctgggatgtcccaggcaggcgtgagttgatgcaaataggcaagaggttgaggccagggcagagaggggctgaaagtcagtagggccctgagctggcagaggggtgagaatagagcgcccagggatgaggacctggcactcctgggtatggatgcacaggcaccctggtgatgccctcaggtgactgtcagggcacaggtccatacctctcactgcagcatccaggaactcaagggacaggctcgggtgctgctgacatggacaatgtgctctcagggactgagcgtggtcagggaggatgacatgagctttgtactcccggtgagcttggtccaggtcaaagcaaatcgcggccactaagtggagggggtgggaccgcagtgtcctcacccagcttcagagacgacgtggcccatgctgatgcaggacactggctgggccccrggcaagctggccaaagtgatgtgtggagaggagaaccctgcacagctcctgctcccggcctgagccaccactcagtggtgacttgtgggctgccatccggatgccccgggcttcagaggagccaccggtgcttcccccagcaaacgggcactatgcggggcagttggctgccattttcagccagtgcattcaccaggtctctggttcctggagtgacgggcacataactctcctgaccagcagatccccctctggccctgagagatggggacagaggaatgctccccacttcttggcaggcaccttgtccctttggccatagccagcatcttatctagtactcactttactctctggaacaaatgaggcctagagggacttggcctaggatacgttgtccctcactttcagaaaagaaacaaaaagccaggcctctgcctcctaaagcagtactayttatccccaaagaacattttattctcctttaataaaacgttgatatcaggraaaaaaaactgaaagaaaaaggaaagtaaaccatgtttcacatgaggtgcataaacagccagccgcctgtaaggtgaggtctctaagtgtccttcaggcttaacttgcatagaatgttgttgatttaacactaaggtatcaagttcattaacagaaattagaacatgtagtaattacacaattaattaagaaataaaaacaggccaggcttcgtagctcatgcctgtaatcccagggctttgggaggccaaggtaggaggatcacttgaacccaggatttcagtttgagacaagtctggacaacatggcgaaaccctgtctcctccaaaaacagaaaagttacctgggcctgggcgtggtggtgtgcacctgtagtcctttgttacttgggaggctgaggggggaggatcacctgagccttaggacattgaggctgcagtgagtcatgatagtgccagtgcactgcagcctggtcaacagagtgagattctgtctcaaaaaaataaaaaatgtaataaaatatatattttttaaattatctggccgtggtggcatgcacctgtagtcctagctatttggaaggctgaggcaggaggattgcttgagcccagaagttcaagactccagtgagctgtgattgcacctgcaatctagtctgggtgacagtgagactctatttctaaagaaaaaaaaaagaaaacaaccatggcaatttttttttatctacaaaatttaattactagattttacccatggaaataaggaaatttcaggaaaccttattccaccataactacttttgaaaaataacagatgctaaggcaattatttgaatatgccagcctacccagcatgtttttcttcatcatcttgatacatcacatgaaactgctggttttatttttgctcataattaggaacaaatatttttaattgtcttagtgcatgttttaaaatttttaaatgctcaaaagggttaaatgaaggataatgcttagtgcctgtgaaaacacactaaatgtaaaataaataaaacattttagcaccaatgaaataatacataattttgttattttaatttttattttaggtttgggggtatatgtgaaggtttgttacatagataaacacatgtcctgggggtttgttgtacatattaatacatcacccaggtattaagctcagttcccaatagttgtcttttctgctcctcttcctcctgccttaagcagaccccagtatctgttgtttccttcttcatgttcgtgagttctcatcatttagctcccacttataaatgagaacatacggtatctggttttctgttcctgtgctagtttgctaagagtggtagcctccagctccatgcatgttcccgcaaaagacatgttctcattcttttttatggctgcatagtattacatagtatatatgtaccacattctctgtatccagtctaccgttgatgggcatttaggttgatttcatgtctttgctattgtgaacagcgctgcaatgaacatgcacatgcatgtgtctttatggtggaatgatttatattcctctgggtatatacccagtaatgggattgctgcgttgaatggtcgttctgcttttagctctttgaggaatccccctattgctttccagaatggttgaactaatttatgctcccaccaacagtgtataagggttcccttttctctgcaaccttgccagtatctgtcatttttcaactttttactgatagccattcttactgctgtgagatggtatctcattgtggttttgatttgcgtttgtctaataatcagtgatgatgagcttttcttcatgtttgtttgctgcatgtatgtcttcttttgagaagtgtctgttcatgtcctttgcccactttttaatggggttttttgtttttctcttgtaaattttattaagttccttatagatggtagatattagacctttgtcagatgcatagtttgcaaatattttattctattctgtaggttgtctgtttaatctgttaatatttccttttgccgtgcagaagctcttaagtttaattagatcccacttgtcaatttttgcctttgttgcaattgcttttggtgtctttgtcacgamctttttgcccgttcctatgtccagggtggtattgcctaggttgtcttccagggttgctatagttttgggttttacatttaagtcttcaatccatcttgagttgattcttgtatatgatataaggaagggagttcagcttcaatcttctgcatatggctagccagttatctcagttatatcccagttatatcatttattgcataggcagttttccccatggcttgtttttttcagctttgtcaaagatcagatgctatagatgtgcagccagccttatttctgggctctctattctgtttcattggtctgtgtgcctaggttttttgtgkgtgtgtgtgtgtgtgttgttgtttgtttgttttttgagaagggggtctcactctgtcactcakgctggagtgcagtggygtgatctcagctcactgcaacttctacctcccgggttcaagcaattctcccacctcagcctcccgagtagatgggattacaggggtgcaccaccacgcccggctaatttttgcatttttagtagagacagggtttcaccatgttggccaggctggtctctaactcctgacctcaggtgatctgcccgcctcggacccccaaagtgctgggattacaggtctgagcctctgcgcccagctatgtgcctgtttttgtaccagtaccatgctgtttttgtcactgtggccttgtagtatagtttccagctttgttctttttccttaggattgcctcagctattcaggctctttttttggttccatatacattttaaaatatttttttctagttctgtgaagaatgttgttgtcagtttggtaagaataggcttgaatctgtaaatttctttggacagtatggacattttaatattgattcttcctatccatgagcatgggaagtttttcatttgtttgtgtcttctctgatttctttaaaaagtgttttgtagttctcatcgtagagatctttcacctccctggttagctatattcctaggtattttatttagtgtgtgtgtggcaattgtaaatgggattgcctttctgatttgactctcartttggttgtaataacataaaattctgaacttcatataaatcgaaccaaacctgtagaatgattctgagatgcactataatggtaatcacctgaacttgatctacagctcaaactacctggtttttaaaaaaatagtcagtttatttccacatattttgactattttctacctgtcagaatgtcactatagacggcygaggaggggtatggaagacataccctttatgtgctcagacctcagagggcacaattaattcattgctattcttactttctgtattagatattactcctgttactgttattttttaattatagattttttccctagaaatatgtgttctatatgcaaaatgaagcataggyttttataatttgtatatgtttgtaaagtttgcatatgctttattttaaaccatttgcttatggtttgggtgaataggtttcctctgtttcatttcaccctttaagaatgaagaaaataattaccccaccctctttggaatagctgccatttgaaaatgggaaatgcttctattgtgatctacttatttatttatttttacttttggtattaagccaccaaacgacttagctcagaaaaaaaaattaagtgtctaaaaataaattttacaaattacagccctgagtttaccattctgttgtagtgtgtcattaagaactggctgcaaagtaccatgcagcagggtgaggagcagctaaaatctgggctattgtttggtcctttgaatagtgaatgtaattgttaaactatattttaagtggttgagccaagtttaaaacagtaaaatgtgtgtgtgtgtgtgtgtgtgtgtgtgtgtgtgtgtgtgatttcttcctaatattaaaggaaattcaagaaaatagaaaaattttwaaaacacttattctataggaaatatcaaatatccatatctcaaacctacgtttttaggtacatacatacaagtgctacactggagctattgtatcaataaaccaagaacttataaagttgcctttatatttcaaagtattttccaaacatttacattttcaaaaaatsctctaacagttctatatgttcagtgccatatgctcaacataataatataactgtagttaaactaatgataactaagtcacartaacatggatgactttgcaggctgctggagcagcaaggttttctttgcagaacaaagcttgaagctttgaagctcctctgayaaaagtgttgtgagcggggtagggagaagaggagcaggaggcagaagagggcttggtccattccaaggagattttagacctgagggaagtcacctgtcaatttctgaatgtcattggattatctgctataattcatgaatgtgggtttgaaaacycaacgttagtgactcccagaaaatgtcttttggagatgaaaggcaggggctggtcaaggctgacatcctagaaaatccctcatatcctggctgtggaattgaaaatagaggatttaacttactgtcattttcctttttatttattcatttgtttgmtattgtaacacttttaggttttgcttggtagacagagaatatctaaatagtattgatttttccacagttatatgaaggaaagaatggtccaattatctaaacgttgygaaacatattaaatttttttaacttaaagattttttctacttcattgtctgatctaaacmatagatggagaaactgtaatgctactctcatttacctgaggttcataagattttctcatacaaaaatccaattttcatccaagtaaataataaagctgactgtacaataaatcatatcataccagtgaagacatcaataggctctcccagctcttccaattctagtaaaaatmcttttttaatatatgaaaatgatckacaagaagcagaataattttagattaattttttcaggaaaaatggaaacattgacttttattataatggagtaaaattcaattttattgtaggaaattgtatgtcataattcagtctaactttgaggttaaaaatggtgtttaaccacctggaatatgaattgagggcagattataataactcagtacaataaaagagaatgaacatgactcatattgaattcagtagatgcttaaagtaacccactctgcacgcgtctggtttgaactgcagtcaaggtgagtgtggtgtgagcagctgtcatcttacccgggcgtccacctggagcctccttcttgcctcgttccagaacccatgtctccatgaataaagttagcatgtggccaactcactggattgaatgtagccatcagttaggaccaaggaagagacccgggatacttcagtgccttggggtaaattggggcagctgttctcctgccagaccatgttctgagtgctgggactagaggcttttccctacaattctgcttttaatcattcagtcttgacttggggataggagacaasaaggcctggctgaaaaaggtgaggccgttattctccttttcttgatgaatatgtttggagccaaaatacattatgaattcaaataattttctactaataaacatttttagtgaaaaatgttaccatttattaaacattccttctgaaataagatgaaatagtcaggcccatggtggttaaatttgytccygtgatctcttctactacctgtccagaggaaatgagctgggagagccacttacctcctcaytccctcggaggctgtggtcaggaggggcaggactgccaggaagcacagccagaagcyggtaggctgctgtgggcatcagtccagctgaatggcacccaggccccaggcacctcctcttgtccctggagtggaagagatgggggcttgggttctggagaccccgatcacttgtgttggaagctgctcccacccagaggcttggtcatgtgagagccttggctcactggggagagggtggggaaggcctcctggaggacaggggctgtgtttgtattttgctttgtgcccacatacctgtgtgttaggcttctattttaatttccagtggttttatttcgtggaacctttctagcgagcgtgaaaacctttctagcgagcataaaaaagtggacaagggtgtctgtcttagtcagctcaggatgctctaacagaataccttgtccctggagtggaagagaattcaggatagagtgggggcttgcaagcaacagacattgacttctcacggttctggaggctggaaggccaaggtcagtgggccagtctggttgggttcttggtgaggcccctccaggtgtgcagaaggccaccttctccttgtgtcctctcaggatgcgggcatctctcttcctctcttcatgaggcactaatctcatcacgaaggctccaccctcatgacctaatttcctcccagaggccccacctcataaagccatcaccttggggagtcgactttcaacacacgaattttgggaggacacgaacatttagtagatagcagtatatgtgactaagtgaacccactacatgaacatttttctacaaaagataccagacgcctgtacaaactaccagggaacccagattaggataccaatagaaagtagggttgagagttcatcctcattcaggttttgtatgttttctataaacagggaagctattacacttcatgtgaattatgtattctatatcagttttatattttatacctaattatgtgggtcaagttatttcaatttacaatatgacattttttccctctacattttgtgaaccaagcatctctaattcagacaatcacctatgggagagggagctttagagagaaatatccccaagactttcttcctttttttctgttagtctaaggagattaaaaaataaggaataaaattctgtaattatgttgaaaaggaaaccaaaaatcatttagaaccaactacctctattctgtctaattctattctgtctagttctgtgacatttggttgctggattcttattttttggaaataaaaacaagcctcccacagcccacagaagccagtgctgcagactcccagaggaggctccctggccaggaccatgatccagagagcagacatgtagctttgggcccttctcaggagccccatctcagccctgctgtgtgtttgactggtgatctttggaggtacatttagagtctctgggcctccgtcttctcatctgtacaatggaaataacaataacacttccttgctarggttgctgtggtgcttagacatgtcagcaggtcctgtaagctcagctccctgcctgtcatgtaataggcaagctgtgtgatctgcctttctcctcttctttatcacacacatgaggagggtacacattctcggttctggagaccgcggtgctctgagccacctgctcctgggtactggtgctggactaatgtgctctgggatgatcaccttttagttactaagtaggtgtctctgttacaggatttatttgctcagcagtgaaatctttatattgaagtggcttctcttatggatgactaaagattttgactcctgtccagtgaccctctctcatgaatgacgtaataattaggaagcaaagggatctactccaaagcaggcctgtgttgtcaaggacctgctgcccagatggtgagaggggccacctgggctcctgcagcagctgaggtacccagcgtgagggaaagggggttgctgtcagggtggagggagatgaataaacagtcctctgtggtctggtccactctccaaatagccacagttctggcctgttggctgagggcgtggggggctgttttgatcccctttctacccaagtaatgagagagaaatgccttaatacccttaaggaatctagttgtaactcaaagaggctcctactggaatctccagatgtcctagattttgttttgtcttaaaagcttgttaaaaaatgaaattgtaatttaaactcttttcacattttttgtaagaaataaaacataatgtccgccaaaccagaaaaaggtgtagtcagtatacctatccctgcacagaagatggtttgttcacctctgagagacaggaatttagaggtcataggtcaacctagttcacaggtgaaccgccacagcccagcaaatcctcaggctttcttagatggtcaggggagattgccagggttatctctcagtgactccatcatttgctccacatggctcactgtgtttgtgagattatgtacttatctttacaaaccgtcgttcaatttagacttatttcttaaaactggcatgtggaaagctgaggtgtgggtgggaattttgccttcctggggctgggtttggatccctaaagaaggaaacataattttctcctccatccttcatgagttcttagctgggactgcctgtaaccaaagacagattaataagagaaaacaaacagaagtttattgacacgtatgcctcctgtatacatgggcaataaaccagagaaatgaaagcagatctcaagggtagagttcaaagaaatatcttagactccaggctcaaatgccattgttctctgaaacaaagaacattgtagaggaaaaatccagttaaggtggcttgggaaagtgctgggaaaacgagaaacagatgcagaggtttgctctgcagacctctccactgatgagtctctagtgattaagatgatgaaaagtcctcctcctcttcctgctgcagagacggacacacccttactaatggtttttcttgatagaagtaaagttctctacaaaagatcactttgcagagcttcttctgagtctgcagttgctcaaaataatccttatatgagagagacatattttggggtagcatattctggtctcctagttatatatatttttggctggtgtgtcctgagccccatcagatccatggtacagacccagaacacttttctgtaaaccgtgtccggcgtacatggaagcatctcaggaggaagcctgcttatccctgtggagactctgatgtgctcagcgctacatgagtgaagtccctcagtctcccagggtctacttgcacagcactggagggagactgaagagcagagctgagcttctgagaaataagcatcaaatgctaaggtccccagcccactgaatggaccccctgacccactgttggctgagagaaaccttagaaactgagttcccggccatgacaggacaggaggtaggacacgcctcagtgtacccttcctcagtaacctttcaccagaattctctctaagcaggaagcagaaaccagctctggaaaacaagaaatgaacaacttatccctttatcgcccttagccagtcacctgaggccaggatcagactccgcctccctctttacagcctcagcgtgacagcccaccagtttcacaatacacctgttcctgattagagaccaccagccacagagtggctctgaccagcctagggaggatgcacagtgagggtttcttgtcctctgcttcaccgtttgacatcagagggccaaaaactctatcctcggatcatgcgaacactgccatttttttaacatgggtcccatgaagaggcatgaagcgcaattgcacgtgtgtttgttttatcaatattcgtgattcctccaatagcttattgaatatacgtatccatccccccactcagcagacattcctgctccctttacccctcccttggaggacttgctctgggcttgtgctggaggttatgcttcccagcctgcaggacggccacccgtatgaaataaagctctcctttccaaatggatcgaccttgcgattcttcagttgacactcatttgacgcactctgaatcattcagccatttcaaattgatttcataacctgtgcaaatgaagagaattcaagagaacatgaagcctagaatggctgtgagggtgagagcctccttcagacatatttatcacttctctggaagaggagatacagaatgggttatttaaatccagtgctgacccacgagcagagtttcaggacaccagtatgagtgaagacctagaacacagagggacttaaagaggtcagatatgtaagtatggattttaaaagaaacatgacccaattgttctggagtcatgcaaactagaacagatgggaaatcatccttcatgtttttccaagacttttgaaatgtgtccagtcctgggctgcaggatcaggatgctgagctgtgaagaggctgagctggacctcacgccagcagccggcagtcgccaacagccgggcagcaggaccttgacctgccccgagaggaacagaaaacagctccatgggttcaaaagacacacagggacagggataagttaggaaaggtgaccacggctacaagaagcaaatggtgtcacagartaagtgcaaagtaatgtattaaactggatgtgattttcaaaagagaagcaacagtgcatggtttcaaatcagcttaataagttacttcctgccagctgcacccacaacataaagctttgttagaatgtctggctgtgggaggcacctcttcccacccagcttgtgtccttgctcaytgggacttgggatgccacggcccattcaactgactttacagccaggcaggaagcaccaaatttatagggtctctatgaggattaagtggataatatgtgtctgtaaatttaattatatttacacctgttatgcttagactctgcatgccctcttgaacgctgtaatactgttattatgtctgggaagaaggaaagaaggagaaggtgagaagaagagttaatttagaccttgtttccattcagcgtttggaagctgaagcgtttagtcgttcatactggacctggtgtgatgggatcatcttgagattctgtgtctcgcagacagcagcggtggcagattcttgcttctttttttctttcatttctgtttcctatcagttatgtgataaatgagacgtcaggatgaggaatgtatgcttccctaggaagcagtcactgaacttacagttgtttgatgtgtttaagtggatacagttgggagagacagtgttgtctgaccgtgggccctaacgcccaccggccrgaggagcaaacttgcccagcagcctgcctygccccacgcccagcatccacggctgccttagctggagggagccgcgcgggggcgcagtgcgtcatcactgcagctatttcacattattagggaggccaccgcgggaggccctggaggatattgtggagttacatagatctggatgagaatcttattaaattatgtactgtgtccctccttctctattctgtaacaggaggaaaataagagggaaagggatggatgacagcccccaaatttctatacaaactttgcctaagttgtatagacatgtcttaggtctgtgtgtgacatgtaattgactaaataattattacttgttaattctgcatatattcccgttttctttcttgttgcaaaggagttggatattttcgaacttttcagtcacttaagagtttgttttctatgacaaggcaaagtaaagttccctagagttagcagtaacttacatgagtttaatttatctgaatttccaaagaacagccaacgttgctattgtgctgtactaacccagggttaggattgcttcagatgcttccacatatgtcacgattgttagtatcccaacaaacaaaataaacaaacagaaaccaaaatttggcatgcggaagtgtcaacctaaataacagagcgagtctctctaaaagaaaaggcatttatgtggaatgaagcattacaatgggaatacgcttgccatagtaaactaggtgtgtgttcagggaggaaaaggaggacaaagatttttaaaggaaaaaaatgaggaagattacatactgattttgcaataatcacttttggatacgaagatgaaggaaagggtgacaccagtccgaggtttacacaggcagttgcttggcagatgtccttgaagaagtatttttttgtctaaagctgcaatggcctttgtccaaggctatgttttgtatggagtctttttttgttatgaggcatacaagtgtgagaaccctctcttcgtggccttcccttgctctgtttgtcaaggttttctcaacattagtgattctattttgattctgacaatcacagaagaatattcgctaaatattgattctttcaaagaaagcataagctctttagtagtaaaagtctttataaagcttaggattatctttgcattttctagccttgtacctctgaacatgtatatacttttaaacacaaagatgtgcctgaatttgttaggctaattttaaatatttatttttctaatatgaaatttagagcattggtttaaataataaacatctattaagtgttcatgagatgcttcagaaattatgtatgttattgataaaaatttttcccaagttgtatcaagatgtatttaggtctaaaggatgaaaaattttcccatctgcttaaatatattggtttctgccatttttctaaaaatgtattctcagttatcctaaaaagtaaatgatagtcgacagccatttataaattcctctaatataagaattgtcattgccttaagctttcacagcagttatctaagatctcttcacattataaaccagtactaatttatatgcttggacctccagctaattgtattatgataaattaccatatccttattataatactagtaatgattggttatgcagcggatgttaaattcagtcatttagtactgatgctttaaaacatttatgaaaatgcctaattaattagtgtcatcaattacttagtaatttccctgaattttaaacttcagtatggcagcctagacaaacccactgggatctctcacttgctctattaaatgatcatcgtgactctctttctgaggccccctcaatgttgttaagatcattctataattttaaaaaatgaactagactcagctcattatcttgctatagtgaaagcagcaggtgtggtcctgagagcaaagggcagagttggggtacacacgtgagcgctcagaaccctggaggtgggagctagtccacagtgctggaggctaagaagaccagttagagaaggtaggagccttgcttgccgactcagtgaggcatcatatcgatttctgcaaatgacgactccatccaagttgttgattacatgatttggggaagttacatcacaattagttaatatgttataagtctcataccatttcattaaatgtgcataagaacaatgaaatgattttgctttcctttgaattaccaaaataaatcatttacaatatttattacatttttcctaatgttaaaatataacagggaattataacttaattttatccacaaagaacaacaaagcagctgtttaaatgcattaataggagtctaagcttagatactggatacttttcagatagaaccctgactttaacattttttcgtttagatctgatcaataacttttcacagagacttaagtgtattttctattattatgataaaataatgtgtgaaatgcaggtttcaacacttaactgaacgtgatcagttgataccattgtgtgtccccaggatcatgatgtttgtttttaattcatttattttagaccctgaatcttcttctcaaataaaatttcacatttcatatggaatcctgataaaaatggaaatgttcttactgaagttgaaacaagataaagccctaccatctccatcaacccatgcctcccttcctgccaccctcaacaacctcttagataattccagattatctcaagcatccataggaaaggttgtgacaataagtgttttaacacacagtaaaaatgattggattagatcttcctgaagaggcaactatgaattatgtcttctaaagtcttttcaaggtcaacagattttcacatactatatggtacccgaggtcacaacaggtcattggtcatgaggtgtttgtgtcagtgtgagtgtgagggaatgggaaacctgtatctctccatggagtaaaagttagtggcagcattattttctttgtttcctcctgtattcttacctttttaattgaccaagtttagacattgggcaacagtttctagaactgttatacaaaccagtaaaggacttacagcagcaatggccttatttccatccttattttgggtaaaagagtgtgactcctttctaggaagtatgctatttgtgtggtggtgaatgtcacacttcctggagcaacaggttttcagcacacgctcacatttagcatgcaaaccaggcattcagygacaggactgtgttgtcattaagactgtttggatgctgcatctaaaaattcactttccatttaaatgtttctctttcatgcactatttaatttctgacacacatcagccgctrttctagtgcatagttagtagtccacaaacatcctataattaaattgaacatctgtcttttccaaggtgaataattcaggtgagccagatttcttctcacgctatgtctctttcactgtcatatgacattattgactttgtgttcttttagtttttctcataaaaggttcacttttgacaagagttaaaactagattcaatattactgtatgtgaattctgtatataagttaagaattgaatttgacaaatagtaacagagactgaatatcagtggcttaaccatacaagtggttattcttccagaggatgttcagctgatatgacagcttcattaaaaccactggaacccaggtttctccctcagagctctgctgtgtcccgaattgcttccatcctccagcacgagatgcctggtttgcctggcccaactgctgcaccagcatttcaaacagcaggaatgaggaagggtgtgagaatgactcacagaaatgctatacagtaagcaatctttttagcaacagctcagatgtgtggctgcaccaagctgcagaggtggctgggagattctgttctctaagctggacatgttttataagagttcccttataaggattcaggggttaatgagaggcaaccaggtgtctctaccatgctgtgacattagtttagttgctctgggcacagaatagttatttttaaaatctttgagtatatgtgattaagacaggttgtctctaaccaaattattaattaactagggacaatccagtgaggtcttgcctgagtggtccctaatttacatagaaattaaaagttactcatattactttgatatttttaaaaaatgagcttgacatctcatttcctctgaaagaattcattgctaatacttcccaatcagracaaagttacttctagaatccaatgtatttatcaaacccatgctcaatttacgttctattcagttgaaactgagagtaggtatgtgttaagtcttgatttgacagagtaggatgaagaatagtgcagttcgggccagcatttgctaaagagtggagaaagagtctcaacagaagaatgcataggtgacaaatatttaatttggggtaatttgctgtttgttaactatgagattattctaaacacttaaaatagagccatttcttcatgtctctcagagagattggcacataaatattggttgggttataaatattaattgaaagaatcaatgaatgaattgaagctcttaggacatatttaatttatttgtgactatgttcggatttttcctcaacatccattagtaagagacagtgcagctgcataaatccaaggtggggtgtatggtcagagtcaccatagatgattacgacccgtagcgttttgatctctgataggagttacagacttcagtagccaatcaggtcaacttcacaaatatcttctgcctctagtgataaagaacactcataatacaacccccttcttataatcactagaaaaataaaatgctaggtaagaggcagggtgtgtgttttccatgtagatgcaagaaggaagacactctaatgttaccatcgtgaacgctgtgaaaataacacccgaaagaaaacaagcaaatgttatgtttgattgggaacttgctgtatcaaggggtcagccaatctcacttgcatttggcagagactcaaatgtaggcaggggatggggaagaaagaaggcatatcttcaggcacacctgaacacatcatgcttcaggtataccctgcttgcaggggacgctggaggcaaacggaagagggcattcccgtgggattggttagggggcatatttggcttcctggggttgttcttaaattggaagcaaatgcaaaaatgatggaagctggcagttattgaccaagttgagaatattttgggctgactgtttgcagagtttgtggttttgcctcctgggctggttgctgcaaacgttgttgctcagagttctgtctttctatatggtttggccattgtctatttgcatattcattttgttaataccaaktcaacatcagttaatactaataaggtttaaagggccttaaaatgcatcttcttaaaatgcatggcagaaaattttaagaaaaaggaccccaatcatggtttttccagtaaatggaagtttttttcaactttacgcactcagtgtttatttgttgtttctacttgtttatttgttttggctttgcttaatctgaaattgatccatggggttaaggaaagtagaaaagcatttaaaatatttactaagtatagggtgtgcaaatactggttcctggtcactgtggaaagatttagagggagtagaagacatcatctcttagcctgcttggagatgaagagcatatggatgtgaagacatttaagaggtaaggttgaaaatatagcttctcctatccaccaaccatcttttttaagcatcatgaggctaggctgtgtaccagggcttggaaaatgaaaatgaaagagaggtgctcactgagctgtgggagttgtggtttacatatggaatgaaatatgttaacaggtctattaaccgcccacagagtcagcaccatagcaaggtatgggcgaggatgggcagagggcagaggtcccaggagacttactgcaaagaaggggtaaaaaggcaacagagccttgcctggtgagcatgctgggagcatctcccccaggaggtgctgaggttcaggacatcttcagaaccacacagcgcttagctaacagagaacatatcatgccccatcatgtaacatggcttcaacctagataggtctgttgcgtttactgcatttgatgcttgtttaacttgctgcacatgtgtattgaatatctgcagtatttttgaattacaatatcatttgaataaaaatcccttttaaataaatatttaaatcttagctgggcattgtggttgtggcgtgttcctgtagtcccagctactcaggaggctgaggtgggaggatcgcttgagcccaggagtttgaggctacagtgagctgtgattgtgccactgccctccagtctggcacctgagtgagaccctgtctcaaaattaattaaattaaattaaaatatttacataaaattatttccttaatttttttcttttaaaggagggttatttttctttttaaattatttgttttgaaaattaaaatttcatttttaaaatttagcaacagtgtgtatggggtggtcatggctggtgtaggtttttaaaaatttccacgggctccttgctcctgaagaagtgagtgaaagtttgtgggggtttctgccttctgcagacatctcacgggtcgtgtggatgaggtgatagygctggaccctcctccttagtcctgtgggatgtcatacagggatgcattgctttgactgatggagcccagtcccacagaggagaactgccctcctctgctgcggtgtgggagaaggggaggtgaggcatagccaggccttggaaggtgacgattctgggcaggtagcaggtgccaggcagagtgagtgactgaaaaagctggtgaaacaacccagccgtttggaaacaccagatttttcaaggggcctgctttctcacttacaaaagacctcatagggcagtgtgsatttgatgaaataagactgataaaagttgtaacatgaatgtctagtacttaattaattttagataaatggtatgagttatatgagagcaaatatattgagttgttgaaattattgagaatcatttagctaaaaattagattttgctaaaatctgtcttcaaaaatcagccaaaatatgtgttggatattgtgttagtctgttttgcactgctattaaggaatacctgagactggataatgtataaagaaaataggctgggcatggtggctcacacctgtaatcccagcactttgggaggctgaggcaggtgaattacaacgtcaggagttcgaaaccagcctggccaacatggtgaaaccctgtctctactaaaaccacaaaaaattagctgggcatggtggctggtgcctgtaatcccagctactcgggaggctgaggcaggagaatcgcttgaacctgggaggcggaggttgcagtgcactccagcctgggtgacagtgcgagactccatctcaaaaacaaaaacagaaacaaaaaggaaaacaggtttatttggctcacggttctgtaggttgtacaagggcgacaccagcatctgcttctggtcaggacctcaggaagcacttaatcttggtagaggtgaagggggagcagatgaatctcatggcaagaaagggagcaagagagacgccatgctcttttaaacagccagctgccaygtggactcatcactgccaggcactcatgagggatctgccccacgacccaaacacctcccgccaggcctcgtctccaacactgcggatcatatttcaacatgagatttggaggaggcagatatccaaaccatattcgatctccaggaacctgatgacatgtggatgcagtctctttctctctttctttttaaaataaaataaatatataaatgtaaatatatttaggaaacttttaatcccaagacaatatggtatattctttacatggaggaaacaagttggactagaagggagaatgttgctgaatcatgtggtctttttatgaataattactttctacatatatacttattccatttccaaatggaagcaatgtgcaaagataaatagataggtctagtataaggtggttttcattctctaaaggttacgtatcattttgttacgaatgtataagacataacataaaacattatctacaaaacttttcttttaaggaaartacccagaaaacctttcttagcttaaatttttttttatgttggctttaagtaatatcaaatttgggcaaatgttataattaagggataactctggctcctaacactaggatttctaatctagcatcagtagttgccttgaattaaaataaccacagacctatttggataaatattgtggttatcatgatctgattatyaagcagtaacttgcgaggacctgccatggaagaaaatttctcctgtttgtataaatattgaaaggcagcaccataacaaaaacagtgtgacctgaatggaagaacacgttaagtagcgttgtgatttgcaaatgtttcttgtgcttgatgattgcgtgtgttgcaygtgtgttcatatttgaataaatgtacacatgtacatactcctatctttttatttttataaacagggttcctctctttcacccaggctgaaktgcagtggcacaatctgggtgcaagcaattctcctttctcagcttcccgagtaactgggactgcaggtgtgcaccaccatgctgagctaatttttaaatttgtatgtagagatggtatctcactatgttccccaggctggtctcaaactcctggcctcaagcagtcctcccactttggcctcccaaagtgctgagattataggcatgagccaccctgccttgcccactcatctttaaaaccccctcatagagactcttctccttgtgagtccttgcccctctaaccctcgggcttagtgctcctgccactctcttccagccccagctctgcaaagcccctctcaggtggccttgcttgaccacattttctctcctggtgcctccaagaacagtcatctgtttcctagacctgacctggtgtggctgcagccacactgtcctctgtaacatttctagatgccatctgatgcagaacacccctgaatggcatgcttattctgagagatcttctcaaaattctaccccaactctaccaggaaaggaaaggctgtgtattttaagagatagaaaggagccctcactgctgtaacatggtgtattagtccgttttcacgctgctggtaaagacgtactggagactaggcaaattaaaaaagaaagaggtttattggaattacggtctcacatggctggggaggcctcacaatcatggcagagggtgaaaggcacatttcacatggtggcagcaagagagagaatgagagcaaagtaaaacaagattccccttatcaaaccatcagatctcatgagacttattcactaccatgagaacagtatgggggaaactgcccccatgattcaattatctcccrctgggtccctttcacaacacatgggaattatgggagccacaattgaagatgagatttgggtggggacacagagccaaaccataacgcatgactacacataagtagatgtccaataccagacatgcagagagaaggtagagacaggagtgactccactgtcactgtctgtgtttctacttatttttcctcccattaactctacagaacacttcttcagataattggccaaggagtttccacctccttattttctaactcttattgtggctgtgtggtcctctggactggtggcctgtcttgcctgcagtttctttcacacgtggaagtgctgctctagattctgttttaatctcactgctttcaaaaggacctcgcgccctcctaggagcaggtgccctggaaggggcttctctgataaccccattttggtagatccctgttcctagggctcacagccacttgtttgtttccagtgtggctgatgggtccacagggctgtctgcctctgttgacctctggcctcccactagtcctgtggctacatggtcagagctgagtataccatgtacaatgattggattacttattactcagccactggtataaaaaggccaggcaaagaactacagtaaaattccaggacacagcacacgcatctcagacacaaaatataagtattttccaacatcccatattggcagaagttaaatgctctgtcagcctgtgtacctgccctgtactgcccacagaggtctagcatgtgggtcttgtcaccttcttggtactaagaatgccttaaaatattcaaatcagtgatctgtaaagttttcatgatcccagcaatgacctaaaaatggaagagttttargtgagaaggaaaacacacacacacacacacacacacacacacacagasasasagagagagagagagagagagagagagaaagagacagagagaagctgctgtggctcttgaagagggcaggggctgtggaagctgtcacctggggctgtaccatgaacgggggattcttttaacgcgaagccatcggcgactggccccggaggctgaggaccccgagacaggccctgccctgggcggatgtcaagcaagggagacccactgtttgccccgaggagaaaggacacagagtttagtcaaatggtcggaataactagcgacaatgcatacaaaggaatattcaacacgcgacctgggtgatgtgggctgttgaagtgactggactcaggtgatgcggctgcgggaggtggtgagcgatgctggaagctgcgtcccggccacccagatacsctgggagtgcgtggcgctccggggaggctgctcctccgcgtggccaggaacaggccaaggaccaaaaccagatgacagctggcatgaaaccgcggggctgggcacatcccctgttcctcacatgcatcccagaagcccccagatttcctccgcaatcccggctgcgtgcccttccaggtcgggggcccccacctcacctgggccttgcagagcagcatgacccctgagtcccaaatgagaccatctctgttttatcaatgacagataaagtaccttcttaaattttcagagtactgtcgcagccagatgggcagctgcccccggttacgacatctgcttcataaggttctgtgctcaccactggatgcactgtagcttttcttgttttcttggcccctggttgaattaagtaggacctgctgtgccctgagcccctcaacagtgtgacagagtgtgagttcagccatgcagaagggatgagtgagtaaatgtattaaagagagaatgtgatttaaaaagatatcaccttatgaaaatcattccaattccttcaacccaagctgcaaaaccttttaccagacaccgtgggggaggaatggcaaaaagaaatcaatgatacttcacttagctacatccagaaggaagtttcttcataattcaattaggtgcattaagataattacattatcataatgtgtggaggtggagtgggttgggtgtgcaggggcaggaaagagctggcagcctcagttcagggcagcctggagaaggcactgaagtctatggggtggggctgagtcagcacgcacaggtgggaggggaatgtcagcattgcgtctgtgtgtcctccatcctcctgtctgttcttttccctcctctccaaagccccctcaccagcccccaccaggtgctctgtcgcctctgctggactggccagccacgtgtgagttcaggaactgtgatgcctgtgcacctgccacactcccctcaccgaaacccctagaggagcaccatcagctcctcccttgaaagctcctccctgctacctggagagtaagctctgatcacctccagacccatgctgtccagcgccacatgctagtcacaggaggctgcttacatttaatcaagttaaaggtaaataaagtcaagcattcacttcctcagcagcactggctgcattccaagtgctaaccagtcatgtgttttatgtgcacatttctagccttgcaggaagcgctgcttttttttgaaaaggagtctccctctgttgtccaggctggagtggtgcgatcttggctcactgcaacctctgcctcctgggctcaagcgattctcctgcctcagcctccctagtagctgagattatagtcgtgtgccaccatgcccagctaatttttgtatttctagtagagacggggtttcaccatgttggccaggctagtcccgaactcctgacctcaagtgatccgcccaccttggcctcccaragtgctgggatcacaggcgtgagccaccgcgactagcctcaggaagcactactttagacagtgcccgtgacaagagttaaatatctcacacattttcttagtcaattaagtcggaggtgggaagagtgcagaggctgaggccaccagggtggcaaggagaggacgtggacggcagctgctcctcctgggcagcacccgctgggtgcagcgcttctctgtgttgttccttcctccctgtcttgccttcaggaggcccagggagaactggatcttcagccacactttacaaactgctcgccatcacagtgcagtccacacttgcaggtcgcagagaacacaccactgattttcccacgctgatagctctgacgtgaatcgactgccacgcctgctgcctggctcattctattatccgtggactagtgactgggaaggtcaaccttgttgttctgattctgcttggctgttttcgaaagttcccctaagagagaatgtctttcctcggcccagatttcctctgctgtgaggtcttgaacttagttcctgcctctcttgtcctcagcggtgcctgtttcatttcagcttctgcttccagatccttccttcacaacagatcccaagcaacagacacctgatttccaaggtgatggtcagccagggttttcccagacaggttggaagaagggaaacactccttcagatatcttctgctcagagacgcaaagggagcccaggaaacttggacagtgtagaatacatggagagtccaatctcccttggacacacgtatttgcatttttgttttatttcattggccattttatttacaaagtgtattcttcatacatataagtagtaccattttgacttgaaatctacagatgaattacagtgcattttaaagaaatcctaatcaaatattaaatattatgtagtgcaccctaagttcatttgaatgggcttttcttcacaatgcaagcatttgggtgaggttttggtttattttcttctaaaaaaagtaactgtgtagcctttatgtctacacagtgcacaagtagagttggttctgtagggggaaatgcaggttcacctgagggcacgcagggttcagatggaaaacaaarccaggacagagggggctggaggctttctctgctgggtcctaccccctstctctgcctctgccgcctctgatagcccgggcctgcgtccttgccacagtcagatgtggctcctcagcatagctgtgcagtaagagccctgtgagcctgcggggacttacctgctgggccctgggggctgaaatgatgcatgcagattcagtgcagatgtgcccgctggaaaaagatggccctgaggggatctgtcattatttgttaaaatgagacttgacatctccctcaccctccctagtgcctgactcagctttttgtgaaatcgggggacacgagggtgattgtttgtgaaatcgggggacataaggatgatgcctgagagacggggggtggccgtgggctggcctggcctcctcaccagccctccttctcaccgatgtgtccctctgtgtccatgatgccctgtccgaggagttgcagtcagaactggcccccggtgtctggctcccgaggtcctcccctgctcccagaccccaggctgggcagtccttctgtgtcagcactacctccccatctctaagcaggacgtcctgtatgtgggtggctgtgtggatgccatgccaggagccacacaatgtcctgtgaaggttcaaggctcagcatagaggagaccagattgtccaggtcggtcagaacatgatgcatccgccccaccccagccaggggatactagcgccgtctgttaaacccgctggtcctctgaggaatttctacagcttccttaaacctcaggtttctgaattacagcagaaattgaagacatctgtggggcctcctggggccgacttcccttttggctgggaatttgacttagtgagagagggcacctcccacctgcaggtctgaccccaggcagaatattgtatctggaagagatttctgagataattcaacctcatcatcttatggataaagaaactcaggatccaaaaggtccgtgtctggaggattttgttataaataattgcacagcacactgtctagtgatttaaaattctaaactgtaatccatttgttagtctccaacaccggctttgttgtaatctggccatgtgtcttcaagggctgtgacagcttacttgaggtccatttgctttgaccaaaaaagagccttggccccgacaccagcccaggtctcagatggttttgaggtcactgctccgggctgcgccttgcacgtttagacaccacgccgaatcgatrctgcctatggcaggctcacagaacgaacacggaacagttctgggtgtcactcatgtagtcaccgggctgctggacccactgctggagtgtgtgtctgtctctcaggaagggactccctaagaaggcaccgcaaaggctggacgcatcaaatcataggcccatctttttcacatgggagggtttgggtgtttagggaatggattgactcatgcaagaatggccagagcagctccacaccccagccctgggatgctgggaggggcctgaggctggattgcagggtcatggtggctgccacccctttcctgtcccctctccttctgccttagcgtggaggctgcttgctcttccctccccaagctgtccactcagctggcccatttgtctccttatggctttgagaatctgactgccacaggagaactccccacctggggaaattcacctgagggtttcctgtccctgggagtattgatgccttctactgtaagttatgaaatgcattttaaaggcaagagcctccctctggcttaagcatcctctgggaagctggacacaggggcagagcggctgcatcaggctctgagagttcaggcgcccacagccctttcccattccgcaggagcttccctcgatggaaaaggcagaattctcttcttgatctccctggcaagtcgggggctcaggccttcatctgccactgtgccagccgggttgtcttttgcaatataatggaatgggaaggaataatttccattttaccatgagctgagttttggttcctttattttcagcttctcgcagtagctcaatttcacattaaggagaggaatgaatgactggctggtgatattttaaatttcctggtttaaatagagtcatcctcagaggttatgtcgctttccaattgacatttcttccccataacgaaagaagtgacctgatctcatgcttgaaattaattgtccaaattactgactataataaccttgctttgaagagtctctgagtttctttggagaacttgtttttctgtagtttttggattcttcaaatagctgcagaaacccagccctggaatgcactggcgacaatgcaggtccctggccttcagcggctccacacactaacaggcgcccctggagatatgccaggtggggatgcaggctggggaggaaagaaccaggctgcgaggtttccagagggagggaggcagggccagggagaggccagggactctcgagaaggcgcaggggagagatgccgtcagatggagcatgtcacacaggagggttctcgcctgttcttctgagtacgctactgtgttgtttagttaagggagttgcattttctagtttgtatggatcttctctgtggttgcttgtcttagtcttttgggctgcagtaacaacatactacaaatggggtatcttatacacaacagaaactcatctctcacagttttggaagcagggaagtgcaagatcaaggtgctggcagattcagtgcgtgatgagggcccacctcctggtttataggtggccgttttctcactctaacctcacatggtggaaaggacaaggccgctctcaggggcctctttcataagagtgcagatcccatttgtgagagctcccaaaggcccttccttcttctaaaataatcactttgggagatagatttcaatgtatgaatttgggggggacacaaacacccaggtcatagcactgctctgtggaaatagagcacagttgggtaggcacaaagtcagggagcagggagacaaatagttagagctttattgagagagagagagacagacacagacagacagacagacatggaatgagaggtgaggtgcctggggtgctctgagacagaattgggaggtgcamccacagccggccctgataccccctgcaccagatgcctcccacggccactctgggctctgatccctctgctcaggcctttgcagtttgtccaggcccagcccctgcaaagatcctggctctacatagactccttcctgctcccagggctgcctgacagcggctgcctcctgtgggcttcactgttgatgccaagcaggcaacaagttgcactcctccccacagggctcatcctcaggcaaacctggggtggcgggagcaggagcctgtggatccacccttctgcctcttaccccctgggctggattcctcctcgagaatgtcctgtgaaatcaagagtcccaagctccaaacaccaagggtggtacagtcagtgccgtgggatgattctctaacagactttcctggcaggtagaacccttgccacgtgccaattctataggacccagaccatggcagtgatcagagttgttaggattctcagatcttgtttcactcttagtttactcagggacaaaacggaactaaataggtgtttgggtgctgcctgttctcacagttaccattctgtttcagaccattccttttaccgatatcttttcaaatggcagcttgtattccattttcatctttcctttttttttggaaatgtattgatgatctgtcctcactcttttaaatcctggtacttattcagctccaggaagcaccttatgtattttatcacatgcatcctcccagaccttggaaatgctgatttctgaacttcagctcacaggagcaggggatgatacatctgctgagggcagagccaggctggtagccaggtctgctgccttcagggtgggcaggttctggggatgcacagcacctttcttccaaattggctttgaagatgccaaagctccctagaaacgggaagagcatgtgtttagtgactttttacccattgttagtgagtgtggaaggcagaataatgaccctctctctccaccaaagatgttcacttcttaattcccagaacctgtgtctatgttattttacatggcaaaagagattttgcaaatgtgattgagttatggattttgggatggggaggttatactggattcttcacgtgggcccaatccaatcaccagggtctttgtaagagggaggcaagagggtcagagtagatgtgacctagaaagaaaggacagaggggccgggtgtggtggctcatgcctgtaatcccagcactttgggaggccgaggcgggcggatcaggaggtcaggagatcaagaccatcctggctaacatggtgaaacccgtctctactaaaaatacaaaaaattagccgggtgcgatggagggcgcctgtaggcccagctacttgggaggctgaggcaggagaatggcgtgaacccgggaggcagtgcttgcagtgagccgagatggcgccactgcactccagcctgggcgacagagcaagactccgtctcaaaaaaaaaaaaaaagaaaacaaacccaaattttaggctcttatgttaagggtagggggggcggggagaagagaagggggctgggatcaagatatgaccgatgacctcagacatttcggggtgccagcaaggttctgaggagggtgggaactcctttgtccttggtcaggacagtctttgcttctataaatcattaacaaaacgtggtcagttgtttacatacgtcttctttaaccccaggttagttttaaaaaccacatgattgctggttttgcctgttacctcagtgctctaagattatcctatcctatgcacaggaatgggtaaagaccccttaaacaaaaatggagtgagttatgttagttcttttgctgttccactgctacactttgaagggcccttaggtccatgtcatattgtgaatactgctgcaaagcacgggactgcagacgtctcctggacatactgatgtcatttctttggacagatacccagcagtgggattgctggatcatttggcagttcaatttttgattttgtgaggaacctccatgctgtttttttctaatggctatactaatttacattcccatcaacaatgcactagggttccctttttaccacatccttgccaagaattatcttttgtcattttgatcataatcattctaactgtgaagtgatgcctcgttgtggttttaatttgcatttcttcgatgattagtggtatggatcattttttaataaacctgttggccattttttttttgagaggtgtctctttaggtcctttgtcctttttaaaatcagtttattttcttgctattgaattgggttccttgtatgtttagggtattaatcccttatcgaatgtacaatttgcaaatattttcccacattctataggttgtctctttgttgattgtatcctttagttgggtgcagtctcatttttctggttttgcctttattgtctgtgcttttgggatcattttcaaaaaaatcactgcccagaccaatgtcatggagctttttccctgttttctcctagaagttctatagtttcaggttttacattgaagtctttaagatatttckgagttgattttcatttatagtataagggtccatctagttttattctttgcatggggatatttagttttcccagcaccatttattgaagaagctgtacctaccatttccagttctggaaaactgagaggattttgtaattttaaaaaattttagacacatggttttgctctgttgcccaggctggggtgcagtggcatgatcgtagctcactgcagggctccagcctcagcctcccaagtagctgggactatgtgcatgcaccaccacacgtggctattttttttttttttaactttttatagagatgaggtcctgctatgttcctcagacttgtcttgaactcctgggctccagtgatcctcccacctctgcctctcaaagtgttatagacgtgagccttgtgcccagcgtgaggtctttcttattttagttaataaagttataaggcttcatagttcaaaagggaaaatgctatttatatttaaagaacaatcaagtgatttgtggattccccacagcttccttggaaacgccctgctgtccttgctaatgggtaatgacgggctgaggggtggccatggcctcacgagggcattgtaagggaaaattgcaatttctgagggcagcctaagtggggaggtgacctcaggcacccatggttagtgggtgcaaacaggattaggcatataaagctataccttattaccttatttcagtatcatggtaattttaatgcccaacataaacaatagtaatgaaagcatgatattttaaaaagtgcctgcaccattcacctctgtctctcctccccctctagtttccaggttcaccttgttcgcagcctgagaaatggctcctctgtaactcctggttctgagtgacccatgcagcatgcgggaccattttccagagtctctgcaccctctgcatagctgagtgtgagccgtggggcacacactgcaccctcctggccttctcgggttacactgccagcctgatgcttcctttggcttgctctgagaccaaagcaaaagaagactcttttgcttagcactttctttgcccttttatttctagttgacatgtaattactgtacatatttacaggatacagagtgatattcccatacatgcatacagtatgcaatgatcgaatcagggtaattagcatatccaccacctcaaatatttatcatatctttgtagtaggaacattcacaatcctctcttccagctttttgaaaatgtacagtaagttatagttaaccgtattcaccctacagtgctgcggaacactggaactcattcctcttatctggccatagttttgtatccaatagccaacctcttctctccgcagcctcctccaacacgccttcccagcctctaatactcagtttacatcctacttctgtgagctcacatttccttttagcctccacatttacatgaaaacatgtggtatttatctgagcctgacattttgcttaacataatgaactccagactcatccatgttgctgcaaatgatagggttttattcttttttatggctgaatggtattccatgtatacaccacattttctttattcgtctgtttggtcacttaagttgattctgtcttgactattgtgaatagtgctgcagtaaccatggggctgcagtatctctttgatgtactgatttcccttcctttggttaaaggaagtagtggcattgctgggtcatgtggtgactactcagcctatcaggaggctttagcttcctgacatctgccactcactcccctgccagtttggaggtgcagctttgtgccattgggctccgtccttctctgtcttggggatgtcctttggtagggtgagcagagcggaggctttctgcagagcctccttgtttctacttattgtagtcaggacatagctttacaggctctcctgttgtctcaaagccttgagaatgtgtctacttgagatgcaaagaaatcattatttccttacttttactaattccagggcagcaaggtcctactctcttagagttcccagctcctccacacccttccattggtagtaagagttaagttgagaagagctcttggccttctgggggttaacttgtcagtaagtctcttcacttagcagatagagagggaaggtgcatattcatccctctttccaccatcctttccattgaatgaggtattaaatggcacttcatttacaatggagacaagatattatgtgaaatatcttggaaggtggaaggcaggtggagtagggaatccacatatggggaagatcaaacgccaaattcaatggctagaaaaacagaaatttgtaccacaacacctgtctgtgaaattttgcgaccccagggatcaaattcagctgtgaatggaaagagaattagatagattgagaatcttcctcagtgacactggatgttgyaagacaaagggcctgggaagatgtgttgaaacttctccagaaaaataatgttgtgtcctaatttccatcctcgggactcctgtctatcatgtgttgtcytagtctgcccgggctgctataactaagtaccacagacagtggggcttaaacaatggaaatgtattttctccattctggaggctgggaatccaggatcaakgtgtgggcagggctggtttcccctgaggcctctctccttggcttgcagatgctgcttgctgtgtcctcacatggccttttcttactcaggcagtccccatctattttttcgaatgaggacatcagtcctgttggattagggcccactcttactacctcatttaaccttaatcaccttgttaaaggctctatctctaaacacagtcacatgggggcataggacttcagcgtatgaattttaggggacaaaattcagtctataacatggtgcacggtaaaataaagacacctgtaaacagtaggtctttatctgcgagttctgcattccaaggattcaaccaatcgtaaataaaaaatatttaaattgtgctggaggatgtgcataggttagaygcaaacaccatgccattttatctcagggacttgagcatctgtagattttggtgtctgtggggtcctggaacccatccaccacatatactgagggatgattgtatgttcaaggactcagacagttggcctccttccagcaaaatggcatgataaatcaaatgtcaagaaagacactggatccaggaaacaggaaggccaacataggggcctgatgaaggggccccaggtgttgctgggtggcaggctggagaacctgtcctaatgagctgatgtggtcgggagcaggagtgaggctctgggaagaggcaggtgtgcactgagaggtatgacacggggcagcacaggacagaaagaggaaatcacggggaaacgcacaggatgcatggaaatacaaggacacaatggtattctacagtagtattctacctgttttgtgggtttaaaaaagtatacattgtatagtcacaatcatgataattatttattgattttcaactttaaaaacaaatacgcaaactttaattatgtttataaatgacagaaattaggatctgaggaatgggaggaaaggatggaagcaaaggtcagcttattctattgcactaggaatcaaggtgtctctagaagaagaaaatggttggaggtagattatttaaagttacaaaggtaaccaatataactaatagtcttatatccatattgggaggactggtttgatgtattggagtctaaaattgataaatcaagatgtattttaatgagaaggtattacctagagatctgcagttaactgtcaggactggaaagagtggaaagaatgaatctctccccagtccccccagtgccactgtctctgctcaagatggagggattcgggttggtgagatgggcaggggtgctgttaatccccatcacacacccttacgtactacagtattcatatatatacatatatatatgtatatatatatttttaatatatgtgtatgtaattgaatatgaaggtgtgtaattaaatatgtaaaatatttttaaaacatatgaaatatatttgatattcatcaaactgacatttttgttgacaaagacttatgagtaaaaactatccctttcctttcttcttcatataaaccttccctggcgtatttccatctgtgggagcaacttcttaccttgcaagattattgaaaagtttatttcaacccaaacaaaggatgcttttacattgttacacttctattagaataaaaatgcctccactctctatatttatatctgagagtttaggccaataataatgtttcttctgttattttccctgtaagcctctgggttccattttggctgcatcttatgtatgcccaaaacctcttcactaaatggttttactctttatggtttctttctccctctcttccaacgaatccccaaggaaagattccatcatgccttccagccagccatgctctctcaaattctttcccttctagacttccttcattagagcagaagtcaatgataaacatcctgcatctgggcatccttgctaaggcgatggcaggagaccatgtgtccctgaaggagaaggaaaggtcacgtgcaccaggcaaggggagctgagtgcctcggtctttaatgggccctcccgcgcatttgcgtctgtttgctgttttgaggtctaagctggaggtagtctgtggactcttctacccagtaatcctgggtgtctttaaacaagatccctctccacattgctgatggtaagagtgctatgtccaaagcaagaatgcaacaggatgtgtagagctcatcaccactgagggccttagtgattcctttctccatctctacttcccttcttcagtgaacagtttcttctcaggacccagttctgcagcgtcagaggttgatacctgggtcacctttctcattgccgcccctaccccatctgagtattgaggaagctcacacatttccgtcacatgtttgtcattcttactcatttgaagtgggacgatgtccttacctggtgtagatattgtcttcgactattggagaactttgtagggaagcgtatgtagaatcagaaaacaattacatgacttagaagaaatctattgaattaaggttctttttaaaatttgcaaatgattttgagaaaatggagtccacgtaattatatgccttgtctctgtttctttattctgcttagtgccactttccrcacaaaataaatacatttttttaaatcagcaaataattttgagataacagagagtgcactaacttatatgtttcctctttctttcttcaccatgcctagtgctattttctgcaagagagaaacacatattttctccactgattactatattgatttggcacaggtgagagctactggttttgaatcaaccggactctcattcccattgtagcccaggataaatattaaataaattccactttggaaagggaaccatcaaaacccacttaggtcaatgccaggggctgtcacagataatgcagaacgctagtgccgcatcagcagtcatgacaaggtgacagtgaccgtaaacttctcggaaagaaatcgatgagaaatttaccactagggcttatacggagaaacaaaggtgatttaaatttagcacagaaatgtggcgttacagccagaatcttgttttccagagtttagtgatccattgatctcaacccctgtggtcagtcatctgtaaactgttaagtcctgagaaaattaacctgcaatatgtaatgctgttttctgctgaagtcaccaggtcctaatttcctctagctgttccttctatgacagaaacgactgatactaggatatttccccacattaagaggtttgaacttgtcaaacactttctcaaacaagcagatgagacctgtgattagccattttaggagcagatrggagcgtccgatgcacagatggaacccaaaatatttaaaacctttgttttctttccatctatctgtgggaaaatttttaaacttcaatttataaaccccaaatgctatgcctgactcatctctgcaaagttaatggtattcarttatgatttcttacacacatatttgtgaattctttttatgtgtggggtcatrctgcaggctgagacagtgcatatggtcccatgtttagacaaccaccggacggactgtcgcttaataaattgcagtggtaaaacgcctgtagtccccgctgctccggaggctgaggcaggagaatggcgtgaacctgggaggcggagcttgtagtgagccgagatcgcgccactgcactccagcctgggcgaaagagcgagactctgtcaaaaaaaaaaagaaaaagaaaaaaaagtgctggaaaagagaagcacaggatgctttgagaacatataccggggagacgtgccagatatagtaggggatgggaagggccgctcccttgagctgagagactgttgggcaagggaggggcacagaggagagggcaggattcaaatcagaagtaacagcagagggaggatctagaagccagaagaaacagacagcggcctctggagaaactggagaaatggttagagagtgtgagattagcccaaatactaaacataaaataaaagtaccatatcccttagcatccatccttttcaaaaaataaaaataaaaaaaaatcaaactctaaaaatccacctaaccaaattagtcctaaaaacccaattaccctaaactaaatgcttccccactgccttattaaaaatcaaaactgcccctcaaaaatattagtttatccccttataaaatactatatgaactgccttatttacattgtactactaatgtccctacatttaaaaccaaacatcagttcctcaaaacctatagtctactttcttttctcttaaaacaaagtatcctaacacaaacactacccctaaagctcccagcacatcaacaccaacctaaaaatcacatcctcgtcaaaaaatttataaaaaaccctcaaaccagcttaaaaaaaaaaaaaaccttatgaatactcctaactactaaaactacaatccaaacaacaacaaaaaagtaaactcaccacacctaagtcaaaaaaccaccaccatcaccttcaaaattataagccattattccaaagtcaagccctaccaaattaaaacaaaaaaatcttaattcttaattcttttataccttttatatcgtctctccctctttcctcactctattactaattcactattaatataactgaatctaactcaccccaaaccattattcttaatacttatcttttataccttataaaaatttaaaaaaacaaaaacaaccaacttcttcaaataaatatctctaccctattcctctaatttctacaattaaccctagttctcaccattataatcatctacaaccaaaacaccgttcctttactcccacagcctaacaaccttataataattaaaactacatcctttaaaccaccccataccaaagttaaacctctacaaaaaagtttacatcaatctaaagcccctcctccattttaccaaaaaacccactctccctaattgccaatctcaccaatacaaacctatccttatttctattactacctctacctccgctgaccctaagcctgcccccagtcacttctatagtataaaagccaatgtcagttgaaaatgaaacgcaaaaacaagtcatattaaaaataaaaacttctactctcctttgttctaaatactctcataacaaccagccgtacaaaaaacacccgtctatgcaaaaataaatttattttaataaaaatcctttatctaaatactcatttttccttaaaactctaagccttatttctaacagacagcaaagggtgggtacctgagatacagcaatagagacaggtggaagacracccaggttccctgggcttcacatcggagcgaagggaagcgccgaaagcattaggcagggagttacatgaacagacacaggtcttcaaggaccatgctggtcccaactaggaaayatgatttgagygagcacttccattccagctaccagtcctttatcaagtatggacgttgcaaatactttctctcagtctgcagcttgccttttcattctctcagctgtgtcttttaaaagcagaagttttcaattttgatgaagtccagtttatcaattgttttcttttcatggatcatgcttttggtgttttatctaaaaactcatcaccaaatgcaaggtcaagaagattttctcctggtttttttttttttttgagagtgaccttcgctcttgttgcttaggctggagtgcaatggcaggatctcggctcacygcaacatccacctcccaggttcaagcaattctcctgcctcagcctctcaagtagctgggattacaggcatgtgccaccatgcctggctaattttatatttttagaagagatgagttttctccatgttggtcaggctggtcttgaactgccgacctcaggtgatctgcccgcctcagcctcccaaagtgctgggattacaggcgtgagccatcacacctggacctgattttttttttctggaagttttrgttttcaattttacatttacatcaatcattcattttgagataatatttgtatgcaatatgaagtatggattggaattctttttttttctgcttatggatatcccatctttcagtactttrtgctgaagattatcttctgcattggtttttacctttgtcaaaaaattggttttatggactttgttctgttccatygatcaatctgtttgtctttatcacactgtctggattactgtagctttctaataaaccttgaaatcagattttgatcctgcacatttgttcttctctttcaaagttactttgactgttttaggtgctttgcattcctacaaaaattttagaaatagcctgtcaatttctaaaaaatgtcctgctgggattttgattaggaatgcatcaaatctatcatttgggagaattagctctcaatattgagtcttctgacatacaaacacagtctattcctccatttattccagtcttttaaaatttctcccagtaatgctatgtggtttcaatgtacatatgttttacatcttctgccagatttatgctcatgtattttacatttttgatggtattgtaaatggtatttttttatttgaacttctaattgtttgtggctagtatatagacatacaatttatttttgtatattgatattgtatcctgaaactttgctaatacctttctttatagtttgcataagtaattatatcatctatgaataactacacttgtacttcttcctgcccaatctatatgtcttctatttctttattttttcatgtgttattacattggctagaaccttcaatataaaagtttaacagatggagagcagatatccttayattgttcctgatcttagggggaaaacatctagtcttttactttttttttttttttttttgagacagagttttgctcttgtcgcccaggctggagtgcaatggcgcgatcttggcccgctgcaacctcctcctcctgggttcaagcaattctcttgcctcagcctcccaagtagctgagattacaggcatgccccaccatgcctggctaatttttgtatttttagtagtgacagggtttcaccatgttggccaggctggtcatgaactgccaacctcagatgatctgcctgcctcagcctcccaaagtgttgggattacaggcatgagccactgcacctggccatcttttacctttagagtatcatgttagctcaaggatttttttttttttctttgagactgtgtcttgctctcttgcccaggctggagtgcagtggtgcaatcatagttcactgcagtctcaacttcccaggctcaagcaatcctcccacatcagcctcccargcagctgagactacagaggccaccaagtccagctaatcttaagaattttttgtaaagaggggttctcactatattgcccaagctgagctcaaggaatttatagatgccatttatctgattaaggaagttctcttctatttctagyttactgagagttttttttaacacaaaaatagatgaattttgacaaattatttttctgcatctattgatatgattatatgctttccttttttagtttattaatatgattacttaaattattgcagtgaattacattaattgatgagcagatcctaggccaaccttacattcctgcattaaacctcacttgatcatgatgcatcttcctttttatgtgttgttggattcaatatactatttttaaaaaaattgcttctatccccagtgaggtatattgctctgtagttttcttttcttgcaatgtcattttctgrttttgatatcagggtaatcctggcctcatataatgagttgggatgtagtccctcctttgtagttttctggaaggtgtgtagasagtaggttttattttttactgatattgttagtacattcactagtgaagtcatcttgacatggagtttttttatgggaagaatttttactgaaatttcaattttaacatagatataaagatactcagattatctatttcttcagtgcaatttggccatktgtgttttwtaaggaatatgtccatgtcacttcagataccaatttattgtcataaagttctttaaaatatcctcttattctcctcttaatawaagtagaatctatggtaatgtcacctcttctggtttttgatacaactaatttgtcttctctttttcctgctcagtctggatatagatttgtcaattttattaatctcaaataaccagcttttagttcarttgattttctcaatyttttttatttcattaatttttactctgatttttatatttcctttcttctattttttggaggcagatgtggtatcaatttgcttttctttttccagtttcttaaggtgaaagctgaggtgattgatttaaggtctatctttaatattgcctttagtgcaatatattttctactagttctggtttagatacattctgcatgttttgctatgttgtatttttcaaattcatttcaaatattttatctctgtgcagttctgtcttctaacactctgtcttgcaaactctacccaacttggccttcccatactctcagcttcatttcttcacctcaaggagtcctcttggcttccccctgggtgttcctttctcacactaagacccagaaactcttctaagccagttagctgggacaatcataggggtcacctcctttgattttcatttctcagggattactgaacctcgtacactgttgcccagggtctgtcttgcaaatctcttgtttcatttatcttgttcattttttgtagttatttcaggcaggagggtatatctaatccttmttccttcatcttggccagaagcatgaatcacatccttcacttctgccagtgtccagcaggcatgcctctcagctggactactgcatcgcctctccactgccccctaaccaatctgtcatcctcctgccaggtcagttggcctcacccagaactcctcagtggtatccgtgatttcagtgtaatatctacacaactttaatttgtaaccaatacttttttaaaagtttctattggtctactttatcctgtacctcccttaggccccctggacctgcccaccaccacctgattcactaatttcaagtgacatgttgttcttattaccctgtgctttctgtgtgtgctgttcttttcctagcatggcctctaattccaggttttcccagaaagttcctatcctaatttcaagcatcagctcaaagttgtatcctctaaccatcacttccccacaytgtgttctcgctcttgtgtttgcactgcattttctacatatctccctcccagcaagtttcatattttaaatgaattttcacacatctrtgtgactacaagactctaaagcccttgaaagcaaaccacagcatttatatttcatcttttgtgtctcaggccctgcgtagtcctgacattaataggtgacatgagtacatttatgggctaaaacataagtcagcttgaaatcggcctgaggatcatgtatcaaaaggcatcactgggtcagcaggagtggtgatgggcagccgaatgatctttcattgttaattttcatatatatatatccatatctgtctatctatctacatgtctgttacaaatatatatgcctatattaagttttaagaatcttgggaaatattttactaatataaactaatattaactataatattcactaatattagctatgttattgaaacattgaaatttgaatacttctgctatgtcctcttatagagaagtgattccctttctacccaaaattcaaagaaattcaagtccattgcaaaagggaagtcaggaatagataatgagtgttctagatagaatccaaaatagcagggtgtagagtaatataaaaatggtgacaataataatacaactcttagaaaaakgaatcaagtttttctccattaatattatgaatgatgtgtgtttgggcttaggatctagaaatgtctctgttgcaggagagaaaagccatgaagaggaggtgtgtagatgtctgataaytgatttttgtgtgtgtgccttatgtctttaaaatacgaacgttggtgttggtgtggagcttgaccgtgccagtttgtttagtagagtccctcaacagctggtcatgtggccctgtttgttcgactcagaaatcatagccagacagatggagaggaaaagttctattgaaagatagtaagtgaagtaagccctgcacagaaatattaatactgcctgatgtcactcatatgtggagtctgtacaagttgatttcacagaagttgagagaagaatcgtggttatcagaggctagggagggcagggagaaattggagaggttgttccacgggtacaaagttacagttagaaggaataagttctggtgttctgtgacccagtggggtgactacagcaaataacaatggagtgcgtatttcaagagtgttagagatgtaactctaagagttatcaccaaaaagaaatggctaaagtgatagatatggtcacgatcctgatttgattattatacagcttatacgtgcactgaaagatcacccttacctcataaatrtgtaacattatttcatgtcaatcataaatgaaaatgtaatttttaaaaaggtgatgcaccatgattcactatccaggaccaaacattataaggggaatggattaactcaggccattctttgggggaatgggtggccaggaagaaacagtagaggaaattcaacggatgaattcaaggtcctgggtggtgaggattgttatttgttgtgattttacaataactttaaggactgagatatggaagcctgagcagagaggtgaagcgctaaccctacaggagtttagctctctgtccctctgtcctcccatgccaggaggtcctgcagacaacaaggagtacccgagaggacaagggagaaaggctgttccacaagtgagtgctccctgcacttgccctgcacgctgaaagggcttgtcccgacatcctgacccattctccagccctgcgacagacctttgaggtgtgtgtggctcttccaccagaactgcctccgcgggtgcctctcgctgccacccgcactctgtcctcctcgtgctcactgctttccacgggtcttacgcagggagctgcgcaagctggtatgccaggtgctgcagatgaatgaggcctagaccacgccctcggagctcaggccatgccctcagagcaacaggccacgccccggagcccccaggccacgccctttaggagatctccccagaagctggggtgaggggtacagaagaggatggctgctgggtatgcaacctagtcagtcagtcagtcacaaacatggcaggaaaataagctgtctgtaagtacctactcttacagcctcccctgggaaccgtgtgggagcaggtgtgtggtggctggcacagcgccagagggacctcctgcaccaagagccaatgcaccttagatcaggagagaggagagcggtcagggacgcataggcaggtgatggggaggtctggaggaagctttgctgttaaaacttgtcttttccatcatgctaactactgttgaggttcacatctaacttaaactggggtggcttaattgcataagtatcccctgggagcttgtgcattctggggccctgggtggttctagttaaccagtttccccagaggtgactattccgcttccctctgactctccttgaggggagtctcaggccccgcctggtgcacaggcagtttgttcagtggcactcacaagagggaagtggggagcagctgctggcatgggccagatacagtcaggtgtcagatgccctgggcagggtttccatccagactgtcctcagaggctagtggatttcttccctctttcttatactgtattcattccccgtgggtaactaggtgtttccttgacaaaaggagttttagctattctcacaagggtgagctttaaggttcatggaagttgcatctgtgctgaggtggcctcgtctcttgggcacccagagtatttaggttccactgtcacaaagactcagtcatcactgggccagggttggaacccccagacggggttgtgtcatattgctaagtgacatacagtttgggctctgtgagatacctgagtgggctttatgttgtcattgatcttagagccatggtatgtctgtaacagtatagtacagtggtattttcaaagacctctgcaaagaggtgtctatgactgcacctactctaagytgttccaaagagtgtttttgtatttttttgaaagtctgactgctaagtcagggctgaatcatccacaccaagacaagagttaaagactaattagagtggctacagcccacagtgcaccattccagccacctctgaagggagcagaacactggtgggggtgtgctttgctctcattcagaaagaagagtgcttcaaaaaggcattgcttgttttatttttttccttcaagaaagtaacagaaaaaaaccctggctgctcagagattcaaaatagaatcaggacaagtagacattatgagttttaataatgagctaatagaaaagtgttttcactaaaatattttaccattgaaacatataccctacaacaggcattgaaagattctgtcatataaagggtcatagagtaaatatttggtctgttgccgccactcatccctgcacttgtgcaaaagcaaccatcgactacacataaacaaatgaatgtggctctgttccaataaaactttatttaccaaaataggtggtgggctagatttggccatagtttgttgactcttattctacaatgataaaaaaaaatacaaggagtaaaaatgatagagaaatgtgtcctctaagcccaaagtagaattgtctcgggattctatctgatacatgaaagatgctgcattttttggagtaactgtatacagtttatttcaatcatgtgtctaatacatttttcttttggattataaattttgtcaataaggttcaggctacagcaaagaaactgaacagtcaagggcttaaaaaacatagaagtttatttttattatttcatgtaatggccctgctttgagccatcaggtcagtggagtgactctgctcttgtaaatcagaaatccaggtttctaacttgttttgatccatcactaccaagacattaacatgttctgcatggttgaaaccaggtcgagtctgtcttcagtaggtagcaagaacaaagggagcacagaagaggaagctgatggctcaaggcgcagaagtcgtatgagctattctcagtccactggcaagaaatggttagtcttatgctgtgttgcatgggagataaggaagtacagtcacctgaacataagacaggtaacaggattatctgcctagtcagctgctgtatatcagtgcctggtgcagtgcctggttcatagtatcagtataatacacatttgaatgactgaaacattttcccgagtataatcctaatcacatttcccagactttcttatctggtatatctattatctattgttgcataatacattgcacccaaacttagcttaaaacaacaaatgggatcttgccatgtctggggttcaggaattcatgagtagcctagctaggtggttctagctcatggattctgaagaggttatagtcaagctcctttctaaaggttcagctgaaggaggatctcctcccaagcttgcgcatgtggttgttggtgtgagacctcagctccttaccgtgtggatccttccataggctgcctgagcttcctgacaacatgrcggtcatgatgctctggagaaagagacataagcattccaggaggacacagccttcacttatgtattgtataggatcaaggacagagtagtgactggaagtgacaatccatgtgccattgcatggtccgactgcttgtcctgctgctgagctacccaaagactgtggtatttgcttttctgtcttagtttgtttagtgttgctgtaacacgacacctgaggctgggtaatttataaagaaaagaggcttgttgagcttccacaggctgagaagttcgagggtatggtcctggcttttggcaggagcttttgtgtcttgtcataacatggcagggaaggtcaaaggggaagtggacaggtacaaagaggcaccaaatccaagggctgtcctgctttgcaacaacccactctctcaagaaccagaccagcctcaccacagcaagaactcactcactaccatgagaactgtaccaagcccagtggcccaaacacctcctatgggccccacctttccataccaccacactggggatcaaatttcaacacgagttttggtggagaccaacaaaccatatccaaaccatagcaaccctcaagactcacccactcctccatggagcacttctaccctcatctgatttaccatccttcctacttatataacacagacattatacatgcatagtgctttgcttacttttaatgcccaaacaattattatatcatcctacctaaaatgacactgcaatgagtcatgacaagtaatagcattttcattaaaaaataaattagtcttaaggcaccaccttatgagagatttttttaatttaaatattgtgcattttccaccagttcttaagttagtaaagtgtttttggtagacataaagaccaacgccatagaaatgccgagagtttctaaactgaagtctagtgagggcaagaggatagaattagagctgcaataacctgaacttggagccacagcgtgctgcctgagcatagtgaatttgcttaaccatgacctctaggatttaagcaacaataaaatgtaaggattttacccatgatgaggggcattaatgaactcagccatgcatgtgacagtctcaaatgttaagtagatttgcagtctatgcattttaaaagtccccaggttgtcaagtaaccttgagcttttggtgaatacctaagtatcattgtttaaaatttcgtggttctttctatatgtacctgctatccctttgaattatatatgtagttttatcccattctggcagggggtaagaccagctttcatatagcaaatactttaaatattgtaaaataacaatatttttagtatcttaaacattttgttgagatagagcttttaaactggtcctactcagtcaggacctatgggaattgaatggagaaaatggtgtttaatgagcagtgtccaggaaagttcatccccctcttgggatatacgtgtctcagactgcatcagccagatcagccagttcagttcccccaaagactggactgaatttctgatggttcccagtgctcatcactcttcctctgtctgttttggcatrggagaaaatgtatcttcttgttaagaacagacaaatgatcagttgtcctcagtgtgtggccaggtttcgcattccttttcctatgacaaaaggaaactaatcatttaaattaaaatcaccaagagaaatgtaaacattagcccctgatttctgtgactgcaggtccgatggggaggcttatggcattatttaatggtgagagcaaatgacaatgagcacaaggaggtgggagaaagtagggggctctgagattggagtggcagagagatcctgttgggcaataatgaccttctgcaggtttctgttgactgcacatcagtctctgcatctgcaaaaaatatgcatgatcctgcaggaccacaggacttgtgggaacaaataagaacccgcaaatgagaacgagcaraggctgttcattcagagttgctttagtaagggagatcagccaccatcccttgcatttggcagagacttaagagcaggcagggtgggaaggctctgtggtagaagggaaggctttgggtaggccttcccttgaggaagctggcacaggctaacaaaaagccaggcattctttgtgatggatttggggaacatatttggctttttcaggttggttctgagttggaaatgacagcacaaattagggaagcttcagttattgacagatcccgaatatgctgtgccaatggtgcaaatgtggtggtttagtttcccaggctgtttgctgcagaggtttcccaggctgttggctgcagaactcagagttctgtggtctggccattgtccgttgtctgttctttcagactagaatatttcatggattaaatgagatgctgccaagcacccagaacagcacttcatgcacagtaaagcttcagtgtactgtatgataattttaaattattaagaaataaataaggctgggccgagttactaagagagttgggaatgggaatgattagcttttttttttaaggaattttgttttatagttcactaatcataaaggaacaagagtggcgtggtgcaggtctgtgttgccttcttgctcatagcatctcaaaacaggaaatgcctggtccacacaatgcattaaagggtaaggaaaacatttggacaaagcaaagtcgaagcaggctccaaatttggattgtgagacacgtattttatgtagcttgtgtagctatcattccatgccattgggatcacatgttttatgagggtagtacaaacacttctattctatatcacttcttcccagctaaaatagaaacaggagtttgattgattggctatctgggagaagtttgtggtttgtttagatgaaagtaaaggaagaaaaaaatcagaacttggtaactaataagatgctcaagaagggaaagccagagtgagatagaggtctgcagccaggggctgacatccttgcctgtggcagggaaggaggagagaatctgctgggaaggttggtgatgagggcaggtccatgtataggctggcaacagagagacatcttgcaaacaacttcattttattttcctgatgraatccagaaaggcagttctttgagaaaggggcaaataaaatgaacattacagaagaggatttctatgagcggtcatgcaaaaagtgtgacagatggtcacctgctgttttccagccttctctcccttatccactttgttcattgtttacctgctccctaataactatgtaacattgcagggtatagacatttgagtacaaactagtttatattgtttaattatgaagacagagcttgtaattagttaccttaaattctttgatgacttctgagaatcaatgatgcctaactggaggagattgatagccataattagtggaatcagtataaaaatattcccagacgttcattgttccaggacataaaactcataattatataatgagctattgataaactgacattggtgacattggtgactgcaatggattcagcctttttctctactttttctccttattctctgcttcacaacagtacctataaagattacaaaagactttgaccttaattctaactactgtaattctgaataactgcaattaaatctgctactgttcaacaataaaaaaggaagaaatttagaggccattaaascattatcttttatttctttaactttaaatttttatattattatagtttaagaggaatttgaaaaaatagtactgaaaggtctaggtactatttaccccacttccctcagggaccacatctatcataataactatagtaacaatagccaaaccagaacactggcattggcacaattcacaaacctcattcagatttcaccagctttatacacacgcatctgtgtgtgtctgtatatagctcgatgcatttttttttttttgaaacgtagtctcactgtgttgcccaggctggagtaaagtggcatgatctccactcactgcaacctccccatcccgggttcaaacgattcttctgccttagcctcctgagtagctgggactacaggcatgcaccaccatgcccggctaatttttgtatttttagtagagacgaggtttcgccatattgaccaggctggtctcaaactcctgaccttgtgatccgcccgcctcggcctccccaaatgctgaaattacaggcgtgagccactgcgcctggcctcggtgcatttttactatatgtctggtgcctgtaaccaccactacagaggagacacagaactgtcttgtcaccacaaggatctcaggaagaatatgttcttgtctgttcctttacagccacacccatgccaccccccatccctaatcccggacaccactaatgtgtgctccaagagtgggttttgaattgaattgtatattaggtattgctctgagattgcctttcctcactcagcataattcccttgacatctctccaacttatgtgtatcaatagtttgttcctttttaatcctgaagagtattgcctggtatgcatgcccaacagtttgtttaaccactcactcctttaaggccattggtgttattttggatattgtgattatgagaaagctgctgtgtataggtttttgtatgggcataagttttcatttctctgacataaaagccaagagtgtaatttctgtgtaatatggtaagcgtatgttgagttttgtatgtttgcttttgttttgttttgttttgttttttgcagtaactaccaagctgtttcccagagtggctggatcattttacattcccagtagcaatgcaggagaaatctgagttctgtgcctcctctccagcctgtgctgttacgttctgtttcctttctaagtttatggctttaatttgcctttccggaactaaggttaatgaagttgtatgcttatttgccatcagtatctcctcttttgtgaaatgtcagttagtttcttctgctcattttctaagtgaattgtttttgtatagttgggttttgagagttccttatatattctagatatgtggtctttgtcaactattttctcttagtttgtagactgtcttttcttcctcttaacagggttttggagagcaaagattttaaattttgaagtcctgatttattgatttttttccttttatgcattgtgttttggatttcatgtagaatagctcttcaccttgctaaacatcttgaagattttctcttaggttttcttctcaaagtttcatagttttacattttgcttttaagtccatgatcaattttgaattaatttttgtgtaaagtatgagacttagttttaggttcatttttttccctatggatatccaagtgctccagcaccataaattgaaaagattctctttcttcaaacgaattgcttttgcacttttgctgaaagtcaggtggttatcctttcatgggtctatttctggattctctactctgttttattgatcgatgtttctcttcttctgctagtaccacacggtcttgattactgtagttgtatgtataartcttatagtcaggtaaagtaataaactactacttattcttctctttaaaaaatttttttagctactctgatttctttgcctttctatatraatttagaatacatttttatagctatgggatttgggtagatattatattaaactaacaggttagcgttatgattagagcagtgacatctgaaatattgaatcttccaatccatgaaaaaaggatgtctttctgtttatatctttgatttttaaaattcgtgttttttactttcagcatatagatcctatatagattttgacatttttaaagctatatatttcatattttacagtgattggaaactgtaacaggtttgttatttatattgcattcctgaaatgaaattcctttggtagaactagtgattttttttaattagttcatttttttcccctactgatttttttccattacttctttctttctaatttcattgatttctgctgtgatttttatattttctttggaaaaattttgctattcttttttcttaaggtaggagcttagattattgatatgtttttctttcctcttttaaaaaatgtttttatttttaaataaaatgaatacaaaagtttaaaatgttttaaaaacwattttaaaatttaagcctatagcacctggtgtttccaggcagtctcctattcaagtgctgaccagaccaggccctgcttagcttctgagatcagactagattggaaatgttcagggtggtatggccatagaatcttgttttttagtgtgaacattttgtgctacactgttccctctcagcactgagttagctgcatctcacacagtttgatatgttttttatgttttatatttattttcattcagttgaatgtattttattttctttgacttctactttgacccataagttatttagaagtatgttttataatttccaaatgttagcaaactttcttgtaatctttctgtaattacatttcagtttgaatctgttaggatcagaaaacaaactgtatggtttcaattcttttaaatttgttgaggtttgttttagtgtctaggatacggtttatgtgggtaaatgtttgatgactgcaagaaaataatatcttttgttggtgatggtaaattctacaaatgccaatttaagcccattcattaaatatattgtctaacccttttatattctcactcatkttttgactaatttttctgtcaaagttgagagaggggtgttaaagcctccaactataacagtggatgtgtctatttctcttttcagttttatcagtttttgtttcatatatttgaatctgtgctgtttatgtatataccttaagattgctgtgtcttctggatagtttgactattttattcttaggtaatgttccyctctgaccttggtaattctctttgctctgaaatctactttatcttatgcttttctgttgattaatgcttgcatgatatatccttatcatccttttactttcaccctacctatattattaaatttcatggagtttcttgtagacatcatgcttttaaatgcattctaccaatatcttgtatttggtgtattcagatcattatatttaatgtagctatgtatgtgctaagccttccctctgctattttatcacttgtttttttctttttcccacctttgcctgtttttccagattaaaaataaatagacttcatcttttcaggacaattttagatatacagaaaaattgaaaggatagcatctctctgttttttatttgtttcattttcctgtggttaatttttttttttttacagttacactttgatttacctatagtttttagggggtatatctttttgtatagttttttaaatggtttctctgggtgatacatgatacatatacaacttttcaaaatctgttggtactttgtatttttcggacactgtacttttcctactttgatttaaatatagaaatattactttaattaggataaatttgaatttattcctttcttttataatatgtttgtcttaaatatatcctctacatacatagggtaatacagcagacaatattataatttttaataaatatattttttaaaaaactgaagaggaaataataatctattatatttacccatattttcactctttctactgttcttaatttttgtgttctaaattttttacttttattattccctttctgtttgataaattttattaagctggcaagaaattttctcactattccttcatttgcaaatgttttgttttgaccttcattcctaaagacattatttgctgtgcacagaattctgggtatgggcatttatcttctgttagcattggaaatgctataccttttccttctggccttcgtgtttctgatgagaaacctgttatcatccaaatcattgctccccatgagtgtttgtttctcttcagctgctttcaatattctcccttggttttggttttcagaagcttgattttaatgtgtcttggtatggattactttggggttagcctgtttggggtttgctcagcttctttaactgtaggttaatgtctgttgcctaaattcggaagtttaattgagtaactttctgttttattttctttcttctctcctttcttgactctaatgatgtgaatgtcatatcttttgtcacagaggccacaagtccccgaggccctgctcttcttatttccccagtatctttcctctgtcgttaacattgggtaatttctcttgctctagcttcagtttactgattgcttcctctctcgcatccattcttctattaagcccatttagtaaggttttaaagtagtagttactgtctttttcagttctaacatttccatttggttctactttgtatcataggtttttttgtgtatgcgatttttcattttttcatttgtgtccatagagttcttaactgctcactggagcaattaaatatttcctctacatacatgctttataattcttgtcagatcattctaatgtcttgtcatctggttgttggcttctgttgattatgtttttccattcaagttgagatagcatgagttagcatctacctggtttggtagcatgagtgattttcaattttatcctgagtattatgcgatgaaactggatcttctacctcatcagtcctctgctaaaatcgtgctaggtggacacccccccagcctcactggccccaggtagggaggggcattcctaacagaaggtggtggagacggttcaggctacccttggctccctctgacacctgagaaagtcctgctattctcaagtatgtagatgatctatcttaagtatatagatgacactccactgcaagggagcagggtgctttgttgtgctgagttacagtggaaattcaggctgcgcattcacccccaacccacgtcatcctcttggcaaggtggagggcttttcctactgctggatggagctccaagtccaagattcccacttggtctctgccagcaccatgaaggggttggggcactttgtcactgccaagcatttgttgatggtgttggggtggggcatgaattttcttctggtattttgatggagtaggatgtctactagaaaaagttgtctatcttggccgggcacggtggctcatgcctgtaatcccagcactttgggaggccgaggcgggtggatcacctgaggtcaggagttcaagaccagcctggccaacatggtgaaacgccatctctactataaatacaaaaattagccaggcttgatggtgtgtgcttgtaatcccagctatctgggaggctgaggcaggagaatcacttgaacccgggaggccgcagttgcagtgggcagagatggcacacagttgcactctagcccaggcaacagagcaagactccgtcaaaaaataaaggtggtctatcttggtaggctattttttcccattcctttggtgggagatcagtcttcgctcagggactgtattgtctgtgcccaggagcatctccagtttacaggcttccccagcactctgaggcatatgaggcataaaggaaattcaggagactcacagccatgttggtttttgagtccttggatctctagcccatctgctttcttcttcttacctttcagggtcgtctttcacaaattatgagtgtaatatccagagttttagctatacttcataggggatataaaaatagataagtctatttcatcttctccagaattaaaagttctcagtctcttttctaagagaggaaaactcagagacttagatgtagagacttagactttcttctttgcccaaagaactcacctcatctgtaacctggggtgcaaggggggaggcagagtacaggctctgtaaccaaggactgagagagaggaaaactcagagatgtagaattagaagtagagacttatattagacttcaactgagaattaaaagtttgtggcctgataaaataaatgacaaactaagcagtacaggtattctcttcctttctattaacaactggggcttattataaaaggtaagttactttatttgatgttacgaatcacagaaaaaatatttagaagccaatttaggatgtgcttcattgggaattaaatttgtttgtaaaagtctaagacttaattttaaaaattccccaaatatttgccaagtgacccttgatatcagtggcatgaaaaaatagaaacaggatttgatagataagaaaaataaaagtatcatctatatacgtaagaataccacgacattttctgtgtgtaacctacatttctgtgtctcacacactctctctctcacacacactgtccacagaaccagaggaaatggcatcttcaccccttttttattgttgaaagagcctggaaactagcaagagttcaagaccaagagaaagctgtgggcacttggataagtctaaaaatcctcagagtccagataagcaagatttgacaagagtttccatggagacagaacataacttattactggcctataaactagataatttgaccagcgatctgcagacaggactgttgcttctttcctcaactttgctccaggccataatgatgaaagcaaaaacacttgtatctgtgtttctaacagctttgaggagagaggctgctcaagagagaaatcaacctatggaaattatatacatattttctttcctcttttggaggtgagaaacaggaaagaaacttgttgaaagcagagattagatctagctagagatgaatcccaggcttttagtctaatgcctgtattatttccttaaatttgttctgagggtttcttttactttggatataataaagagtgtttccactggagcctaagaactatgggtcgtagttgccttggagattttgtgatgggtgtatctcagagcagatcaacctgctccttcctacccagctcagctggtgtagtttccagaattttagactgaagtttttctataatatgttttgtataatgtggtagctgcagtttgcatcttccctagataaatttgctgagctttcaggtgtgtgtktgtgtgtgtgtgtgtgtgtgtgtgtgtgtgtgtgtgtgttttcttctttgcccaaaaaagtcaccttatctgtaatcttgggtccaagggggaggtagaggaccagctctctgcccaaggaccgagagagaggaaaagtcattcaactcccctgaacctcattgttccaccagaaaaatggaattacaatgtccccacaaaaattttgtcagaatttagtgaacattttttaagtatctgaaattgtatatcatgtttgaattatcatagacattcaataaaagttataacaaatagaaaaataaatatagtagttattactgagtgggtaatataaaacatcaagtgatgtagaagagatgtcaagtctgttagcataagctgttaatattaggatgacagaggcactgccattagacactgagctattccagcttttttcatggtcctgtttctgactacagaatctttatcttcttgagtaaaattaaggcctatggtggggaaatggatcccattgtctctgacatccacaaggcagactggctcacactgggcaggaagtgaactgtgtcagcagacctccaccttacttctgctcaagtagcagttccttcgtctctgttgctgctctcgacatatgatgaccaatgagagtgcatctcactcacctctctatcaatgacacagtgcttggcccatcgtaggatcttcgtaaatatttgatgaattaattaggttgggatcttacttagaaataatccattaaaaactaagtaatcatggggatcgatcacagaacatgaaattaatcttatactttatacaccaggcaaaagtgcaaatgaaatgagctgtgcattcaactttcattcactcatcaagcattttctgaattcttccatggaaatgaactgatatgtacggatatgtactgatacgtatggagcatcaaccctttacatgcagggcactgtttgacttgctttaggatttacaaagttaaatgaggtagccacttctctccagcataaagcaggtgatgatggttcagtttggaaggtcctggaatctgggccattttctttttccacggctgactcctttgtctcttccactttccacttggaaagcttcaaacagtttcatcttcttccttcaaggagtgatacagggacttcttgagactgtgacttgggatagggatacagacaaaggaagtcggtcaaatgtggagagaaagcaacaatggaagagaagggaatggtagcgaaaggagagtagtgttagaattaaatcttcccaataattagagaaatcaaatataaacaaacttacatagaaatggtacaatttgtatttatagtgtttgggaaaatggacaagaagcatcaataattcagtctagagagctcaagtgcttttagaaaagaagttttgaattactactaataaatataaaatctcacatcaagtagtagaaatataaggagtaccttggtgaagaacagaaacatgttataattctgatgagtggaccaattacctatggcagggagagcccctcctttttagacgtgtccctgcaagtcttagttccacgcctgctctgggctgccctactctctccctccagatccttccacagtgtcggtctagaactgggcgtgtaataggcgactgaagtgatccgtggctccatgatataaagctccatggcactgtatgctgcggttgttaagtggagtgttctagaaataacatttaaatcttgttggttgatggttttgtccagttattccataccttcatttttctacttagtagttctatccttttcgaaaatgaggtgttgaagcccccagttaccattgtgaatgtgcctatgtatccttcagcacattttctgtgtatattttgcacccctgttgcttacataaaatgtacatgggaagaattattattcagaaaatattaaaaagtcctttaaatcacctaaggaaacaaaatgacagaacatcagaaaaatgggccaaaggtatggaccagggatttggagaagagttaaactgaatcaaaaagaaaaaagaaacccattactaaacagtgatccagtattcagagattaatggtgaaataataattgatttattagattgcaaatcctaaaaatctgacaataccaaatattgggtgaggatatgcaaaaataggaactcgtatatcttcctgaaagaaatgaaaattggcaaattactttggagcataatgtgatatacttctataccttataattataccattttaactaaatatttcattgtgaatgagtcttaatgtttactatgaatgaaggaaggtttttcttgagctattgaggatctctgacagcctttctcctttataatttctgatgttgagttaacctgaactcttggaataatatctattcattcaagatgatttgctgtgtctttttttttttttttttttgagatggagtctcgctctgttgcccaggctggagtgcagtggcgcgatctcggctcactgcaagctccgcctcctgggttcataccattctccggcctcagtctcccaagtagctgggactacaggcacccaccaccacacctggataattttttatatttttagtagagacaggtttcactgtattagccaggatggtcttgatctcctgacctcgtgatctgcctgcctcggcctcccaaagtgctgggattacaggtgtgagccaccgtgcctggccaatttgttgtgtcttatacactgttagttttgataaaagtattttatttaggaattttgcctttttatctgtggaagacagaataatgggcccccagacatgtctacttctcaatctctggaaacwgtgaatatgttacatcagtggtcttcatggttttcatcttttttggcaccaggaacccattttgtggaagacagtttttccacagaccagggggcaagggatggtttcaggatgattcaagcacattacattcattgtgtactttatttctattattgttatattgtaatatataatgaaataattatacaactcaccataatgtagaatcagtgggagccctgagtttgtttccctgcaactagatggtcccatctggaggtgatgggagacagtgacagattatcagtcattagattttcataaggagtgtgcaacctagatcccttgcacatgcagttcacaatagggttcatgctcctctaagaatctaatgctgccactgatctgacaggaggtagagctcaggcattaatgtgagtgatagggagcagwtgtaatcccagaagctgaggcaggagaatcacttgaacccaggaggtggaggttgcagtgagtcgagatcacgccattgcactccagcctgggcaacaagagcaaaactccgtctcacagaaaaaaaaaaaaaaaataagaggaaaaagttaaaatattaatggtcttatttatccagttatgtaccagttctgaagctcgtccaaatttccacataatgtgattttccttgagcctgaagaaccttcatcatttcctgtagtgcaagtctcttggcaatgaattcttttagttgtcttctctgaaaggcctttgttttacactaactttagaaggatgtattcactgcgtatagaattcttggttaagagttttctttctgcacttgaaaaatgttccaacatcttcttccataactttgaggtgaaatcagtattcagtgaaatcattactcctctgtatatatataatgtcttttatttgttactgtgtttgagattttatctgtggttttcacctgtttgattatgatatacctagacaagatcttcttcatatttgtcttgcttaggtttcctgtgcatcttaaatctgtaacttttttccttgatccatttaggtttgtatttgtacattatttcttcaattgctttccgcccattctatgcctctactcttttttttttctgagaatccagttacacaaatgtttaaatctaacaagtccctaagcctctgtatatttttatttttatttttttattcttcaaactggatgatctgtctttgagtttctggcactttaccttgtcatctatattattctgttaagttgccctataatgaatgtggaatatgacaaaataatcttaactatttacaaatgaaacaatctcagtgatgggggcaggggaaaacctgctgtcctagctatctgcaaatgagtggcatctgtaagactcaagacaaagaatctaggactgtacataagcactgtgctctaattgatcaagttgtatccatggagctatggtctaacaattctgataccactgtacagtatacaagaattaagtgaatgaatggaagatggtgggatctgggtttcccacagttggaatgagagtttacagataaacaaggggaggaggctggaattatgtatgtgttaatgatttatagttggagacatcagtatgagcccacatgtagcctaatatagatatagatgattacgtatagaaatatttatagatatgtgtatatacgtggactaatacacacacatcatttccttgttttggccggggataatgagactccagtggtaacaagcatacctagtacccagatattgttttataatcccaatctctaataaaaggaaccagagccccttggagaaagagctgattctgtcactggagaaggaaatatatcagaagactcttcaataccttctagtgccagaaagcaaggacatgctaaaacaaaacaaaacagaaaatgcactgatggaggtatgtcggagccagctgagagacctcccttcaaaaagcttgaagattttcagccataaaatacataaagtaatattggattataagccaaaatataaaataaatattgacgaacagatataaataaaagattgaataagacattagaagaagcaaatcttatatacagaaaaatttcaaatgatttatgtaggtatttcctgctacgagatagagcttaactgccccatccacacacacaattgagtgtgggctcagtaaaatgattttcttttaaagaatggaatatgtgaaaggggcaagaaagtgactttacagtggagaaagctggcaaatatgatcttatccagatgatcaagggtgacatcagcagggctaaatcatggtgaccmcttgtactcttgctatgatacgatgagagcaccactgcacctctgtgtatccccccaggaccataacaccaatctaatcactagggaaacaacagaaagatcacagtttaaggacattctacaaaagtcctgactagtacccctcaaaactgtcaaggtcatcaagaacaaagaaaatctaagaaactgtcacaaccaagaggagcctaagggggacatgatggctaaatgtgatctggtgtcctgggcgaaatccaaaagtgaaaacaatattagggaaaaactaaggaaatctgaataaagtatacactgtagttaatcatactagtgtaaaaatactggcccatcaattgtaacacatataccatactaatgtaatatgtcaataatacgaaaaagtaggtgtggaatatttaactgtttagcaccactgcaatttttctgtaaatctaaaactcttataaaagtttgtttaatattaagaaaataaataataagtcatggaaaatgcatttggagtttactgaattgtacaatgaattataagtgccccaataacaacggaagtgctcatattttcttgtaacacctctttcagtaattatagaaacgatcatattcacagataattttatacaaggagtgtgtgtgaattctttgccaagttgcttgtactaaacatttccaagatgttcagcaacatttcataactgagtattctaaagttagacataactcatacttatgaaagtagatcaatggttaatggctttggatttggggataaatatggctttctatgtaactttagatatcacttatattttaagaatgttattttaaattcactgtaggttgttcttgagtcatcmtgctttgtatgttaatatctgccctgtgcttggatgaaatattagcgtaaccttggcttttgtgctaaacattaatcattataatcattcccatctatgatcactccccatataactgagtcccaccaaaatccatcaaagtggcagcagatgtgcttattttaaaacagtagtttctatttaatttcaagatgaaaagctgaactatacagtccacttcacaagtttcttatttaatgaaaacagtttaaagaaaatgagtatcttgtctttttagagttcatgttccaaattttgtcaaaatcattgaacttctttaaagtgaattgaagaacaaacatctgcgtcctcagtggcagagtggaaactgtgaacccacatggtttgactacacacatatgtgtctacacactgttggatcagctctccaatagagagaagagcctagtgtttttcttctatgttcaataaatttgggtattgatcagatgtatgtgtgtgagagagaaagggtatggcggtgcctctccacataactgactctgcaagtgtcattgggacatttgtatgcaaggatagaacaggttacctccccataattgttgctaaataataacccactgttcaactcccacttatgagtgagaacatgtggtgtttggttttctgttcttgtattagtttgctgagaatgatggtttccagcttcatccatgtccctgcaaaggacatgaactcatccttttttaatgctgcatagtattccatggtgtatatgtgccacattttctttatccagtctatcattgatgggcatttggattggtttcaagtctttgctattgtgaatagtgcacatggacacagggaggggaacatcgcacaccagggcctgtcggggggtggggggctaggggagggatagcattaggagaaatacctaatataggcaacaggttgatgggtgcagcaaaccaccatggcacgtgtatacctatgtaacaaaactgcatgttctgcacatgtaccccagaacctaaagtatgataaaaaaaaaatgaaaaaaaaatccttcccctaattcagatattctgaatatagcaacttgtttttatgtatcattctggaaattttctattttaattatgtataaccacatattatgtacatatatgtaatcatactatagatgatacaaaaatagaattgtaccataatttttttctggaactttctctattcaaataaagtataatgggcatctttctctattagcataaaacaaaacaaaacaaaaaataataataattcacttgagttagctgaaatgaggactgtgtctgagcagacagatgggggagaagcaacaatgtgaaaagcaacttttccgaagttgttactatagctaccaggatgcagactatttctatcacagcagcaaacagaagagatttcagataaaggacaaaaggaaaagaaatcaggactatttccatagcaactgggagatctgctgatcgtgggtagactacacttttctctacctaacgatattgatattagtcattaataatattacaggaggagatatatagaaagccctaatcctgaactaatagcttaaagcataagataggraaactgcattcattgaaaatgccacgaaggttcctggggcgatgccgtgaacttgcatgcctgacacctttaaaggctgagggattactgactgctactactaatgttgcaatttgtttgttgtgaaattcagaggaaatttccttagtttgtttctaccaaagatgatggtggatgagtgtgagatgtagagtaagtagaaattggagaagtgatataaatagaattagatttagaattaatggagggaatctgaatggaattgcaacattatataacaaagatctgataaaaaagaaaaaatataattgatgcagctgtgtttattgggagtaaatgctggggggaatgcagagagaacaattagaggttaagaattgagagctggggccaggcatggtggctcacgcctgtaatcccagcactttgagggatcacttgaggccaggagttggagaccagcctggccaacatggcgaaaccctgtctactaaaaatacaaaaaaaattagccaggtgtggtagcgtatgcctgtaatcccagctacttgggaggctgaagcaagagaattgcttgaacctggaaggcacagaggttgcagtgagccaggatcatgccactgtactccagcctgggcaacagagtgagattctgtctcaaaaaaaacaaacaaaaaaaaaaacagaacaaaactggagagctggaaggcactttagggattatgcatattcaacttgcaaatgaaatgttaagaggtattcatttgtgcacatatttattgattatctactacaggccagatactactttccattcttgggaaatacacatcagtgatctaaacagacaggaatccctatgtccagggagctacattctcaagggaaatcataggccataaaaagtaaagattataaataagaaaagtataaggtatgtctgtgcatgtgacaaatggtaaaacaaaataagcagaatttagagcggaaaggtgggattgtgattcaaattaggatatcagaattggctccattaagtatgaaacacttgagggagttagccatcccaatattctgggaagagcattccagtaagaagggagaggacaaatatcacatgcccagattgcagcaagtccaggccagagcccagatccctgtcatctgtaatctctgtatcctgctaccttttcttttctttttcctttttttttttttttttttgagacaagctctcacccaggctggagtaaagtggctccatcatggctcactgcagcctctgcctcctgggctcaagcaatcctgccatctcatcttcccaagtagctgggaccacaggtgtgcaccaccacgcccagctaatttttgtatttttgggtgagacagcatttagccatgttgcccaggctggtctcaagctcttgggtcaagggatcctcctgcatcagcctcccaaactgctgggattacagatgtgagccaccacacctggcctcttttcccagtcttggacaatggttcaccaatgtcatttcttgctcatttgttccagtgcagtggttcttacggggttgtctttggactcagcagcactggaattaccaggaagcttgttagaaagcagattctcaggctgtagctgggacttccataatctagcactgtggagggtgaggcacagcagcctgtcttaacacgccctcaggtcattctgagaatcacgtctgtaaaccaggggcgcattcttttcagtgacccctctcacttctgactgttgtctgtagaatctttcagaaaccagtcccaatttgccaaccgctattctaggcctcctacaccctgatctggatgtttgtaagaagaaaaggtgcaacagaatttattccggaatggagaagacacaccctcagcgcgccctcgtcagaacccagaatggtcagaatagctggccaaagaggaaggagacctggccaggtgcaattctcgaaggacaaatgaagcactggtcagattccggggcatcagttcacccaatcttgagaaaattctgggggaaaagagttccattcatggtgaatgaaagaagaagctttctagaactaatctgaaagcaaagtgtccctaaagagaaacccatcaaaagtcactgctggattttcacccaaagtgaggcagagtaagttttaaaattaaattttattatttcgccttcctttccagttcttaatgttagaatggtactccagcttggagtgggaaagtacatggttgccttgcatcttcctacttctctcactttaattggtgtaaagccttatttaactgtctttagattttaagatttgctagacctcaactctcctgtaaccatttcaaaagcacgggctgggcttctgcttctgataatggcgaacgagggagatcagaacaagggacccagtgaaggtaaccacaagggctggacaaactgtcaaaatcctgcttgagatgagagatggctgtgaaaacttttggaacaaagattcaagtgataaaaaaaattcaccatgggtagccaggcagttagggccatgctattttaagagcatcttcagactttgaaaataagctgttaacaatatgyggagactctcagcagaagttctaggcaggcctacaggcatgggggacaaaaattagagtgcaagcccctcccagagggggtctggtaaagtctgcaaacttcaggttgtaactctcagagtctacagccaaggagtaaaagtggaatagaaatagatgcaccctgagtcccactcctaaaagggggaaagggtaagtgtgatctaggccacttcaaaggagctggggtggggacagtagcattctgcttttcccagaatgcctctctctgctctatgagctggcaatgggggaaatggtagcccttgatcttctagccttgcctttcctggtgtggaaccttcgtcctacaagtgaattgtggcaggggtcagtggggccctcattcttggtcttccgtgccaggagtagagctcttgcccttggtgagcaggacctgggtggagaaggagcctctgtcctctcagctgcacctgacttgaagacctgccttatgagaaatactaaaggacattcttcaggctgaaagcaagtgaccctagacagtaatttaaatccacatgaaaaaggcaaaggcatgagtaatgtgattatgtaattatgaaatacaggatacttgcatatttctttttcttttaactgacttaaaaagaagttgcataaacaatatgtgtagaattgtgttatggttataacatatagaaatgtcatatacaataagacaaggaagtggctgggaacaactgtatttgagtaggattattgacactgggtgctaacttgagtaactttcatttattccataggaataaatgaaaagaatcagaaatggtaagcaagatggttaatataataaattctatacgtataaatagtcatgtgctacataatgatgtgctacataatgatgtttcagtcaacagtggaccacatatgtgacggtggtcccataagattataatggaaatgaaaaattcctatcgcctagtgatagcatagtcattgtaatgttgtagctcaaagcattacacggtgttggtggtgatgctggtgcaaacaaacctactgcactgctataaaagtatagctcgggcaattatgcacagtacctgagacttcataataataataaatgactatgttactagtttatgtatttgctttactatactttttatcttttttgtaaaatgtactccttctacttttttttttttttaatttcattataagacagtctcaggcaggtccaggtatccagaagaaggcgctgttatcgtaggagatgacggctccatgtgtgctattgcccctgaaaaccttccagtgggacaaggtgtggagttggaagacagtgatatggaaaatcctgaccctgtgtaggcctaggctaatgtatgtgtttgtgtcttagtttttaacaaacaagtttaaaaggtaaaaaagatttaaaaattttaaaataaaagaaagcttatagaataaggatgtagagaaataaatcgtttttgtatagtagtacatatgtttgcattttaagctagatataacaaaagagtcaaaaagtcaaaagaaagtttataaagtaaaagtgttacaattagctaaggttaattattgaataaataaaaatatattttatacatttagtgtagcctctaagtgtacagtgtttctaaagtctacagtagcgtactgggatgtcttggccttcacattcactcagcattcattcactgactcacccagggctacttccagttctgcaagcaccatttgtggtaaatgacctatacaggtgtagcattttttatcttttatactatatttttaccatacattttttatgtttacatatacaaatacttaacattgtgttacaattccttagaatattcaggacaggaacatgcaatgcaagtttgtaagctaggagcaacaggctataccacataacctaggtttgtagaaggctataccattctatgtttgtgtaagtacactctatgatgttcacacaacaacagatttgaacaatgcatttcttagaatgttaagcaatgtatgactatatagttgctttcctttcttctttcagagatttaaaaacatagattatataaaataataattgtaacaatgtgttgagtttgtaacatatgtaagttttatactataacaataatagcacagaaaattggggagggagaatagtgttatataggagtaaagttctatattccacttgaataaattggaataaatttaaaatatattttaaagggtaacatgtatattgaaatcccaaaacaactactaataatataatttttttaataaattaaaaatcattatagatcctcaaacgttacatcagaaaatatccacttaatccaaaagaagtaagtaaaggagcaaaagaataaaaacataygaatgatgtaaaaagcaaatggtagatgtatattgaaccctatgaataacaaatgtgaatgaattaaacaatccagtcaaaggcagagattatcagactgaataaaaataaaaagaccctctaagatgttgtctgtagcaggcacacattagattcaggaatctaggctgaaagtaaaggatgaagaaagatataccatgtgtaaaccagagagtatctgaagcaggtctcaatcagtttagaagtttattttgccaaaatcaaggacgtgcctgggagaaaggtttatgcctttctccaaagatgattttgagggcttcagcatttgaaaaggaaaagtgggctggaggggaaagagggaggttgtagtaatccatatgtcgcaagagaaaaggagcaggtaggggaatagtcaattatgtattcgttgggtactcagtaaatcagcacgttacataagataaggtgagcatagcatggctaactgtggggatatttaaccttttatttgtaggtacttgcttagaaacaaacggaaaggtagcttcttgcatgactcaattttaagcttaatttttaagtttaattttttttttatatttccaatcctttatttttcttaattataccttaagttctggggtacatctgcagaatgtgcaggtttgttacataagtatatatgtgccatggtggtttgctgcacccatcaacctgtcatctacattaggtatttctcctaatgctatcccgcccctagccccccaccccccaacaggggtcaggttcctgaccatataattaatatgttcaagatcaatgttttttatccagcagcaaaaaataagttcctgttctgggttaaatgaacaacaacaacaaaaaatgcttcatttttatctcccattgtgtaagacataaaacatggccacatggtggctcacatctgtaatccccgcactttgagaggccaaggcagatggatcacctgaggtcaggggttcgagaccagtctgttcaacatggtgaaaccccttctttactgaaaatacaaaaactagctgggtgtggtggcaggtgcctgtaatcccagttactcaggaggctgaggtaggagaatcacttgaacctaggaggcaatggttgcagtgagtcaagattgcaccactgcattccaccttgggcaacaagagcaaaactccatctcagaaaaaacaaaaacaaaaacaaacaaaaaaacaccatggcccatggccataatgcctggaaaagctatttgaagacactaaaaataaaacaataggtggattgctgaagaacaccagaaattgaagtactgccaaatcatcaatgaatttacattatttctccttcattacttcttgatttgaactcaacacaacttgaaatctgaaagttggcactgttttgcaagcagtgagagttctaatgtaagccctctagttctggatggggagttggaaccgaacactcctaatccttagaggatgtttaaatctcccatttcctccattctctcaaagttgagtccccagggaatcaattccactcaggtgatggctgttgctgcatctggagcccagaaacacgaaactctgagacagagggacctcctmtccagtaagtggggctgcattcctaggactgcatgctggcttttctctctgcgtctttcctcacttgagaaaggatatgggagtgtgtgacagagagggggtaaccagagccccaagtttctagccagaggcccaaaaaacacatgccagagaataaaaaagtactaggtagcttgcagaaagaaaagaggtcaagaaaatgactccataaaaattgtttatatattccaggtttgtcttggcttgtgtatgtctagatctagttatacttagcatatcaaagactttgagagctaacattgatagacagctgcctaggttccagaaacatgtggaataaatctgaggagcacacaaatctttcaaactcttacatacagcttctattggaaccacagaacaccattgaacctgcagtgtgaaccagatcagttagttgttggctgaaaacgaaaatatcaacattttctacagaatttaagaaaaacagtcttatgatgttaacatttaaaatgtgaagaatacaatccaaaattacttggcatatggagacccatggacatttcaactcctatgagaacagactcaacagacacccatgccattatgaagtatatgttggaattatcttacaaagaatgaaggcacgtatttttaaaaacatgcaggccaggcacggtcactcacacctgtaatcccagaactttgggaagccgagtctggcagatcacttgaggtcaggagttggagaccagcctgaccaacatggtgaaaccccatctctactaaaaatacaaaaattagtgctgatgcatgcctgtaatcccagctacttgagaggctgaggcaggagaatcgcttgaacctgggagttggaagttgcaatgagccgagatcacgccattgcattccagcctgggcaacaagagcaaaactccatctcaaaataaataaataaataagcaaaaaaaaaaaaaaaaaaacacctggattattatttcaacaaatgttaaaaacagaagttatcagcaaagaaattgagattaagaaaagaagcagctggaaattttagaaataagaaataactacaaaaacttgtaggatatgctgggcacggtggctcacgcctgtaatcccagctactggggagactgaggcaggagaattgcttgaacctgggagatggaggttgcggtaagccaagatcgcaccactgtactccagcctgggcaacaagagggaaactccatctcaaaaacaaacaaacaaacaaaaacttgtaggataacatcagtgggggaatggagatgacatatatgacatatgatcaagttaagtgaactttaagatggataagtagcaattatcaaaagtgacaacagagagaaaaatattgaagaaaaaagaacagaggtagaggaacctaagggaaaatgacaacatctaaagttcttgtcatcgaagaaggataagcgaatgtgatgctaaagaaaattgaggtaattatagttgaaaactcccagactatatataatttagttttgctttattttgacctgtgtgttgttttcttgggacttgctttctaaagtcacattttgtttctagggtttatctatattatcatatcactgtagctatagtttattctatttcactgctgaataatatctgtgaatatactacagtttatctggtttcctgctaatgaaacactttggttatttctagtttttcctattactaaaaaagcataattcaggaaaataactgtcaggggaagaaggggaatggcacaagggaaaacataggtaaatggaagttagaaatactggtgcttgagttcttaattgttcattatatcattatgctttataacttaatgttacatatatatgtgtgtgagtgtgtgtgtgtatatattatttcatatgtatcacaatttatttaaaaatataaaacagttaaaaacaaaacaaaaacaaacaaagaagaaaactcccaaactttggtagatgactaaaacctaaagatttagaagctaagcaaacctcaatagggtgattccatattacattttttacaaaaaatataaaagcagtcagataaaaatgacacataacctatagtggaacagtgattcaataatggtggctttctcatcagaaaccatggaggccagaaagaagaggcatggcatttttcaagtgctgagaggaaagagctgccaatctagacttctacattcagtaagaatatccttcagggataaaggcactctcagatgaaggtaaactaggaatctgaccatccttaaaaattacacaaggaagctgttaaaacasaaagaatgataccagaaggaaacttggagcatcagaaatgaaggaaaagtgagagaaatggtagatgtattagaaaataggatattcttttatactgaaattcttcaaaatatgtttgatatataaaaggaaaaaatacataaaagtgtctgatagaattctccatgtatgtataagacagctatagaataaagtggagagggtaacggaatctataagatattagctatacattccaaatgaagtggcagaatactcagtctaagcagattgtgaagagttgacttgttttatcagaaaagtaaacttcagagcatagaaaattaccagggacagttacactacataatgagaaataggataaatttaccaagaagatacgagttctaaatacatatgcatcaaacaacagagatgcaacatacatgaagcaaaaccagacaaaactgaaaacagaaatagatatatccacagttaaagttggtgacttcaacatccacacctcagtaatatatgaatctactaggtagaaaatcaacaaagatatagaaaaatcagtcagtgccatgaaccaaccagatttaactgattttacagaacattctacctaaaaacagcagaaggcacaagtgcccatagttcattcataacaaaaatatattctgggtcataaaacaaactccaaagtttaaatcatttggaattattcagagtatcatctcagatcataatgcaattaaactagaaatcaatatcagaaacacaacagaaaaatatcgaaacccatggaaattaaacaacatacctttaaatatgccgtggaccaaagaggaagtctcaagggaaattagaaaatattttgaaatgagtaaaaataaaaaatatggcataatgaagattgtagaactcagctaaaagactgcttagagagaaatttatagtattaagtgcttatattagaaaagaagaaagacctcagatcactaacctaagcttccacctttagaactggaaagcaaagagtaaaacagactcaaatcaagccaaattaaggaaataataaagtaaaaatcaatgaaattgaaaaccaagaacagtagatgaaattagtgaaatcaaatctaattcctgtgaaaatatttgtaaatgcattcaagactgacaaagttaaaaaaaaaaaagacacaaattaccaatatcaggaattgaaaagaaatgggactacaaggccttccaggataataagggagtactagaaacacctctatgggaataacttcaacaacttagatgtaatggaccaattcttccaggaacacaaactatcaaagcctacccaagatgaaatagatcataagaatggtcttatgaccattaaagtgattgatttcatagtttaaaaaaatgttttaaaaacctaccccaaaatctgaaaaataaacttccaggcctaaatatggtttcactggttaattgaataaaatatttaaagaaattagactaattccatagaaccttttctagaaaatggaagaaaaggaaacgtatcccaactcattttatgaggctggcatcaacctgacaccaaaatctgacaagaaaaaagaaaactacrcaatatatttcatggatgtgtatatatatatatccatgtgtgtggatatgtatatccactatatatatatccgtgtgtgtatatatatatatacacacacatctatgtatatacatatatctatttgtgtgtgtgtgtgtgtatatatgtatatacacacaaatacaaactatattaacaaagtgattccagcaatatataaaaagcataatacaaagcaccaagtggaatttaaactaggaatacaagactagttcagtactctgaaaataattaatgtaattgaccatattaataacctaaagaaggaaagctgcgcggtcatagaaatttaaacagaaaaaacatttgacaaaatacatcatctattcatgataaaaactcgcagcaaactagagtagaacggaacatcctcaaaaattcacatctaggaaaatcttatagctaagaatatacttaattgtgcagcattgaaagcttttctcttaagcttagtggcaaactcaacattcctgttaacctagtagaagatctggtcagtggaaaaggcaagaagaaaataaaaagtgtacaaattggagaggaagacatgaaagtgccatttgtggaagatatgacactttatataaaaatcacaagaaatctacaaaaagtctcccaaaactaataaatgaagttagtaaatcacaggatacaagatcagcactcattattaatcaggtatatttatttttttaaaaaaatcaatttattatcttatagttgtgaaggtcataagttcaaaatgggtcttactagactcaagtcagtgtgtcagtggagcagaattcgttctagaatggatgcttgaagaggttctggaggctcaaagagagaattcattcctaggcattttctgcctcttaaagccacccacattcccccatccatgactgcatgactctgacctctgctttcattgtaaaatctccttctctgcctctgatcttactgtttttctcttacatgggcctcagtgattacattgggcccacccagataattcaaggtaatcttcccatctcatggtcttcaacttaatgatatccaaagtactatttgccaagtgatataatgtattcagattccagggattaggacacagacatctttagggactattattctgtctaccacaagttgaaagagttctttacatattctgatattatggatactggaacctgacaaggtgtatgatktgcatttttttctcccattctgtgggttatttcacttattgtatatcctttgatacaccaaaagttagaattttcgtaaagcctaatttatctatttcttcctttggtggctttactttaggtgtcacaactatgagaattttatagtactatctctgacttttaggtttttaatacattttgagttaactttccatatggtgtaaggcaacagtccagtatcattccaatgtctctgcatcattagttgaagagacgatttttctccattgaattattttggtactctaatcaagtatatttctatacagtagaacgcagactggaaaacagaaaaattttaaaacatcatttaaaataactccagaattgaaatatttaggtataaatgtaacaaaatgtgtacagtgtaagtttataggaaactaaaactctaataaaagatatttgaaaaataaagaaatagagagtcatactgtcttcaaggaatagaagacccaacgtggtaaacatgtcaacatgtaaattctccataaatttatatatggattgtgtgtgtgtggtctgtgtgttttttatatatatataaacatatataaacatatatataatataaacctatgtttatatataaacataatataaacctacgtgtttatatataaacatatatataatataaacctacatgtttatatataaacatatatataatataaacctayatgtttatatataaacatatataatataaacctayatgtttatatataaacatatataatataaacctatatgtttatatataaacatatataatataaacctatatgtttatatataaacatatataatataaacctatatgtttatatataaacatatataatataaacctatatgtttatatataaacatatataatataaacctatatgtttatatataaacatatataatataaacctatatgtttatatataaacatatataatataaacctatatgtttatatataaacatatataatataaacctatatgtttatatataaacatatataatataaacctatatgtttatatataaacatatataatataaacctatatgtttatatataaacatatataatataaacctatatgtttatatataaacatatataatataaacctatatgtttatatataaacatataatataaacctatatgtttatatataaacatataatataaacatatttataatataaacatatgtaatataaacatatgttctatatataaacataatataaacatgtctatatgtaaacatatataacataaacatgtctatatataaacatatatataatataaacatgtctatatataaacataaaatataaacatgtctacatataaacatatatataatataaacatgtctacatgtaaacatatatataatataaacatgtctacatgtaaacatataatacgaacatatgtctacatataaacataaacatgtctatatataaacatatatataatataaacatatgtctatatataaacatatataatataaacataaacatataatataaacatatataatataaacatatatgtttatatataaacatataatataaacatatgtttatatataaacatatataatataaacatatatttatatataaacatatatatgaacatgtttatatataaacatatatatgaacatgtttatatataaacatatacaatataaacatgtttatatataaacatatacaatataaacatgtttatatataaacatacaatataaacatgtttatatataaacatacaatataaacatgtttatatataaacatacaatataaacatgtttatatataaacatacaatataaacatgtttatatataaacatacaatataaacatgtttatatataaacatatataatataaacatgtttatatataaacatatataatataaacatgtttatatataaacatatataatataaacatgtttatatataaacatatataaacatgtttatatataaacatgtataaaataaacatgtttatatataaacatatataatataaacatgtttatatataaacatataatataaacatgtttatatataaacataatataaacatgtttatacatatataaacatataaaaacatgtttatacataatatataaacatgtttatattataatacaaacatgtttatatataaccatgtttatattatatgtttatatataaccatgttcatattatatgtttatatataaccataggtttatatatgtttatatataaccataggtttatatatgtttatatataaccataggtttatatatgtttatatataaccataggtttatatatgtttatatataaccatataggtttatatgtttatatataaccatataggtttatatatttatatataaacatataggtttatatatttatatataaacatataggtttatatatttatatataaacataggtttataggtttatatatttatatataaacataggtttataggtttatatatttatatataaacataggtttataggtttatatatttatatataaacataggtttataggtttatatatttatatataaacataggtttatgtttatatatttatatataaacctataggtttatatataaatatataatcataggtttatatataaacatataaaataaacmtatgtttatatataaacatatatataaaataaacataaacatatataaaataaacataaacatatataaaataaacatgtttatatataaatatatataaatgtatatgtttatatataaaatatatataaaataaacatgtttatatataaacatatgcttgtatataaacatatatgtaaaataaacatgtttatatataaacatatataaaataaacatatacgtttataataaacgtatatataaaataaacatgtttatatgtaaatgtatataatataaacatatataaacatatatgtttatacatccaaacatatataaacatatatgtttatacatccaaacatatataaacatatatgtttatacatccaaacatatataaacatatatgtttatacatccaaacatatataaacatatatgtttatatatccaaacatatataaacatgtttatatatccaaacatatataaacatgtttatatatccaaacatatataaacatatatgtttatatatccaaacatatataaacatacgtttatatataaacataatataaacatacgtttatatataaacatcatataaacatatataaacatacgtttatatataaacataatataaacatacgtttatatataaacatataaacatttgtttatatataaacatataatataaacatatataaacatgtaatgtaaacatacctgtttatataaacatatgcaaacatacatgtttatatataaacatataatgtaaacatacatgttttatataaacataatgtaaacatacatgtttatataaacatatataatgtaaacatacatgtttatataaacataatgtaaacatacgcttatatataaacataatgtaaacatacgcttatatataaacatataatgtaaacatacgcttatgtataatcatataatgtaaacatacgcttatatataaacatatactgtaaacatacgtttatatgtaaacataatgtaaacatacgtttatatgtaaacatataatgtaaacatacgtttatatataaaacacaatgtaaacatacgtttatataaaaacacatatagtgtaaacatacgtttatataaaaacacagaatgtaaacatatatgtttttataaaaacagaatttaaacatgtttatatgaaaacagaatgtaaacatatgtttatatgaaaacacatataatgtaaacatgtttatatgaaaacacataatgtaaacatgtttatatgaaaacacatataatgtaaaaatatatgtttatatagaaacataatgtaaacatatgtttatatagaaacacatataatgtaaacatgtttatatagaaatataatgtaaacacagatgtttatatagaaacatataatgtaaacatagatgtttatatagaaacacatataatgtaaacagatgtttatatagaaacacatataatgtaaacatagatgtttgtatagaaacataatgtaaacatatatttatatataaacacacatatacacgtacacatacatatgtatatgaattctgtgttttatatatgtgtgtgtgtgtgtgtgtttgtatatatatatatttaccaatttaaaccttagcagaatttttgtagatatgggtaaggtatttcacaatgtatttggaaaggcagagggactagcctatgcaaatcagttttgaaaaagaactagacatctacatataaaaaatgaactttgacttaaataccttaaacaaaaaacttggtaaaaggcatgaacaaacacttcaccaaagaggatataaggatgacaaataggcacattaaaagatgtttaacattcttagctgttagggaaatgcaaattaaaaccatgacgtgatagtgctaaacacctattttaacttcaataaaaattgctgacaagagcaaggaaagtaatagatgtggagtaacttgaaattttgtaaattgcaggttgaaatataaaattgtacaatcactgtgggaaacagtttgacagtttcttataaatgctaatctgttctaaaatataacccagtggtccatttctggatattcagcctagagagatgaaaaatttatttccacataaaaacctgtacattaatatttacagcagctttactaataagtgctaaaacctgaataccacccaaatgtccttaatgtgatggatggataaacaaacggtgacacatctgaacagtggcataatatttataaaaaataatgaacttttaatatatgtaacaacttggacaaatctcagaggcattatgctagggaatgaagccacacaccaaaggttgatactatagtattccatgtatattctactccctcccaacgaaaagaatccagtcacacacagaaaagtagaaggatggagaagtgatcagtggttggcagcagttatgggtagggaaggggcaatgacaaaaggctagcagaagggagttttgggcagggggtgatagaactattgtgtgtcctgattatgttgatagctacacaaatatatacatgtgtctaaaatttatggaaggtcatgcatgatacatcaatggaaaaagttaatgtatgatataaaaataaaacttgaaagacactattttcactagcatcaaaaacattaaatgtctaagaaaaatctagtaaaagatgagtattattctatagagttaactataaaccattaatgagagaaattraaagagacctaaataaaggtcagcatatctacatttatggcttagaagactctgtattggaaacaagacaattatccataaactgatctgcagagtcaatgcaactccttatcagaatttcaatggtttttattttttgtgaaaacttacaacctgatcctaaaatgtatataatatgtagatgaccagaaatggctaatgcacttctgaataaaaagaagaagtttgaagaacttgcttcactggttatcaatgtttattagaaagctacaatgagaaggatagtggtattgaaacaagggtacaataaaagtcagtgaaactgattagagtctagaacaaagccaagcatatatacacattaggttggtgacaagcatggcaggtggagcagtgaggaaacatagtcctgtgaatgaatagtgttggagtaattggatgctcttatgagaagaaaagaaaacttgtcctctacttcacacaacacccaattgtagtagattatagatttaaatataaaagtcaagagaataaaacttctgaacataaataagcagggctrttttcctgatttcagagatagaatttaataggattttaaaagcactattcacatgagtctttcctgagcaagaagacagaataggaagccctggaccttccttccaccctgtgatctcaccaattcagcaacaaagcatggacaaatttcctgtgaagtccagaatgcagaaactagctgagaggcttctgcaccctaggtgagcacaaaactacccacatcaaagtcagtagggaaatttaagacaccctcttgccataatccctgcccttggcactgtgccttgtaattgcaaggaaacccccagctcccagattttccttggggagggaaaaagatggactatgcatccagaaccccactttgctgggagatacctggaggacgggcttctgtctagcctgtctcagagtgctgatgcacctgcatcatctagccacccacaagtaagtgagaacagagatgacaatttgatctaatatgcagctagtcgccacagctttctctccagcttgatgcagaccaaatagctaaaaaccaaaacaaaacaacaacaataaaacacacacacacaaaacccaaatgtcagtttctccctggggatagggaaaaaaaaaacagttagacagggaatccaatgattcaacttttctggaggtggcctgaggaactggcttatgtcttgcttgttctcagagcactgatgggacacagtatattctagatgcctagggactgcttaaaaccaagaaaayaggttggactaacacaaaggtccragaggctccgaaaatctctgcttgggctgattataagggtcttttgtatgagactagtctgtgaatattgggagaggtcgctgttttatctaatgtgcagacaacacagagagtcaaggaaaatgaagaaacggtaatatttcccatacaatggaaaaaaataaatttccaaaaattgaccttaatgaaatggaggtatatgatttgcctgaaaaaaattagaataactattataaagatgctcaccagggtaaggagaacaattaatggataaagtgagaatttcaacacacagaaaatacaaagtaccaaatagacattgtagagctgaagaataataactcagccgaaaaattcacttgaggggtttaacagcagagtagatgaagcagaagatagaaacagtgaacatgaagacaggtcactgaagattattcagtcataggagcaaaaataagaaaagaataaagagtaaagaaagcttcaaggatttaaaagacattatcaagcagatcatggattgtgagaatcctggaagaagagaaagagaaacaccagaaagcatattcaaakaaacagtagctaatttttttctaaatctgaagatggaaatggtctagatccaggaaacccaaatgacaataaaatgagtccccaaaatgcatactgagatacattataatcaaattgccaaaagtcagaaaaagagaatttcgaaaagcagcaagagaaaagcaagttgtcacacacaaggacacccccataaaactgtgagtggagtttccagcagaaaccttacaggccaaaagggattcagatgatatattcagagtactaaaataactggaaaccaagaatactgtgcctggcaaaactgccctttaaaaatgagggagaggtgaagatgttcaaaagctgagaaagttcatcactactaggcctgccttacgggaaatgttaataccttcaagatgaaaccaaaagacactaaacagcaacattataacataagaaaataaaaaaatctcattagtataagtaaatatatagacaaatatagactaattgtaataatggtaggtaaatcacttttaattctagtctaaaagttaaaaaaaagtataaaatataactaaaaatgtgtttatgggtgcacaatataaatggatgtaatggtctcactttatatttaaagacatacataggctgagaatgaagggtggaaaaaaaaaactccatgcaaatggcaaccaaaagagagcaggggtggctacctttatatcaggcaaaatagactaattcaaaaatggctgcaagacacaaagatggccataatgtaacgataaaagagtcaattcagcagaaacatatatatatatatgtgtatatatatatatgtatatgtatatatatacatatatgtatatatgtgtgtgtgtgtgtgtgtgtatatatatatatatatatatatatatatatatatatacccaacatcagcacaccaaaatacatgaagcaaacattgatggaactgaaggaagacaccgatagcccccccatagtagtaggagacttcagcacccnnnnnnnnnnnnnnnnnnnnnnnnnnnnnnnnnnnnnnnnnnnnnnnnnnnnnnnnnnnnnnnnnnnnnnnnnnnnnnnnnnnnnnnnnnnnnnnnnnnnnnnnnnnnnnnnnnnnnnnnnnnnnnnnnnnnnnnnnnnnnnnnnnnnnnnnnnnnnnnnnnnnnnnnnnnnnnnnnnnnnnnnnnnnnnnnnnnnnnnnnnnnnnnnnnnnnnnnnnnnnnnnnnnnnnnnnnnnnnnnnnnnnnnnnnnnnnnnnnnnnnnnnnnnnnnnnnnnnnnnnnnnnnnnnnnnnnnnnnnnnnnnnnnnnnnnnnnnnnnnnnnnnnnnnnnnnnnnnnnnnnnnnnnnnnnnnnnnnnnnnnnnnnnnnnnnnnnnnnnnnnnnnnnnnnnnnnnnnnnnnnnnnnnnnnnnnnnnnnnnnnnnnnngaaggaaataaagattagaggataaataaacaaagaatagaaaaacaatagaaaaaatccacaaagctaagagtgttttcaaaagataaacaaaattgacaaacctttagctagactaagaaaagaaagaaaaaagaagctcgataatgaaaatcagaaataaataaacgggattacatcaaaccaataagcttttgcacaacaaaggaaatgatcaacagagtgaaaaggcaactatagtgaagtcctacaatttgacacatacaatattaataaactggttgaaaaatggactaaagacttgactatacatgtctcccaagaagacatacacactgccaacaggtatatgaaaagatgttcaatgtcactaatcatcagggacatgcaaatcaagaccgcaaggagttatcacttcacatctgttaaaatggctatcatcaaaaattcagaagtcagcaagggttggcaaggatgtggagaaattggagcccttgtacacccttgggggaatgcagaataatacagccactatggaaaacagtatggagattcctcaaaaattaaaaatagaactaccatataatccagcaattccagctttgggtatttatccagaagcattgaaatgagggtctttcaaagatatcttagcactccagtggttgttgcaccagtaggaataaccaagatatgaaaacaacgtaatgtccattggcagttggctaaagagaatgtggtatatacattcagtggaattatttaacctttaaaaaagaagaaaattctgcactatgtgacaacacagtgaaccttaagaacatcttctaaatgaaataacacagtcacagaaaaatagttaaagcatgattccacttatatgagttatttaaaataattaaactcatgtaatcagagagtacaatggttgttgccaggggctgcagggagggagaaatggaaaatttctaatcaatgagcataaagcctcaattataaaagatgaataagttctctagatctattgtacaacactgtcattgtattttacaacacttaaaaagtgtatcatacgcttaaaatttgttaagacagtagacctcatgttaagtgtacttaccgcagtaaaataaaatttttcaaaaccactacctataaggtgaatgagtaagaaattggactttattaaaatcaataatgtcttttattttaaaaagaattaaaaggaagaaaagcaaactataaggtgaagttatgtgcaacatctctaagtgataacagattagcatgtcattgagaccttttagtgaactacttcaaaattgtgctgagtgcttactttacagtgtctagataaatcataggttaaataatgtaatgcctttagcaatcagagaagccagaactctcttgagtaggacaaaatatacacattaaatacagaactacaaatctggaagactcattgcagtttttgaaatgtatgctctttcatgtatatgtaaccattgcagtagaaggtcctggcacaaaatatagtgatgtgtttggagatactttaggaaaacgtattatatagacatattcccattatcatgaatgttagtcttgggtaattggaccttggcaaattggaccctgaatactaagaattttcttcaaaggcattcttcctcttatggtgacagacacaagcaacattatttttattcacattatgaataccatatgaaatcttgcactttaaaataattttggtaacaccatttttataagatacattcattatacaactgttcacactttgcaaataattaaaatgttcttagatttatgtgatgatttcctatgaagcctatatgtagcttatacaagtatatattcatttacttctgtttttgatgttcatttctccttatgtagctcaagctactttatatctttgaaaatatccatctcttggtctttgtagatgcagcattccacattataatcataacctgggatgagttctttttgtaagcgtttgtctgatgcaacttgacaactttgaacgctattttccttctattgtacttgtaaatttcatttccttattctgctttataattaaatgctattttcagcaaacataaaaaatgcaaaaatgggccgggcgcggtggctcacgcctgtaatcccagcactttgggaggccgaggtgggcggatcacgaggtcaggaaatcgagaccatcccggctaaaaaaacggtgaaaccccgtctctactaaaaatacaaaaaaattagccgggcctagtggcgggcgcctgtagtcccagctacttgggaggctgaggcaggagaatggcgtgaacccgggaggcagagcttgcagtgagcccgagatcccgccactgcactccagcctgggcgacagagcgagactccgtctcaaaaaaaaaaaaaaaaaaaaagcaaaaatggttaaactgtcttcaagttgaaaagaaaatgtgtctttcttgacaccatctttggatagaaaattgggaagtcacgaagactacctcacaaggtcattggtcagattaaagaaataatacctatcaaataatatagtaactgcacggtaaatgtcaactgctcatgatttaaagtgtttaagattgtagtccaagaggatactctacgcttttaacttatgaacattttttatgtgggggaaattcccctgaatgatgaggaatttcgttcgttttaggtggatggagtttccagcatgacattcaatttctgtcaaggctatggctgtgaaactgagagtgtggtttcattaaatggtgcttttaatctcccttagtttatgtgagaaagtggtggattttggtgtggtttttttttcattccagtttcatttcagtttccaaattaaatgctcttcttaaatatttgcagagaatctgaaaattttagtgagaggaagattaacagtctcagcagtgtcttgtgaggtcacgaagtactgtctattgtttatacagaaaaaccttctcacttttgctaagcctaatccctgaattcatggtttgcactgctttgattgattgatttgtctttctaggtcagaggtgttgaactccggtgccctttggaccccctcaccatcttcataataattttcctggcctctccttgtgtatttccaccctgttcccttcagtccatgccagctcacattccttctgtgtttctgtgctcttagcctggcatggcaactctgactcctctaccctctccatggtggcctccccagggtgccatctcccacaggacttgcagcgagctgacactaccccccaattccatggcagggactgctgggaagaaacgtcaacagcgtctcctctgaggagcagctcaagctaatcctgtttgtttttaccaatgtagtcgtggccttctagtatgcaagcctaggaacccactgctgccatttcctttgatggccactgtttctctttatctcagtttcttcttcatcagccagactcagccagacttccttcagaggggctttgtgtttgagaggcctcactaggaggcccatcctcatctttggaaaactggctggtgtcacaaggcaaggctaagcatgttcagtctaaatattttttttaaaagaacatttcagtctgagggtaaaacgtgatttgacaatgtgatttaacttgggatggtcaccgactgtgaccaacttcacgctggtgaagcatttagaatgacttaaatcattttctcatggaaaaatcaaaccttttggagctaaaaaataaaaaagtgattgagaggttttttcaagacatcccaaatagggcatcattttcctgatttagaccctgtgagcaagaaaggcatggaaagacttctgcacatccttagctcatgcagtttaaatctgccacatcctcaatacagcaaacactcactgcattcaaaacacggaacactctgaagtgtggaatcccgagtttttgccattgttgataggataaagaacccatgcccattcttcaaggctacaaaaaccctaaattacatacaataaaaaccgtgctcctgtaacgcagctgctacagcttcccttatagagtattagagtaaaccagccccattctaatgctctcatgattccgttttgggtggcagtgcacacttatgagcactttggaagggtactcaaagcaggagcttctgggagactgtgtgtttaaatattaaaatataacccagtgtggaattggaatcattttcttcaggcacaggaaagccacgtcattttttttctccttccactattacctttataaggccttgtgtaaaactatgtcccagagaggagatttacttctttaacctcatcagtaatactcatcattaatactaagggtcccctcagatgggacttgcaccctgccagggagatgggggaaagactgtgagtcccacctccttccagtagagctaccttgggataccgtgtgttgatgctctgaatcagtaaggggaggcctgagtccagcagctaaagcatctgcttctgacagagtcagaaattccagcccatccctagggccgattgtgcccagggaacattgcagatcctcaagtcaggtttcgaaccagtgcatttactgttgttttgttttgttttgttttgtttttcctggagggaattcagatgtttgcaatatgtccccttcacactgtttctagctgtggatcccaggcgagtagttccaggaatgggggctagtactaagggcagagctccgccttctgcctccctcctcctctctgggggtctaagggtccaaggcaagcctctcattattgctgagtgcagtcattggaaaccatttggaccagagcacagaagcgtggttaccaggacctgggaacagaggaaataaggagatgttggtcagtggtccagacttgcagttaagttccgcaggcctaatgtacagcagggagcctatagataatactgtattgtgtacttgaaatctgctaacaatattgtatacttgtaactggctaagagggtagatcataaatgttctcaccaccataaaaaaataaaaggcaactgtgaggtgatggatgtgttaattagcttgattgtggtaacgatttcacaatgtacacgtatgtcaaatcatcacatcatgcatcttgaacatagagaatttttatttgtcaattctagctcagtaaagccagggggaaaaaaatgtctgaaaccaacaagggctccagtgagcctcggtcactgctctcttgatgatgtggatgggtggctcttcttagttcctatctgtagaatggggatattcatattgttgtgaacattgggtacagtggggctatgtcaattatttggaaagtggactgactcctagtaatttgtagtaagtgcaagttattaccaacacaggtcactgctgaccagcactgtggtggggcagtctctatgcggaatttgcggataattgtgatacggcagttgaagacatagagtgttaacataaggagaaaaaatagtgagtaataccatgaggaggggcaggctgttggcaaatatgccaatgccacgggaagatggcagacaggaggatggagaggactggacgaggctggataagagggtgtccaggcgtgggcagagcacaaatggggatggggaggaagggaggtctgtgccgggatgttgtaccaatgcgtgcaccatggtggctatagtaacgggttggtttgtaagcaagcacgatacacggagccttgagtatcatgcaaagaatattaaccccaattctgtaggctctgggtagccgtgatacatttttttaatagcagcatatatggttgaatatagttggagaatatagcattcaatgggatgcgaatctgaaannnnnnnnnnnnnnnnnnnngttggggagggagagggaggatttctacacaagaaaggaaactgagaaaaggcaggatgtctatagcaatgtgcaaggggcacctgcttccaccagggggtcctggcccagatctgctagcatcacccggttcccagggcctcctagccagaggcaaacttaccatagagcctgtaaaggtaaagcccaaggacccctcactagcagaagccttctcccaggccttggggaaggtcgtagctgtgtgttcacttggtcttttactgcttgtgatatttacaagtgcaagatgttttatacaaggctgctgtctttttctcctctgacatcccctgtcacctgctccttttattaagggcaggtgattatcacccggctaaggggatgctttccaaacaaggttagtggaatatggggcatggcgacttctgtctaggatgaagtgcaccccgatgttattgtctgtcaagggtctagggctccagaggtgtgggtggcatgaaggagaaacctggagcccacagcttgtgtgtgggagccccaaactttacacgagagaaacctgaggctttttccacactgcagaatcctaaacatgcaggtcctatttccaataatgctacaagtttaagtaaacttctaaaaactatttataatgtaattctgcttccccgtgctggaggaaataaatatattctgagtcttgctcctaaaaaataatgttattaaatcattgtcatggaaggtcgtgatcaaagagtttgcagccaaaagatgcagggcaggtgagaatgatgaaggagggccagtggtcagattaataaaaataagatctattccttttagatgtgatttttgtgatatttgcagttttaaaatatgacatttttctcattagaaacaaatattgatttttcataattcatattaataatttatattaatgttataattttgcattattttcctaaaaagggcctgggttgcattaacatcaggtgactgacatggcctcctcaggggagccacgtgcccctctgtggcaacagggcgtcaccccctgctatgcttccccgggcctgtcactaacccttcacaacctgccctcctcggagcagccttggtcctctgggctctgatgtggctctctgactgctgcacccctcacctttccaacttcagcctggtggtctggggaccagatgtggcctccagcagagagctcccatcttgccaacagggcctccttgtctgcaggtgtctgccctcccctggtgcggggccttcacagggcttaccagaccccacggtgcacctgtcctcaggggtgttagtctttatgtaaatctagcacagtgccccgcaaaggactcttaataagggaggtgcctgggctaagctgggaagaatgctcaaccaggcggccagaccttgggaaaacccttgtgcctgtgaagcagggacaggcgcccagggagagagggaagcccaccgtcaaagccatgtttcccaggacaactgaataaataacacctgcaagaaacaaaaaaacatatatttgagttatgcttccatacctgagaaggaaaaaataaaaatggttttactctaatcactgcattatacattgttagataagaaacctgaacaacctttaattggcaaaggcctattactaccattttgtaaagaaaacagccagtggcttcttttcctgatttgtttatctaactcaagctaacgagctgaggcccaatagggggaaagaggctttgtcccccagcaagtgtctcctgcaaccagaatctcaaggttcccatcctgctctaatctcctttttttcatttggtcctcttctttaataaaggaagggagaaaagtgtgaggaaatagtttccaaattttctagaagttacagatggatattgtgaataagcataacttttcttctgttttcttaaaatgatccgcgtgtcgcggtaattcgtggcttatttggaaattattgagctctgcagtgactgaaacaaatcatgaacttgggctgttcaccagcctgatggtttacattggagggtccgcatgagtttcatctgttagtatttcagacacattaatttcatagcattaaggaattatatagaatctttattttcagatagacattgtaagaattttttttctttgcaaaaaggaaggatgattaatgccattacaaagtaagtttatgagagaaataaaaatatttctatgtgggtgggaagtgtttcttcaacatttagtcaaatgtagacacaataaaacatccacaccatgcatagcctcactctgtcttaaagtggcattcatggcaagatttcagaacgaagaagagcttgcacccggaacactgtaggacgctcccctctgctacagggaaagagtacgatcttgtgtgggacaggggtggggattcccgccttgctctgcaagcctccacctcatggatggttctcgaatacttcatgcaaaattcagacctatgaaagtccttccaataatggaagatgggacataggaagaaaccatcccatcatgttcttcttgcaaaagtaagatagagaaatgagaaaaaagtggaaaattagtttcaagagggaaaggctaactctaggcagggatatggaaatgtaaacttttagagtcagaagggtcgttacatttaatccaatccgacacttgcattgtacgtatgaggagactgaggctaaggaaggtaaatgatgtcgcacagtttatgaacagtgtaaatgtggaggacacttctgccctggggttcttctacacgccccgagtctaacacccagactctgctgctgatgcccctctcagtcgcatccagggaaatggatttgagctgcagagtttagaataattggtacttagtagctgtgtgactggatgaaggttactcaatgtcttaggcctcagtttacccttggaaggaagggtggtcactgtctctgtgtcaggaatccagtcgcctggcacagaatgcacctgtgcctcctgggagggatgctagaacacgccttccatccagctctgtgttctcccgatctcatactgcatcttaaagtgctttatggggaaggggcacaaactgctcctaatggggatggagacagaagataaggagaaaaagggcgaacaagagggccctgattgccagtcactctttgccttaccctgtgtatagactaaaaaggctcattcagaaattgttagtggagggtcctgtaattcaaaatatttttgacatattgagtaatgttggtaaaattcttcaagttttctgagcttcaatttctctgttatacttaggttaaacaaacaaaaagctttgaacaatttcagattccaaaattcannnnnnnnnnnnnnnnnnnnnnnnnnnnnnnnnnnnnnnnnnnnnnnnnnnnnnnnnnnnnnnnnnnnnnnnnnnnnnnnnnnnnnnnnnnnnnnnnnnnnnnnnnnnnnnnnnnnnnnnnnnnnnnnnnnnnnnnnnnnnnnnnnnnnnnnnnnnnnnnnnnnnnnnnnnnnnnnnnnnnnnnnnnnnnnnnnnnnnnnnnnnnnnnnnnnnnnnnnnnnnnnnnnnnnnnnnnnnnnnnnnnnnnnnnnnnnnnnnnnnnnnnnnnnnnnnnnnnnnnnnnnnnnnnnnnnnnnnnnaaatcatcgttaagctcaaatcctgccaggatggagggaaggcagctgtcagctcacagtctgttctgcagggatgcctttgaacttgctgctgcaccatctatatgcctgtctcactctacacctcactgaggtcttggcttctgtatggctttcccatgtctccagcacctgcacaccccagaaccctttccctccttccccactctatcagtctggacgggctcctctgacaaactgctctggatgcttctcacccagggcacgtggttcacgtgagtcagcagagctctgctccacacagtctctcagggcctgaatgggtgagcaggtcccacatgggctcttccagggccctccgaggagtggcacataccactctgcttgtgtttcacttcatcgtgagtgatgtggccacacccagccccaaamggggaacarcagttctatcacatgcctgcaagcagggaagccgcggtatttggcaaacagcaccaatgactatcatgatctgtatctagccactgaatattagcttctgtctttctcatcagagaaaaatacacttctcccatcttcaaaggaggcaactcaaaaggtcaaccttgttccggcccaaggtcaaggttatgtatatatgcgtatacctgtcctggtagagacatcaagtctggatgtggttttctttgatccactgacctgtaaactaagaagacctatctgatctccctcctgccccacacgtgcagtgtatgtactaaggtggaaaagggccagcctaagtccccactgggcagatcctgatgggctgggttccatgaggtgaggtttttcttagattcagctctaattctttccctagggtggggcccctgaggtatgttttcactctkactcttgcctccattgtctgggaatatattctttttccattaaccatttttgccatggtaaagtgggcattggataatacacctcctttggggtccaagcagaggctgccatttgcccatgaaagacaggcaggcaacggtaccattcaatctcaagtagtcatttttcttcctgacttgtggttcctttggcagaacttccttaaaaccgagccaactttctacctgaggccagcttcacatgtgcacagccacattcagagttctttctctgtgcaatgccaagagctgctgtgcatctttgcttctgcaggccagcacctctccctctccagggctttactctgagcctttctctctgaagtataggtatttgggccctacagctttcagtggaagggccacaccttagtttctttcccttgagccatatttgcataattaaagaggttactgggtggcagcctaatccatttagaggctttagcaatgggtgtgattatttctgccaggttgtttcaatggactttggcactgcaaagtccccttagagatttcacccatgcatgacaccaggcgtctggcttccagtcccacattcctgagctctaagcatcaatgctacctgctttcgtttcatttcaccactctttgaaccccatttttgtatcagtcagcacatgctaggttatatgacagaaacacacacatgcacacactcacacacacacttacacacacaccttcactgtgtggctctgggttcagagtctgtcagtgagaggcatgccaagtttcggaaggcagaaacaaggctgaggccattcatccccaagggcacattcagacagacacatggacttgggagggtccatctggttgctgagatgctacatgtgacctgccatggctgctgagccatgagaggcttctggaaaagctcgctgagaacctgctcccagctgttgctttcctgccatttgctcccccaactgcacaaatgcttatgcaagactcacattgcctgttccataattcctcctctgctggatgcctggataccttttgtttcctctaatttgaatccttaataatacaccagccttatttttgtgtgcagtgtaaatgaccaccaacctatttatttaaggcccatcttccctggatagaatataagctctaggagggagggggtttcttgttggcacagtgctgggtcttccttgctttgaaaagcctggcatactcagtgaagcaaagaaatgatgaatgaatgcattagttaatgaaagaccagttgaattataaacctgaaattgaattacctatcacagaaagattctttaatgggaaactcagtggaaagggtaaatatgagatttgttgagaatcaaaaaattcagactctgcaaaagtaatatgtttataatatctaatacataacaaaaattatgcaagatataaaaatcccttacaatcagcctctacatccttcttaccatgaacctaaaataattctttaaactgtgatgaggggagtggcctctgaggcagcccagtctgcaggcacttctttgggtctcctagagtgcccctaggatagaatcagtcctatcctaaccatttgatggctgcacaaagtcttactgggcaccgtgaacactgcagtggcttcaaccctgggcctttgcctctgtaatttgtacctcttcagcctgctcttggaattggcatttggctgggtggccgtcctctctacagttctttgttgtattttatttcttacttttctttttgttttgctttttgttgcttgagaagactcaagtacaaatagtcataactattatatgaatgaatatgaatggatcacttactctctgccaggcactaagggtgctcatttaatcacttccttttatcttcgttaacaccttgagaaggtggacactattatgttccccattttatagatcagagaacagaggctccartaggtcctgctacctgtcaaggcttggacttgggagcctagggtttgcctccacaccctgaaatagattctactgtctctcttagcccctcttcacactttgtatatttattgraacttaagatttatagtatgtcacataatgttactacactgttgacaaataatattggtcatcattcactgagtgcttgccatgttgaaccagtctctatcagaaagagaaytggggaggtgaggatgtcaacatggagagaacacaacgtttgacaaagagaacaaattatacagaacatttattaatagaactgtcttgcctctccttctgctctgtttcaggaataccaaattgacatattttttgctcagacctggacagatagtcgccttcgattcaacagcacaatgaaaattcttactctgaacagcaacatggtggggttaatctggatcccagacaccatcttccgcaattctaaaaccgcagaggctcactggatcaccacacccaatcagctcctccggatttggaatgacgggaaaatcctttacactttgaggtaagatgctgcatcratctttgattactcctggtttaaaatgggatccttaatttgaatcactgtaggaatgagaccctattttcatctctaagtctattctctttcacgtgagacatactacagcatcctgagaaagtctgccctcatgcmacatgtgtaaaaataaaagcatacagatgatccacagagaatataagttcatttcttcagaatctatttctgctggaagtaggctgtgaaagttattcttaatagatttacaccataggtcctctcccctaggaaaatacagatgtcttggtgcactaatcaacaaatgtagttagagtaaatctgagaccacaaggaagaggggcagagtcagcccctttcccagcacatccctaagggaagtggcagctcccctggagtgtgtcctcctggagtcagggaagtcttcgaagaaacccagagaggtaagggaaactgagcttccaagaagggaactgactcgcccacagtcaccactgggagcctgtctctcccaggtctctccactgggatggtcagagtctaactgaacacacagcaacacagcactagcartgacgggccctctgcactcctgtctgctcgcccagcacagggactggatggtccctccagcagtgtcctctgagcgggtggtgctgctccagaggacactgcactcccttcttcctgaggtctcagaagccctgggtgcatctaggctttgctgtcatgggctcactctcactgccccggggcacagggctccttcttgcacctgctttgtggctgcatctccccactctgctctttctgcctcagggcttgacccctgtcactttactctccttacccatccctgctggcttagctcatccatcctgagaatgaaagccatgtgcgtactgagaattcccacaaggagaaatctgattcctcacattaaataaatgtccacagcacccacacaggcgcagatggacattaaaataagcagactgtgagacagcattaaagtttcagggaaatcctcattttgccagggagggaacaattacagcaaaaacaaacaaacaaamaaaaaaaccaaaaaaaaaaaacacgccacagctgggaaccatgctgatgaaaaacattgcgagctggagtttgtaraagttgtctcctcatcagttgtaaagccatacaccggagactctgacatgacacggaacttcagcaagccagggcgaagacctggccagttctggaaccccgtgtagacactgaaatatggggctgctgccctgggaggatgcagggcccccatttggcagagctaccacctgcctagtgaaagaggggcagttgtccaaacaggaaatcccccccgatgcgtgcattaatttggcataatagctgtttagataaacacaccagtttccaaatggaggaaggatttaattcaaacagattgaaaacaacttataaaacaacagttggttttgtctcctctctgacttggcgtgtatttctagacacagttggaattttactaactggaattctctgtgccactgatagttaaaagcaaaacaaaataacccaacatgaaagcaacacagcacagtctcaccgtgaatggttcccgggccaagagtgagccgcacatgctgccctgggtgacggaacggccctctccatccccacatggggtgccgtaacggccgcmggcyttgccctgtgctgtgtgctgagctagactgayacttggctttttcgcaggctcaccatcaatgcygagtgccagctgcagctgcacaacttccccatggacgaacactcctgcccgctgattttctccagctgtgagtaccagtccaagcccggggtgtgcatgctgtgtgagggatgcctagcctggtactgcttctgtcaaacagtcatgygattgatcacagtgtccctgcacacacagagaaaactgatgatggtttcagtattgaccacctgggtgttttcactctagaccttgtcacataggagccatgttacaaaataggtgatctcgataaggctgtgagcaacttgaccattgacatggaaggattcagaaactgatgaaccattgatttaccaaagacccttatgctaatgagctgtgcatactatttggaagtatacaaaattcctatgtaatattttagatttaacattatcttttttaaatttatttttaatttttatttatttatttattgaaactgagttttgctctygtcgcccaggctggagtgcagtagcacagccttagctgactgcaacctctgcctcccgggattcaagtgattctcctgcctcagcctcctaagtagctgggactatgggcacgtgctaccacacccagctaacttttgtatttttagtagagacagggtttcaccatgttggtcaggctagtctcaaactcctgacctcaggtgatccacccacctcggcctcccaaagtgctgggattacagatgtgagccactgtgcccagctgatttaacattattttaaagtaaggtgatttgtctaccaagtagaaagatacaaatttttctttaattttacttatatttgtctcattgaaccattgtaagatgatttaatttttcgtagtattttatcttccaacattttacttatggtagatatcacagttaatcctttacaagttcttaaagacaacatctactgcttagtataagagtacatataaaaggaatatcaaatatcaaatctatttatacaatttttaagttaaaatcaaaatggaaagatatctggtgaatgaatttacaatggggcattttaaatgaattaatcacaagtacttatgtatgactcataagaattcagtttattgtattggctttctttaaaattgcatatggggctgggcgtggtggctcacgcctgtaatcccagcactttgggaggccgaggtgggtggatcctgaggtcaggagatcaagatcatcctggctaacacggtgaaaccctgtctctactaaaaatacaaaaaattagctgagcgtggtggcaggtgctgtagtcccagctacttgggaggctgaggcaggagaattgcttgaacccaggaagcagaggttgcagtgagttgagatcgcaccactgcactccagcctgggtgacagagggagactctgtctcaaaatataaataaataaataaataaataaaattgcatatggaacatgacaaatctgatgaaatctcatgtagaagtttttgtggctttcttcattgaatgttatagatttttccctgaaccttcaaatgtaaaatatgttcatcgcttattttacttttgcttctgctcctcgcaagtgtgcggcccgtggaggcccaggtccagatccagagaccagcagagctctgcacaccatgcacgtgttctcactggaaaccttatttctttctgtaatagcttcccttgttctgtcatactgtaaaaatgtgtttaaatcattcacagagccttttaagtgctcagttccaggaggggattgtgtgcacatggacttacacaatgctgccagaaagaatagtgcttgtataaattgttttaaaaagatttttatagaaataaaataatttaaattcttaaagacaattcacacatagtactcagggaaatacatgaaagtgaatgcctttctggaattagttggcaatgagcataaagtactaggaagaaatctggcatagtagtaaaaatggtttgtgtgaccaaccacatctatttccctatttctggtgtgtcgtggtagtgatgggtggtcagagtgaatgtaggagccagggggtggacagtcttatatataatgtcagaaagtggcaccttcaatgcatgagcaaagaaaaattatcatatctgaaaatcagggagtggcaggatcaaattcatgttcaggaatagtatgaaagatcttataagagcaaaagtgggtgtacacagttatatacctattggaatggcaaaaatctgaaacactggcaaccttaaatgcagtggggatgtggggcaacaggaactctcactcatcgctggggggatgcacagtgtcacagcccttttggaagacacctgggtcgtctcttacagaagtagacatactggtactatatgatccagaatttgcactccttggcatttacccaaatgaattaaaacttatgtccacaccaaaacttgcatacaggtgtttatagcagctttcttcataattgccaaaatttggaagcaaccaagatgtcctttggtaagagaatggataaacaaaccacggcatattcatgcaatggaatattattcagcactacaaagaaaggagctaccgagccataaagagacatgtaggaaacttaaatgcatatttactaggtaaaagaaaccaatctgaaaaggctgcatactctgattccagctatatgatattctggaaaaggcaaaactgcggaaacaatagaaaggtcagtggttgccaggggttgtgggcagagggaggagttttaggacagtgaaactattctgtatgatactgtcatgttggacatatttgtccaaacccatagaatgtacaacactaagaatgaatgctaaaatcagtccctggactttgggtgataatgatgtgtcaacctaggttcattgatggtaacaaatggaccactctggtgggggatgttgacagttggggaaaggagtacttgggaattctgtactttctgctcaatttttctgtgaacctaaacctgcttcttttttaaaagtctagtaaaaacttattggaggtaaagaaatcaattaggaatctattgcaatcataaaccaaaatgttctgatagagccatattatcaaattaaaaaaaaaaaacttggatgcccaaaatataaaacagtgctttaaagtataagtttttgaaccactttacatgtgtagcattaattcatatgtataggattcactattcataaatgagaataataacactgtcctaatgaaaacactcattggtaatttggagtgatggaggatacttgcatctaaatcagtttggtacctaagttgtttccacatgatgggtgtccattttcaggaagaggccaatcctaataccaataagcaactgaaagtgaagtgggctgggcacagtggctcatgcctgcaatcccagaactttgggaggccgaggcgagcagatcacgaggccaggagttcgagaccagcctggccaatatggtgaaaccccatctctactaaaaatacaaaaattagccgggcatagtggcatgtgccagctcgggaggctgaggcagaagaatcccagctacttgggaggctgaggcagaagaatcgcttgaacccgggaggcagaggttgcagtgagccgagatcacgccactgcactccagcctgggcaacagagtgaaactctgtctaaaaaaaagaaaaagaagaaaagaaaagaaagtgaagtggtgtccctgtttgtgaacagttaaccttgcaatgtcctggtatttttcaattaaatacactctgaagctgtatttttccacttaaaaattttatagtaacaaagctgaacaacttgttatattcactatcatacaaataaaagttaggaaaactgcccaaaatgtacagtaagatataaagtgatcataaaattgagtaacaacttttaggctggtcttggctctctgagtttccaatatatgcacagagatgaggtggtaacatttactatataacatgtttgggtaataactttgatttttatgttttaaatagttgagatttttgaaataatattttaattaattaaaaatttcctatagcactttctgtagtcattgtggttaaggrtcacattttaaaaattcctaaaatgtagtttaaaaggtaatgttattagtttatttaaacttgttaaaattattaaaactaaattttaaattacttatatggatgaattaaaagtgattttgatatggactcttggacaaacatttttagtgtccagaacttggccataattgtgtatttagtgtactcatagaaactgaaccataaagaatattcaattgcaaacagcattggttgttttattcatttcctattactcgtgcaacaaattactgcaaacttagtggcttgaaacaacatcaatttaatatcttacatttctgtagatcacaaatctgaactgggctaaaatcaaggtgtgggcagggcaccattgccgcctggagtctctgggggagaatctgtgccccggcctttttcaagctcctagaggccgcccgcattccataacgtgggtccccttcttctatctttggagccaaaaacagcacctctctctgatcccacttttgttgtcatatctctcttagaccacagcaggagagctcccctggttttgaagacctgtgtgattaggttgggctcacccacatgggccaagatgatctcccatctaagatccttcacttactcacatctttgaagtcctttctgccgcgtaaagtgacacagtagcaggttctggggttgagcaagtgaacgtccttgctggttactagtttgcctgccacgagtactagtcactcagagcattccaagacctgggaacctgcctggtcgatatgccactcacaattctcagattgtcaggagaatctacacagcagaacaagcccaaaatacatttcactaaaaggaaaaatcattccccagtgaattatgacaaactgtattgtttaatctgtgtcttaatatattttatggaaaaaattaaataaaaaggcaaaatacaaattttggtcatttagttcctcattccttaagttgttttgaaartaatttgttttcttcttggttttcttttgattaaatgtcagcattatgaaataaatgtttctttttgtccagctgattggttaatatatattagtatgagctttattttactcatgatttcacttccaaaagttgtattgcctttgaaaaattaatgtgtctagcttagtatagctgcagtatatacctttaactaaacgatgcaatatacatagatgtcataatctgttttaagtcaactaaaaaattaatgacaaaatgttaagaatgccagttttacaactctatgccattattttttctaaagagaggtatctcttcacacacatacacacacaggcacacacatgcatatacacttctgtaarctaatataggggttcaccggacctcgacataatctctttctgttgtttagtttgagatatagaaaattatatatgcaaaataaatgatcattggcaattgtttaaattatgtactagattaaaatcccaaagttgagatgccattcctttaattaaactttcaacagtaaaataattagtaccccactgttgactctttattgtgcaatgttaaatcctgggacactggtcacactaatgcatggcactgcygctgttagcgtgtcttgaaccttatctttaaaatgctatggtatgagaagtatgcaagtagcatatatcattactctatcaaacaacaagtaaatgatttctgaagttcggttggatgtctatgggcaaaaaaataagcttgaacttatacgatagttaattccaaatgaattgaggccctaaagtcaacataaaaacacaatatattagaaaaaatacataggaaaaaatattcacgaactaaggctagcaaagagtatttatacttgacactgaaagcatgatccctgcccccacaaaaaagtgataaatgagaccttgtcaaaagtgaaaacttttggtctaccaaaagcttgtcatgaggttgaaaaggcaaattaggctgggagaaaacacttgcaaaccagaaatctgataaggcttgaatctgtgatatataaatacctcttaaataatttcatttctttttatgactgaacaatattatatcatatgcaatactgtgatttgtttgttcatattctgatgggcacttggcttgctttcatcttttgacttttgtgactgctatacccattggtagacaagaccccttttgactgttgtgactgctatacccattggtagacaagaccctgtttgagtcccagctttcagttcttacgggtatattcctagaagtggaattgctggaccatataataattctatatttaattctctgaggaaatgacaacctgtttttcacagcagctgcaccactttacattttcaccagcaatgcacaaagattttagtctcttcacatcctcaccaacacttgttatcttttccctttttattgataacagccatcctagtggatgagaaattgtagctcattatgattttgatttgcatttccctaatgactaaggatgttttaatacatgctataccacggatgttcagatgcatgctatgcctttggaaacatcatttaagtcaaataaggccaacaaaaaagggatgagtactctatgcctgcacctccatgaggtatctagagtaggcagattcacagagaaagcagagtggaggggaccagggagtggggggaggagagaacgaggggagcacagagcttctgtgtgggaggatgagcaggttctggaaatagagtggcgattgctgcccaacattgggaatgtacttactatgactgagttgtacactgaaaatgattaaaatgatacattttatattatggatttttaaatcacattttaaatgtatactaaaaactgaacaacaacaaaacaatccagttagaaatgggtaaaagacaggctgggcgtggtggctcatgcctgtaatctcagcactttgggaggccgaggtgggcagatcacctgaggtcaggagtttgagaccagcgtgaccaatatggtgaaaccccatttctactaacaaacaaacaaattagccgggtgtggtggtgcatgcctgtaatcccagctacttggaaggctgaggcaggataatcacttgaaccctggaggcagaggttgcagtgagccaagatcgtgccattgcacttcagcctgggaaacaagagcaagagtcagtatgaaaagaaagaaagaaagaaagagagagagagagagagagagagagaggagaagaaaagaaagaaagaaaaagaaagaaagaaaggaaggagagacagagagagaaaagaagaaggagaaggagaagaaaagaaagaagatgaagaaaaaggaaagaaagaaagaagaaattggtgagagacatagtcatttgaccaaaggtgatatttacatggaaaatctgcatgtgaaaagatgttcaatgtcatcagctattattaatagtaaatgtaaattaaaaccacagtaagctatcactacatacctattagaatggctaaaataaaaaaatagtgggaacatcaaatcctggcaaggatgtggaaaacctggatacactgctggtgggaatgtagaatgacacagaaaatagtacagaagtgtcttataaaactaaaactgtacttaccatatgacctagcgattgcaagcttgggcatttatcgtggagaaatgaatagttatgttgacacaaaaatctatgtatacatattcatagtagcactattcttaatagcctcaaaccagaaacagccctcatgttcttcagtggttaatggttaagcaaactgttggtacatccttaaaatggatgactactccacaagaaaaacaaattactcatatatgcaagaacttggtctgcaacagcattcgaagctgagtgaagaatgccagtctccaaaggtcacatatgtgggatcccatttatataacattctcaaaataagcaggaagtgagagctaaggtggagttgttaagtgtcttctgttatttaaaaaatgaaagaagacctaaataagtagaaaagcatcttgtgttcttgaactgaaatactaaatattattaaaatgacagtactctacaaggtgatctgtattggttttcctctgttctgcttctctttcaaacttgcagacactttcctcttattccctgagtagcatcatggtctgcttagttctaaatgtcttcattttcagatgaacacttcttgtatcttttacaatatttcttaaatcatagctgtctgattgaaatacaatgcaagccaccgatacaattttagattttctaggagtctcattataaaaagcaaaagggaacaggtggagttaattttactgcattttattcaatacagtctatacagaatattgtcattttgctatgcaatcaatatgaaaaattatcaatgaactattttaataaaatagcctgagatatttttatgctaagtcgtagacaccagtgtgtgttttatgacatcacacttcagtgtagagcagccacatttcacagctcagtagcctattgcctctcaaggccaccgtgctgctggaaagcacagtctgagacccacgcagaggtcttcacacaagatgcacatcttcaaaaccctagattttgtttagtatcagtcatgttcttcattcctcttttcccattttttctccctgtttatttccagcgtctttctttatacatgctctgcactctctagtctctcagttccagatttgaaatccaactatgagatgtcttgactaacctaaaaaaagccataaaatctatgcaaatatgcatgtatttgtatgtgcataaactaaatctctcacacacacaaataagccttgtgattcaaaaagttccagaccacccgtgcttctctaaaccccttcctatacattcactattggaacacaggctagagaaggggaggaagataccttcaagtgcaacgccgtctctgaatcaactaggactgttattaatagataattcagcactaaatatggagcgaggggagtcttaaagctaagaaatactagtcattgtttgttactgttcggctcctccttgggggagattctgctattaattcatgtgcccgagctggtcgggaatgtggggtcagcgcttcaggctgcccttgagtggggccagtctgaaaataagccctgtccgcctcaggaaatggaaacacatgtccgcatcacctgctgcttttgatactggtaccctaaaagttatccatcaacacacttcttgtggacgtgctgttaaccaggaacgtgctggaaagacctgtggttgctccttctccctgcagtgatgccccccaccccaggcattctttccatctctctttttaaacatacttgctatgaggagatgccagaaaaccaaagggcaatggaaaccgatttaagatgatcaagtcccctgatgtggtggttctgtggtcctgaggttaagttcattgctattaagtttgattcagacgctggttcacggcactcgcatccttccaggccacaggtctgtgcagagtgttgacttggggaaagattctccatgcatcgcaggaggaccatgctcctagttaggtgctcagtgcccccagggaggcaccatgtgcgtttcatggtcagctttgttccctccagacagtaaggtgcctgaactggacaggacaactacatttatctatgttgctatcaggctttgcaatattgactggccgtgcagaggtacagacaaaccagcaaatgtatatttttgcactaatacctcctttcttcctgtttgcagagcatatagagtacagcaaactgtatttcattctaaactcttgttgatgtgacctagggagagaatcaaccactctttagtcatccaaatgcttcatatctggtgtgtgtattataataagccaggtcaaaatctccttgtcttctgcctactgcctaagtgcactaatgaggcggcccactgccaggtggggcatcccaacaggtggggccttcccccatgtcttttgctgtggcaggaaaggagcatactgctcctttaggagactccaactaggagggtcctgtctcctagttggaggagtaaatctctaaatggcagcttctgcaaggtgtccacagaggccccgggtcctctcacacagaggtaagaggtgtggacatccaaaaggaagtccaccttcccaggtgagggcggagcctaccagacatgtagacgtcaaggtcctaaatgctcaagcatcttcttaaatccacaaactctggaagcagctagagggagctctgcggcatgtccagcatcctggacctgtgagtaagaatcaagctgttgccctgggaaccaggcttcccatcaaggaccatgctaggcaggcctctgccacaggtgaggtggatgtttatcatctcctgctttgcctgtttcatatgctccaccccttgccttctcccaccccttcctgtccttgcttcccgttactgtagacttgcacaccttgtggaatgggaggctgctggttgcagtcagtcgggctggctgtgcattcctgctaagatgacagtgaagtaacagggcttcagtatcgtcccccaataactgacctccttactttggtggaaactcactacagagggcaaaccactgtacaggtacacaggattgcgctggttccttttgcccagtcttgaaggtgggttattttattccagctttagtgacgtaatttgttcagagaggttaagaacatgatcatagcattgataagagacgccagcttctgaggataagaaggggacttctcactttgaaggtcatggccttctcactccatttaggtgaccctgcatgacttgtaacagtgaacctggaggcatcgtgccccttcctcaaacatcccagagttgatggagggaggaggcgttggggcaggaaggctggggaggcgagcagtgagggtgactttcagcatctctcaggttccatcacacagcagctagcctctcctcttgtgtcagggaaccttcttcatctctctaaacccctctaaacctccctttccccatctgcaaggtgggaatgacagcaagttatacgatgatggaagggactctaggtgaaggtgttatagattcccacttaagttagctcagaaagcgtacaaccatgggagtgttgtggctacatgggcaggagcgggtgcgagggataattgcacagtttctctgcggcctctggaattcccaggggaaagaaagtgcagttgtggtagacacattctacacaggcaaggttttcaagggcagagaaaatagccaaaccctcactaagccatcagcctttcatactgggtttcttacttctcaattttaaataatctacccaccaatgtacatatgtctgtgcaaagattgcaaataccaagctctctgttgagttaaamatgcaaccaggagtatgatccatactctcctctccatagtacaaacaacttgaaggagccactgagagttcttggcattattgagacgtttgctctgtcaaaggcaaattttgcaaaaataacaaggtcagaaaaccttcatgtttcttacatcttccataaaggaaaaactgaagtcaataaaaatggaaccaaagcttcagcaacaattgtaattctaatcacatggttatcacctccttgctttatactagtcagacattttctatttttcatgcaatgtaatccgaaagtgctgtcttactgatggggcagacaaaccctggagagtatacaaaagaaaccatgtaaagcaaggacgactttgctaagaagaaaaaagtcctatgctacatctttcatggttctgttatgtacttttgtgcagcatttgctttttgaaagctgttttttaagaacagagattcaatgatgcatgcttttgttttggggtgtgttttggagggaaagaagggcaagatggctggaacactgtgctgagaaataaacagacttcagaggcctgaaagcttcttcaaactactgaagagttagccaggtcagcaactcttccgagtatttattatctagttccagatttttgttttgttttgtttttatatgtggctttccagaattaattttactagtgcgatggtgtaggagaagacatttaatggtagggtacttttttgtgatagaaatattatttgcctttttaagtatgttttttcttttttgccctagtcagagttttaagattagcattaattgggggtagagagtaaaagagctaaccgctagcttctttgtgtgtttttgttatagtttatgatgcatgtattcactcaaaaagtttagaaaacttttataaactttaaaaatcaaacttgaaccaagctgagtgtcagggaagccctgggtcagcccgatgactgcgcctggcctgcaggaagctccgtgctagaaaatggagcctgcacacttccgtaggtacattcagcccatcatcccgtttcatccttaccttgactttgaagtccctgtttttttaagcacccttcccagctgaggaacatcaagcacgaagagatgaggtcatctgcccctatcacgcagggggcaaggctttgagcagagcagaatggccagcaagtctgcgctctcgggatcaatatatcacgcgccagaaaggggctcacggctattgttaccccattattgttgttattggtggaggacagtcagaaccaaaagacactcaggccatggagtgtgagatgtacacggctgcagcatgctctgccctggctcgccacttgggatgaagattaaaaaatatgtggtgctgtttatctctgacaactgtgttggctgcagccatattagagccagagaaattattaggaaaatgtcactgctgttgcagagctgtcagagatgtctgagaatgttgcctggctttctgagttttaagagacaatgttccattctcccagggtgattaatttggaagaggagtaaatgccagcgagtgaagctcagtgtgagcatgtcagagtcctgccactgccacgtcatcgcagtcccaaggccatgtcctgctttcccactggcctgacacaggcccagcgccaagcagtggccaaagaacagtgaggatccctcttctgtgcatgtgtttcctgctgatcttcagggaagcacattctgaccccagtccccacctaccaatttccttttacagatgcaaaaaccgagtcttagggaaagaattcaaatgctggtgcagggtcacacagctagtgtgtggttgagcaaccatgtgaactcagctcttgttgtccaagtgcagggttctctccactaccccagcctgtgtctctggctgctgctagcacatcacccctccacagcgttctgtatcatctccattcatattctggccactgccttctcaataaaggagtgaaaaacatggactcacatgccagacaggacaatgctgctgcttccattcccacagaccttccagagaaaagaaacgtggaaatgcaagggttcgcagattctcagggcattcccaagggacgggarggatgcctctttcaaggggagaagctggaacattcttcatcagagtattgtggacgttattcgaaaacagcttatttaattgcagtaggatttcttggagctcctttcccctgtgctttgtctttgatccacagtgtgaaccaaggcggggaggctgcctcctgggtcctgactccttccgttctacctggaccaggggctcctggacgcagagcgttgctcccgcctcacctgctcctgcctcctagtctggactcttgagaagcttcacgttgttgcccattctgctcagagcttaaagcacaaggtacagggctggttccaggatcacctgggcagtgccaaggggatgcgctcagcaagtgacagcaagatacagtaaattacctctcaaaacagacttgctaccaaaactatctccaagaccctacctgtctactctaaaacttgacatttttctcctttaagctcccctgcccttcgcggtggctcatggatggtactgtgcagtgcctcgggctcatctgaccattcacagttggaaacacgaaggggagggaggaagggggactgggagccagcacctcccccacgtggcagctctagcagggcgagactgtcttggcgtgcagaagtccctgtggctggccctgcagtgcctcagtcatgagccaggtgtgtctcaaacagacctgtgctttgttgccgatttaacagcatgaaatgatagaaatgagaaatctggaagtgaaatagtttcccctgctggactgctgcagccttactgtaattaggaagaaagtctgtcaatgtattttggttataagttgctatttccatgcacccaatcaatattttcaaaaaagtttggccttgttgattttggaggttagggagcatgtctcctgtgggctactgaatgcttcgatcacagtaggtgcttaataggtatttatatgtgtaggtggctgtctaagctaaatcatttgcgttaatagcttaagatgatgcaactcatgtaatgcttcattttgggaaatgcaatttaactaagtgggtggttagctcattaatgaggacatgtgctgttacctattcagaacacggtacatcaacaaattctaaagccgtgtctcaaagaaaaggaaacaaaatttaaaaaaggcatagttgaggcacattctagactgattgtgattatctgggaatacagccaaacaatccaattattattttttatgggagcaagaacagaggacttgggtaatgtttaaatgtgccagatggactgccttctatacttctaggcacctttcctttttttggatgaccaggatctggaaaaaaatcagaaaagtttatgcattttcaccccttgtgttgcagccatgccagcaaggcagagactatggctttgaggatgatgcttgcataaaaaggaggacattcagctcatgtggaaggctgtacttccagagaaaccagcgagggtagcatctcagtcctcatcttatgaataatgtgatctgttctgaggggtctggggagtgaggagcagcatgaattttctccctagttaggcttattctgaccccacactctttcttgtactagcatatatggggtatcagagacactggggccaaggcccaggcctggtttaaaggaaggatttccttgatcatcttaataccttagcactgtgaggtggtgacctgtttttatttttgtctctgtagacatgatgcaggttgtaaaggtcaatataaatattttttggttatttagtgtgcaggcaagctcattctgttgacttgtctttctaaagaagtttcactaaagtctcgttgcagtgaaaagttaatattgtatggaaatcagtatctgaaatgttctctctatttagctaaattaaatactgagaacctttgtaaggatatgtaatttttataataaagttattttgatcattgtatcaaattctagaaaaattaagaaatttgcataccaacatcaagcataccaagccacaaattagtatacttctctttgattgtaggttgattaactaattgggaaattaccaattgataaaccattttttttaatttaaattttagtcttgtctctgccatttggtagctgagtaaatttttgtatttactcggaggggtgtttaagtctctaagtataacagtggatatatatatatatttctctttcaattcttccagttttacctcttgtcttttaatgttcttttgttaggtacatgcacgatgaggattattttgtcttcttggagaattaacacatctattattgtgtaaggccactatctattcttgacaaacctccttgttctgatgtccacttcgtctgaaattaatatagctttctaacttacttttgattagtgttagcattgtatatatttctctatccctttcattttaacctgcctgagtctttatgtttaaaatgagtttctttagacaacatagagttggggctttttaagattttaatctactgtgacaatctctgtcttttatttgacatatttagagcatttacacttaaagtgattatgaatatagctggattaatatctaccatgttttctgttgcttgcatttgttctttgttttcctctccattttttaaccttttctggtttaattgagcattttatgtgattccatttcaacttctctctttgcacatcagttgtacttcttataaaaatattagtagttgctttaaagttcacattttacatttttaacaaagcaaaggcttcttgcaaataatatgatactgcttcttatgtagtacagaaacctggatagagaattcctaattattttatcctgtatcctgcaacattgctgccctttattttacttatccatgtgttataatcacactgttataattattactttacaaagttatcctttataaaaatgaagaaaaagaagaaatacattttgtttcctttatactttctctagtactcctttcttttttatatagatctaagtttctggcacgccacttttcttctgcatgattaaattcttttaacatttcttgcagggtaggtctgctcttgacaaattcccttagtttttgtttgtatgagaaacttttggctgagcactgtggctcacacctgtaatcccagcactttgggaggccgaggcagggggatcccctgaggtcaggagttcaagaccagcctggccaatgtggtgaaaccccatctctactaaaaatacaaaaattagcagggcatggtggcacactcagtagtcccagctacccaggaggctgaggcacaagaatcacttggaacccaggaggtggaggtttcagtgagccaagattgcactgctgcacttcagcctaggtgacagagtgagactccctctcaaaaaaaaaaaaaaaagagagagaaagaaagagagagaaaaagaaagaaaggaaagaaagagaaagaaagaaagaaaagaaagaaggaaaaagaaattctatatttctcttttgagggataatttatctggatattgaattctagtctggagctttttctttctttcaacattttaaatatttcactcactcttcttgcatagtttctgaagagaagtacatttgaattcttgttcttctttctcaaatgttaaaatttacacccttcattccccagctttttccaaaattgactgttttggcttcctgcagtgtgaatatggtatgaccaagtgatcttttaattgcattttacatttatctctttatttactttaatcatggtgttatctgggcttcctgttttgtagtttttttgtctgtcattaattttggaaggttcttggccattatttttatacttcaaatatttcttctgcttttttctcctccttttgttatttcaattatgtgtacgttacaccttttgtaattctcccatggttcatgaatgttctagtcttgctttttttgatgctttttttttccttatttgtttgagaagtttaactgacctatttttatgctcaatgttctttccttggctgtgtcaattctactgatgacccctcctgctcaaggacattcatcatttccgttacagagtttttcatttatatcatttccttcttcttgtttccagctctctgtttacattatctaactgctcttgcatgttatttactatttccattagaacccttgacatattaatcacagtaattttaaattggttgtctaataattccaacaactgtggcatataggaatgtggctctaatgattgctgtgtctctttacattgatttttgtttgtttgttgtttgtttctttttgtctttctggcatgccttatagttttttttttaaagctagacacaccgtgaggtaaatagtccattaggatgagaattcatgttggtctgactaggaattgggctgtggttaatgtctactgtagctttgggtgccagaggcttaatatttttctagcatccttgtgtttttctcttctttcgactttgggcttccctaggtacttctcctcacatagagtctgcatcttgcagtgcttccagcattaatcccctttactatcctggagccctgtggctgtgatggtttagggtggagccaacggaggtttgttctgtaatcttacatttgcactctgatctttaagtggagctgttttcctgggctgtggccttcagaagtttcttcagtggcataggttttcctcccttactccttttccctttcccagctacagtgccccccagtctatttcctagaagccctaatccctgcttactatgcccactcccttaagtggaacaggagggctagaggaagtttgactgggagggataaggctctggtaagatctttctctgctagagtaggtcacttttatggcaaatgctctggtgtatttcacaatgattaattctgagatagccctgccagagaaaatatgggatctttcttgcattttcactttgagaaccttataggattcctggaggaaaagctcaggaaagtgttgggggaccccttgaggtggttgtcccccagaagtttctcagtctcatgccccttcacactcagcctccactattcatcagaatgattatttcagtgttcctaccagcttatgactcctgcagcttctgctccaggtaaacagatacctgctgtgactctctattaacctgcctctgcagatttcagggggggtttccctgtggttgcagttgtctgatgggttcaagaaaagtcattgattttcatttagtgcagctttttctcattgtaaggatgagtgtgacaaccttcaagctttttttcatattagatttgataccataagtccttgcatatgccacttcagtcacagttaatgtttaagagctggggatttctggaggcggaggtcacagtgagctgagatcatgccattgcactccagcctgggtgacagagcgagactccatctcaaaaaaaaaaaaaaaaaaaaaaaaaaagagttggagattttcaaaggcaggtgtcattaaaacttgaaaccaaagattgctgactgaaattggtgtcatatacactactcattattggaagcagtaagaatacttcatgctggtgcaatgaaggaaccaagnnnnnnnnnnnnnnnnnnnnnnnnnnnnnnnnnnnnnnnnnnnnnnnnnnnnnnnnnnnnnnnnnnnnnnnnnnnnnnnnnnnnnnnnnnnnnnnnnnnnnnnnnnnnnnnnnnnnnnnnnnnnnnnnnnnnnnnnnnnnnnnnnnnnnnnnnnnnnnnnnnnnnnnnnnnnnnnnnnnnnnnnnnnnnnnnnnnnnnnnnnnnnnnnnnnnnnnnnnnnnnnnnnnnnnnnnnnnnnnnnnnnnnnnnnnnnnnnnnnnnnnnnnnnnnnnnnnnnnnnnnnnnnnnnnnnnnnnnnnnnnnnnnnnnnnnnnnnnnnnnnnnnnnnnnnnnnnnnnnnnnnnnnnnnnnnnnnnnnnnnnnnnnnnnnnnnnnnnnnnnnnnnnnnnnnnnnnnnnnnnnnnnnnnnnnnnnnnnnnnnnnnnnnnnnnnnnnnnnnnnnnnnnnnnnnnnnnnnnnnnnnnnnnnnnnnnnnnnnnnnnnnnnnnnnnnnnnnnnnnnnnnnnnnnnnnnnnnnnnnnnnnnnnnnnnnnnnnnnnnnnnnnnnnnnnnnnnnnnnnnnnnnnnnnnnnnnnnnnnnnnnnnnnnnnnnnnnnnnnnnnnnnnnnnnnnnnnnnnnnnnnnnnnnnnnnnnnnnnnnnnnnnnnnnnnnnnnnnnnnnnnnnnnnnnnnnnnnnnnnnnnnnnnnnnnnnnnnnnnnnnnnnnnnnnnnnnnnnnnnnnnnnnnnnnnnnnnnnnnnnnnnnnnnnnnnnnnnnnnnnnnnnnnnnnnnnnnnnnnnnnnnnnnnnnnnnnnnnnnnnnnnnnnnnnnnnnnnnnnnnnnnnnnnnnnnnnnnnnnnnnnnnnnnnnnnnnnnnnnnnnnnnnnnnnnnnnnnnnnnnnnnnnnnncccactgtgataggattatgattctcttcattttttcagatagggatactgaggttcagggtacataagtaacttgttcaaggttatgtgagtcatagggtgtagtcaaggttctaaaacaagctccagacctcattcttttaaccactgtactttgcctctttccaatgattaagtgcagataatctactaatactaatacataataatgcaagccatgacaagggaaataaaatttcctctaacatttcagatgggaggtattactcctatcatgggaaatcagagaagagttgacattttaagttattaaagtcaggattggacacacargaatagtggcaggggtttttggaggcaagaaaatgatagaactgcccaggaactcctaagcagtatgcagtggaaaatagagggaaggcaaaatgtggggtgcttttgaattaagaagtgatgggatcacatatatgtttgagaaaaatcagcgtgtagtgggacacaggaagaactggagagggacagtatagagccagatagaccagttagacagttggtgtcagatggttgttattaatggcagtgggaggggagcatgggcaggaattgacaaggaattgtgagccacagaataggaaataagaaagaggaaggagttaaaatgacttcagtatttgatgttcatatgattggataatgataaaataagttgctaatgaccaaatttatacatatatatatatcttttttacatacacattttataaatactatatatacggtatgtataaattatatataattgaattaaaaaatgaaataggggcttgtaaagaagaacacataaaatattccaggcttctggcttgttatacttagttgggcctgaacgtaaaatgaagcttgaatttcccagtagccagagaacaaggggaagtgatgtctgccttaaccattgcctctgggttgggattatgccatttcttcgaagagacactcttctagactagggttaaaatctagagggaatttatttaactcaaatacagaaaaccacaaaagtcacaaaggttggtgtccttggcttccactctcaatgggacactgcagaagctgctggggtcgaccctgtctttgaatcttccagcaagagaacatgctcgccaagcatctgctctgtctccttctccttgcaaacctcctaagggcatctctctgttgtttagttaggataacagaatcctgtctgcttccacagccttgtggaaagttttgcacaggcacagtttatcaaataattacagaggagaactgagaggcttcatagagcctgtgaatttagagaaacctagactctgggaaagcagttgcactggattctctctccccgggacatgtcctttctggctctctataaagttgcagaaccatgtttatctttttgtcatacctgactgcatcctttactgccctaaggtctttttttttttcttcagtgacaataacaaaaaaaaaaacctaactttcccatcggtactcacttctggctacttaaatagtagccaaaagattaccaggttagggttgcagttttcccctttatacacacaaaatctctaatttagataaattgtcactcttatcacgtttttcttccctgctcactttcccagccaccatcttggccttcagattgtctcttcatgcatatcgctgacgtttaaaagtttcaagcttgatggtgtcttacagatcacctcctcggagactcgcttccattcgtggggaaatgaaggctcagagaggttgcatttgcctccatggggcccacagagctggctggtggttgctgtgaattgggaaatcacattttctgacttctcatcgcgtgttctcactactcaacactgggaggaaccattgaattaaaagttcaaaatcaactcgatattttccaattgtttctttgttttttcaaatggatatcagtaaataaaaatggacacattcagtataagcagaagccttctgtcctcagggagttcgcagtgcagttgcaggtaggacagatggcgaaggcgtgggagagcagttacccacagatgaccagatgtgtgtggaaaccccctcctctctacgtccagggagtctggagggagtctggagggagtccagcgcatcaacaccaccagggccagcgctggaggatggacggtgcatgatgggcccaggagagggagagagcctggtgaggaagtccccagagccatgggggaggaagacagccccagacctggcagacacctggcactggcctggggcgagtgctgaggtgaggacagacaggctttgtggcctgggctgacaaagggtctccacagccctttatcaagccaggcagccatgtatttgtccttgtgaatggtgtgtgtgtgtgggtcgtgtgtgtttgtgtgtgtgtatcatgtgtgtttgtgtgtgtgtatcgtgtgtgtatgctgtgtgtgcatatggtgtgtgtttgtgtgtgtatggtgtgtgaatgcatttacttgtgtgtatggtgtgtatgatgtgtttgtgtgtatggtgtatgtgcatatggtgtgtgtgtgtgtatggtatgtgtgtgtatagtgtgtgtatggtgtgtgtgtatggtgtgtgtgtatggtgcgtgtgtttgagtatggtgtgtgtgtatggtgcatnnnnnnnnnnnnnnnnnnnnctgcttgctcctgcataggctcagccacagggcgcatgtgtgtcctacacttgctgggcatgcctgcctcaggaccctgcagcagctcttctcttacaccggtgaaatcctcttcccatagatgtgtgcatagttttctttctttctatttatttatttatttatttatttatttatttatttatttatttttgagatggagtttcgctctgttgcccaggctggagtgcaatggcacgatctcagctcactgcaacccctgcctccggggttcaagcaattctcctacctcagcctcccgagtagctgagactacaggtgtgcaccaccacatctggctaattttcatatttttattagagatagggttttgccgtgttggccaggctggtctcgaactcctgaccttaagtgatccacccacctcacctctcaaagtgctgggattacaggggtgagccgtggtgcccagccagtatgtgcgtagttttcaatcattctccagatcttggcttcaaagtaaccatatccaagaagtcttcccagattctttgtgtaaactagtacccgctcctcagccctggactccattttctctgagatgctgtgcatggtctagtttctgtgttcattgcctctcccaccccatggggcaccataaggacaaggagttttctttgctctctcctgcacctccagcccctggggcaatgcctggctctgtaagggctcaggagggaagaaagaagggagggaggaagggcttgatgaggtagctggctgattgcacagtcatcactttggctcagatccaggcctgtaccgactaagaagctggatgcctttggggaatttaccctctaagccttcgtctcatagcctgaaaaattatggtaatactagaaggatgaagtttatcaagcccaggtagcatggtgagctactcttcacacatagaaaactracagcatttgtgagttatcatttgtgcaattatcaccatgggaatgctgcaagcccctgcgtacctccttctcaccttctcagaagagcaggatggaattcagtggagtgcagggcttgccacaccctgaatcatttctaatcaacaaaagcaaatccttcgccaacattctgactatgcttaatggaatatgacttgacccatgcctacatggctatggaactgcaagggcaccacccgtccccaatcttaacagtccaagtccccgtgtgggtggcactgcctgtgtgtggatgcagggcttgaaagctgagcattcaccaggggcctgaggaagggcaggagcacttagctgcactgagaagcaccaggaggagatttaagaaatgctgatgcattttctgatttttatgggttgcagtagcagtatgccacaaccagagagactactgtaggaactcaacaagcaggtttactgtaaggttctgttatgtgagtggatatctcacatgcatttaaagtatgattcaattcccacaagctcaatgtctatcacaatcttatggaagagtctcattaactagacaaaagctcccaaagttcagtggctgcagctgctacattcagcaccacatgctcagtacaaagtctaggtgattttttaaagattcctaaatgaacatttgatgtcaggccattctctgttcatgcccaggacctgtgtgatatgtgctttctggttctaatcggaggatcattgagaaggagagagctctgccaataattatgagagggcaacaaaactcagttgtgtggtgccaggaagacccagggtgtttggccattgccggcagctaaaggcctgtctcagctgccttccgatgagccacacctgcttatctcttagactgttcatgtctcaatatgtaccaccagatgagagctgcttagtgatctttagtctgtaacctcaaatggatctgtttcctgtaaatgaacagaccatggaaagagggagaattaaagcatgtgagtgtgcaactcaacaataaaaacaaacataaggtaattaaaaatgggcaaagggtttgaatagacatttctccaaagaagttatacaaatgaccaatcagcacaagcaaaaatgcccagcaccataggtcatgagggaaatgtaaaatcaaacccacatgagatgccacttcccacccactaggatggctataacacaaaagataccataacaacaagtgttggtgatgatagagagcaagcactttgctggtggaaatgtcaggtggttctgctacttcggaaaacagtttggcagttcctcaaacagtaaagcatagagttaccatgtaacctagcaattcaaatgttaagtatatagcagggaaaacatgaaaacatgtatttacacaaaaacttgtacatgaatgtgcatagcagcattattcataatatacaaaaagtggggggaaacccagatgtctatcgctaatgaatgggtaaatagaatgtggtctggacatacaatgaatattcttcagccttaaaatggaaggaaattcaaacagatgctacaacatagataaacttggaaaccatgcaaagtgaaaaaaccagacactaaaggacagtatgattccacttatatgaaatacctagaatagacaaattcatagagaaaaaaagtatattagtgaatgccgggggttgggattggggaatggggaatgatacctaaaaggcacagatagggttgttttttggagtgatggaaaaggtctggaattagattgttactgaaacccaccaaattgtctacttttaaagggcgacctttatagtatgtgaattacagctcaataaagctgctattttaaaaaagagtatcagtgattcagaaagtgtattcatcataattaattttatagtcctataacaaattacacttcacctttgatttccatgataatttcaaaaaacagtgccacctggaagaaaaaacaaagatatgagggaagggtagggggtggggagagaggtcttcatgtgtaaccaaagttgacctctcacaactctgtgattctcattctttgaatcagtgattccagggataagcctacatctcccgctgggcctcaacattcgttattcattcctttggcagctattttttgagaatgtactatatggcaggatatcagaaaggagctaacatggtccctcggctcttctcttcagactaatctccatcttttccccaacatctacatataggctcagtctgcaaaggaaaagctgttgatggaacttgccactatacacaagagaaactctagagaattctgcttcttagatttaatcctataagtctaagaaggaaaataaaggatcattgttaaggaaaaacaggtgctcctcaatgtttatcaaattagtaaagagtttaaccaacccaaacagtcaacagtcagaaatgggttaaataaatcctggtgtacccacacaaaaacagtaggctgcccactttgaacatgatgcttaggatttgcatttcattgagatggaaggggtttcttgatacagggttgagtgatgcatgcaattagaccacagcaagagtcacataaccctataggtttatttaatgtctgcaggtaagcaatgaagtaaatatttcaccacgttaattctaggtgatgttcattctataatgagtgttcattataaaatcctttcaaccttttttgtatatttggaattttcataatagaatgtcataaaaataaatgatcaccaacagtaggaagtttaattagacccagttttttagacttctaaaaggggactgcattgggctgcactccaatataaaaattacccttgtgatcacggcgcctctcattgtgttttaacacccatcctgtcgctctgtcttccccaacactgagaagagactagcccttcttgcacttcctcccygttctgccagtggaaccattcctagtgagtaactgaatttcttaagatccactgagtctcaatagaatctacattagcagccatgaaattcaagtgggtaaattgacgtagtataagatgtaaagctactggtctgtggacacacaaatactgcagaaatgctctcagtcctacacaaggctcttaaacattattggaacaccacccaaaacttttatttatgtggattatctctatcattattcactatattaaaaatttcaacttagacattcaaaaatatgtattattgattaatctaaatataataaaaagcctacataagtgacacatttctaaaaaaataactctattataccacccaaaaagaaaatttagtaaggacagtgacattgttttacatttttgcaaatatctttaatgtctggctcaataaaagacagatgattttcatatctgcttccgcattcaatctgttgcaacatgtaatttctgtgaaggaaatttaccctgagctggatatgaaaatggatggtgattttattagacttttcagataatgatgcatactcttccttgacatcacatcaaactcaacaactagcagtttcttggagtttaattctaatgtggaacctgaaactctatactattcatatcttgttaccttcccaaacattggtttatcttgtactttaaatgtaccttttacccatgcatgaatttgtaacttcaggcattggaaaatattggttcacagagttatgctgatcatccaaatgttgacacgatattacaaaaaccacatttattagtctcccaaccaattgtgttagaaaagtatttaaatattgagaagctaccagactcatgaaggtggatacgagctttccaaaattccaatttccactggaaatctcgacttttagtattggcaacaaatactgccagttgttttcttagaagtgacagactccattcattttcaagaaaatggctaccaaacaccccagtctgaaaataaccatagtttgttgctcttacgagtgaaaatgctatttcatacacgaagctttgtccttcagcacccaagatttaaggataattatggatgaatattatggattcattttaaatcctttggcaaatctgctctgggggcttctctgtcagaaggtctctccttcccaactctaagaaacgttattcctatgcaaatgctgctgagtcaagacggggagggaagtgcagagagaagggctggtggcatggtcagtaagtcatgagggtgagattaggggtgacacactgcttgccaacgtaggagaaggctctgccctcacctagcaggtctgatggaagccccttattccgtccttcctgccgggttccaccgagatccaaaaaggaatgctgtgtaggagcacatgatatgtgataaatgagagaaaggtcaaacatttaaggaacgcccagagaaagtactgcataagaaatgatgcgttccatattcaaacacacagatcaagctctttctatgggctaagtggtgtgcccccgaaaagcaagggctttttgtttttctgcctttctccctacgtaggagggcctggttgctgtgtgctctgggagcttgttggtttgagcaccctgaagctccgtgcaatgcccgctcagtgggccccggcagtgcagagggcgcttctcccgggggtcctggtaagaggatctaggctttccctggggaggacccggcggggcgaacgcaggctcagcgcaagagccgcagtgacaccttctggtggctgcctgcactgcaggctccttttatggacaagttttgggggtgaagctgcagaggggtacccctaaggtggcctctcccttctcctatccaggtttgggaggccacccggcctcaggcccctgtcaggtctcccactgcaccaagattgactacatgcagggcggctgagctgcctgaggccgggtgggaaggaggggtgccctccccgctacggtggggagacctgcccctgtctctgctcctccagctcgcttgcaggcacaagctgctttgcttaaaatgttatgtcattaaaaatgaaatatgttccttttattgcttattgttctatgtccctcttttttgtggtgtgtttgattttattcagattttagtattttccacaatggtctgtgactaaaacttaatttaatgagaagagatatatttattcagttctttattttgaaagtgattgagttaaacataaaacaaagctaggatgaacagtacaattatatatcatccaggatattataaattctgatttgaagctaaggaaacaaacattggcaatctagcctcatgattaagaacataacagaacataaaattaaataaaaagaaaagcacctttatgactggcatactcagtgtacgcattcccatcaaaatgtttttgtaaacgtttccataagtcgccgtaggcaaatggcatgttgcggtttttgaacgttacatagatatcttctattttcatgcatcttccttgctgtaagacagattcaaagcagaagcttacataacccagagaagtcatgccaagtttatctgaacatctttttaaaactttcaagttctctgatttagttctgatacacatatttccatatacgtttttcttgtttgtttgtttgtttaacttacctactttgttcctcaattgaacatgtggtttttgagtgccaactacacattgagccctgtgtgaaggtttggggacagagggacactgagcccagcctccaagagtcagaagggagcattttcaggccacagtgcactgggtcaggagtgctgcaggaagagaagcaaatactgtgggactcactagacaatctcaacagggaggcagtgacatccaggccctgcggaggacagggaagcttctccaagggctatggctggggagaccctgtaaacagacttagacacacacagtgttcatccagcacgagtagccctctcaggtggccccactctgcctgaggcactggattccaagcatggacagaagggaggacttgacaaggtcgggtggaatgggccgcgaccccggcctgtgttggagatctcctgggcaaagataaccagctgctctccatctgggagttatggagccctgtattttacctgggaaactcatgggccaccagaaacacacttctctgagtgtgtgcttgctttaatgagactgcaggagatggagattttatcagcatgaatcaccagtggagaataattcctaatagacaacccatggctgtccaaagacctcaagagcattccccaatccgagatgggccgggatgaggtgcccgacctctgtctggaaccttgcccttgggtgtgtccttgggttggacactccccttccagcctgctcctgctcccctgcagcctctacataagatctgcaagggcagcccctttctgccaaaactggactcctgctgcaaagatgaccctgggaagctcaagggttcccacattagtgttaacctgtctgcctcaggcaggttcccagcccaagaacttttggctccctgatgagtttgtgggatgctctctgacggcactgtctggccatgagtgggggacttgagttccagctctcacattcacagctgagctctacctctcatgagcagtgtgagcctggcagacttattctgtgactgactggaggccttagtttccccaactgagaaagggagatggtaaaggactgaggggcccgtgtgaggctgagacacagtcagctgtgaccactcatagcaaagccctggcaaggggcaggccctcagtgcctgcggtccatcatggctgtggcgtttagctttcctggctgkatggggcacgagagagcagggtacttcttagtgacagtggaactgtgaagggagtgtgtctttgtggcactttgagctggaggatttagcagagcacttggagttgtgaatgcrgtggccactggagcaaaccttctcaagtgacccaccataacacatttctgggtcttgggtgctgcggtctcttttccaaatggtatcttggaggcaggaccaagccaatgtggccttgggattctgaattaacttcttcccaggatgacgctaaggccctgagactcaggactgccttggtgttctcctcaaacagcattctattccagaggacagcatgaaaggaatagtattattttcctgggtaaacgtcccatgaaattgactttagcaaccaccagaggagtaagatggcatgcctttcatcccccttgagctcccytgccagagaagactggagacctcgcctgttggctcagagcccagggagaggtttcccaggaccaggcataagcacactaacatttaatgagggtgggtggtcaacagtctttaaggatgagaggacaagcagctatttcgggctaatctgttcttatagaaatgtcacttgctttctgttatgtttctgaatctggctgtcagctggagtcaggctaacagaacacgacgtgtcaattaagccacattacaagatttcccattaggtctgtaattycaacatttctgaaattattgtaatctgtgtctttaaatattaggatttatttagctgatgttcaatagtccctttaaagataatctgataaacctcctttttattcacttttgagaaaagaccgaggtaaaaattaatatatacatgtatatcttgcccacacacrctcatgatgttttcctagttctggactcaatgtatttaatgatgataatgacacacgttaatcattcagaatgatttgttatttgttcgcatgaatttcttgctagactggatgttctcccaagctattgaatgctttcaggagctcaaattggctcaattaaaatgtatgaaaagaatgttaaaagcacaggagcaaaggtagcaaartgacacctyctactatcatctgtctgttttgctcatgatcagaaataccaggaagctgatttcacttcagtgacagaattaggtgaccatgtagaatccagatggtaggttcaaccaagagtgaatttttgcatgcagcaagtatcccagcaagatttgtctgggaggttcagttgtctaattaaacatggtgctgaggtttgaatcagcctgtgaagatgttctttggaagataccaagaatgaaaatcaaaatgctgtgaccttataattctgcaaaagcagaggttttcaaaggactagtttttagcaaaaaactacactgaaagccctttgatgtagcattttggctttgcatccagtgtttcaaaacatgaaaaatatacacatggtaaaaatgtttttctctgtgatttcaccatatgaaaggaactgggattttttcaccaggaacactctgctcagcatgctgcgatgctcccccaggagccttttactcagaggcaacatcatgttcaggtttaagttattctcatggcttctaaccgtctagggcttacctgtccacctgagattttagagccagatatcatttcttcaagggagcatctctccaaacaagggtgcmtcagaagttgttcatctgccaaacataatgcttcattcttcaagattcccagggaygagaaagtacataggtgaaaaatagcaattgtattgataagcaaccacttaggaaaagaataccatactgtaaattgatataaattatagaartgtttgcaataacttcaattttaagggcttagaaactggtacataattcattacaatttgtatcctcctgagtttgtgctctttctggcccccaaaagaggctgtccctatttgctggaaggggactcaacatccccacatttcagacctcctccacaaacactgcaaaggcacatttctctctgtcatataggagtctgctctccttcttgcaggtgaaataagcaggaatatcatgtgtttctcatggtctaagttgggcaagatctttatatgttaaggggtcagaaatggggaaggaggccagtccctgccaccaggaagtcccacccaggaggattccaggtgcagctggccacaggaatcatgaaaatcttaagactagaatggagagcaaagaaaggaaactcatcaagatcaacaatagaagtagagaggacagggtgtggcccgagggacagaagctactcagattgagttccctgaaaatattaatggactgagttggtgggccatatggagaggactgctggagattgccctcgggagtcacctgcttagggaagtgagggtgcaggattcagcagagggaaaaactgatccatagcacrcctgccaccaggagccatgacagcccttcaggggagaccaaaatcgaggcagtcaggcaagtctatatccatctccacctgggaggggcattttctcccctcccctctgcacttacctaaccatacacctctcaaaacagtcatgcatgagttattagtattattctaggggatatcagcatggaaagctctgatagacttacattgcaggagcggcgctgtctttgaaatttcagacatgagcaaatggagagacagacaggttgtggcagtgtttgatcctctggccatcctgatccgtggcctgccctctgaagccattgagttttggtccaggagtgtgagatctgatggacacatatgttgggtccaaataaccaaagtggactttcctttagaagagcaggacgctgatgtttgtaccaaaaaatggtgggtttgtgacagaggacagtcactaccgaaacacaaggtatcatggtatgtacatgtaattgtgcagtgacttcagtaaacgttttaaaaatcacagttttgttgttacatcaagcttgcwttatgaaaacctccttctggttttatatatttcaagacggaagtgaaacagacaaattgcttcaaatgaaaggcagcagtttttgtctctaacatttaatttgtgcagcagtcacatggccacattatgcttacacactctgtgcctcactgggcattartaggaccccgcagggcagatgcgcctctacatgactccgggctggactctgggtaatgatgggcactcttatgttgcctgataacaartggttcaatcacaggaggcaaaagtgtttcttctttgaggacaggatggcacgttgaaacattgagacaggaccgtaaatggagatactgttcagatatcatttggaaaggcacagctccgcagataagaaaattacacacatcctccctgctctgagttgctgagtggttttgtgtctctggtttttcaccaacactgaaagtagccttcatagtaagtcacagcagtcggtagaggggaggagagcagactgatttttgtcagctttcctggagtagggttggtttggggcaaattattaaaaagatttgtataacctggctacatcatgatcactaacacattactgaaggtttactggtctactcaaaggtaatcataaaggagtaatgcaactagcgcaaagcagccagcctgctacacaagaaagggtatcctataatacatggtattgctacttawctcagatgtgtcgtgacttttttagcctttttgttttaatttcaggcttacaagaaacttgcaagactaggacaaagaatttttgtagacacatattcctcaaatgttgatattttaccacccaaagatggtgagagaacttgggagttccctctctctctacacacactcacacagataaggtttggtttaatttttgttcttgctgatccatttgacagcaagtggcagacatggtacctctttacccctaaattctttagcatatatttcccaaagccagaaatttttatgtaatataaatacatttacaataatcagggaaatatactgatacwctactaagcattctatagaccttatttaaatttcaccatttgtcccaattacggcatttatagctaagacacacacagacacagacacacacacacacacacacacacacacacacatattaaccttccactcttccctgtccgcagtgcaagatccagtctaggataacaaacaagtaactcagtattttgcctttcttttaaatgtcctttaatctggcctggttcttcaatctctttaagacactgacatttcgtagtgggcacaccaggtattttgcaggattttcttgatgtttcctcctggtcagagctaggctgtgcatttttagcaggaacaccccggaggagaggttggcagtgcttatgccagggcacaggtgacactgactcgtcccctaactggtgatgttaactttgatgactcattagggaggttgcccagtttccccactaccattatttttctctctgtaattgattattactaggaaggttgtgtgcaaaacattcctgtgaggacagaattattactcattaaaaaataaagaaccagagtrcaaagtcctatcttctgttggagatgaagccaakaatcaaattcatgtctcatgctgaagtttaagctgctttcactatactgtgaaagacagtagcatcaaaagccaaaaaataaataarttaaatagttcattttttaattgatttatagggcttgttgttattcctcaaatgtacagattttgatttttctaggcataaatggaagaaggttcccctttatgggarttygttttcagtagcatcagataagaggaagaagaacgaaaacttgcaacatgaagtggtctcctttccatctgtagttcgtggaaacaaacacatgaagcttctttcaggtttaggcatctgaatccaaagacatccatggaagcactatcatgagacaccgattgctcttctagtttaaatagagggcacgcaggcatgtggactcgggagatggcagaaggagccccaagatcatgatgagcccacggtcatgcagccagctgggctccagacttccaactccgggctctttcctgcatcatatggagaagatcctttggagtgggataaagacatattccctaaagctcttgggtgaaaataataaaagraaaaggaatcccattatctttgatttccatgactggtctaaacttcacagggcatcattctcatggattcttgtgtgttaggaacaggcctttgatcgccagtaattraaagtatccaatcccatgatctagcttagctccctgtctgcggggtaggtcttttgaggctctcctccmagcctcagccctgttctgctggctaacatgcatctgtgaacatcctgggttaaggaacgaacccaagctgtgtcttcacgggggtgagaggagtcctggtcctctcacagatccaggttcaggaggtctctgctcatctctgcaacaaccacccttttctcccctcatcataagctcctcctacatccgctgtagacctgtatggctgctaaaatttggattttgctatgggtgataatagaaccttgtgcccatgtgcccgtgtccccctgcccaccttgaccctgacctggcctcactgtttctgtgcatccctctgtgtctctgcagatctgcacctgcagcagcctgctcctcagtgtcacctctgtgatgcccctgcttcctactatgggggcatcgggaccctctgtcagctcacttccctatcccctggtggtttggacagtgggtcccccagaggcaccaaggaggccccagtgtgtcccttccacctatgaggactaagcatcctcacatccactgctttccacaggtctccctgactagccaggacccactgccctgggattccttcccagaggtggagtttccatcctcgtaccctcctggagctgctcactacctccctccccctacaaggacaccctgcactcttcctgtctcgtgagaacacccaggacctagttgtcctagatatttattttaatcatttaagtggaagatcccagtcctcctccttcatccctaggccaacacacctcttgacctatcctggatggaccaaagtcataataaaagaaaccagcctaccaataaaggtatgtggtgtccaaaagcaaaaaatagtagctgcattattcaaaacaattgactaattcttgatgaggttagggagggagaataccacattttttttcctaaaaggtgttttatattgcttcatagagtctacaattttacaattctcttttaacacagtgccttggccattgcatagcgagagaaagagagagactatttcaggattgggaaggggctgtgctttcaaacaacctttgaaatctttcagatacaaagggagtatctgtacatattaaagtgaaattgagtagcattgcatataatatatgtggtgacttttctaaactttatatggttgattatttaaatctgtcacctaattatgcattaattataatatctattctgtgccatgtggtccttgctgattaaccttgatagctgccccagtttcccttctgttgacccaagcaaaaaagtctagatgtgagagaagacaaattggaccactgtgataaggtgtgttttcacagaaggagaagtcaaaagggcccaggggagttgtagggtcttcttctgaaatctctctctctgctctgtctcctttctaagcatgctgttcttatctccccttcatctcattggggtactttcaggtttgggcctctcacctcacactgcggccccagaatggccaggaatgggacgggaaagcactgctgggatgggccatccagctgtaggtctcatagagaagggctgtttcttttcttcatttaatttctgccacagtggagaaaggtcagagctcaatggtcaagatcaaggtgtgagtttcaggtaatggagaccgggatgcatagtatgggcacctctcatctagagtttgaactggttcctaaagcttgccaccaggaaacatgatggaggtgtgtgggcaaagcaggtggacacgcacacatacatgcactcacggagtgctagggtggttggtcaaaactgttgcagggtagaaggtctagatatgaggaatatggaactgggcatgggctgtcctcacagaacctgtggtctccctcagaagacaattacatttctgtaaagttattgcatagcatgaataattataataagaacacaagaagagtaattctgtccaaggtgcatagttgggcatgtccctgtcctggtcattgttgtagttttctgcagcatttcacagaccctcacaacaccatgtaagttaggttccattattgttacctccggttctgcaggacactgagcacaggggtgcagtcacttcctcaggggcacacagagtggaacccaggctcactctgaacctggtgcatcatccttcaattactgaaaaggacaagtrgacatgcttgggaagaaacaaatctatctgcatgggagtctgggaggctttatggtagagacactgagtaaatggagtttgctgggtgtgggaaggtactggggaatggaaggcattgaggggaaagcttgatgcctctcccaatgaagctccaagtcgaaggaaccccacattctgaaatgaccttggacagatagtcaagggccaggtaataagtcatttatattttctgaaacttgagtttaagtcatcctttctccttcattgttttgaaaagttttatatgttcaccatcctctctggcatttatgctttttagttttaccttgcttatgtgtaatattaaaatgcactaagcaacttaattacatggatgatttaaaggatttctgaattttagaaagcttcagaagtcackttayccagcatcagtagctttataccatagatgttcagagtgctagctagcagaaagttctagataatgcaagtgagttcagcaaaataacagaatggtgaaagaatacaaaaacaaggagatctcccagagcaaatgtcatgtaaatgacctttcaattaaggagaacgtgaaggataacgaggaaaattgcctgaccagaaagctctgttaggaatgatggttgaaccaacctgtaaacaatgccattgtagacagttctgcttcaacctgaaatgatgcagccatgctgcctaaaaactggaagatattctaggaatatctttggtgtatgaacatgggctctccactatgaaattatggtattggccgggcgcggtggctcatccctctaatcccaacactttgggaggccaaggtgggcggatcatgaggtcaggagatcgagaccatcctggctgacactgtctctactaaaaatacaaaaaattaaccagrcgtggtagcgggcacctgtggtcccagctactcaggaggctgaggcaggagaatggcgtgaacccgggaggtggaggttgcagtgagctgagatygyrccactgcactccagcctgggcgacagagtgagactccgtctcaaaaaaaaaaaaaaaaaaaaaaaaaaaattatggtatcatactaagaaaaacctttcagatgtgggcacggacccagatctccaccgtcctcttttctcaccttggggaggctgaggacagatgttccttctgccccttactcaccagcttcttatgtgaggccatcagttccaacgtggaagcgtagtaggttggatgctgattgcataccccttttagcacrctctaatcaattaaattttcagttcttgaaaaacaaagccattctttaaaatatgcctttaatggaattcagcagcaaatgcattgaaagcagcatgcttccatggaattaaatattggggttactcacttatcatctcaggtcctctgtttccacatctatcaaatgaagtatttgcctgggtgatcctgaagtatctttcagctttgacaaccatgaggtttgagctagrcatttagcagagtagaaagggaatctaaggaggatagcacaatggacaggttgccaggaaagaatcacatgccagatggccagctagccacttagcctgctcatgtaatagcctggagtacttgttctgcagctcttgcttgctttgttttagctgtggacatcagacaacctaacgctgccagtctcctacctgtttgggtcatctccaatttgttaatgactccacttgagatctgagcggcggagtctgggaccaccctgggatcctggtccagcagacttggtctgttagtgggaggcactgtgacatgctcctgttttgccctggaatctcaggagaccacctcagaggaggagtaggttcctccagcttcattagctgctcgtttaaagaaatcacatggtcttttccccatcagttacatttcgataaaacaagcctgcaatgaattttagttttctggaaaataaytaggaatgacacatgaagtgagcactctgrcacattcctctcttgctgtatttaacatagaaaatatctgggtttcccatgcatgcagatgcaatgagtgggttgtttttccagcagtggcaaaacacgggtgcagatccatggccactttatcaaaactgactaagctatgatttaaattgtactgcacaagtgggacgctcactgctctccctgctccttctcaaactgaaggtcaagataataggggaaaacagacatgcaaacgtggttgtatccactgttgaatttcgaagtgacttgggtaccctcattaatctatacaattacaccatcatcccatagtaaccagctttgatggccagtacaccaagttccattgttggaaactcctaccagaattagaaacaacattttgtggaaaaaaaaaaggtatgctgtttagaccacactctctgaacatgtttgctccccaactaaattagcaaccatcgatagaatatgccacaatttttcttcctctcttttccctgagacagtgaacatttttttttctgaattgtatgtcatgttttcccagcctgtctgcagttccccagttgtgaatgtgtcactaatctctttcagccttggtgaggcgatgcatataaattcataaaggaaattcctgatcacattctgtaaaaagaagattatttagaagcaggaatctattttgatagaaggaaaatctaaccctttttataactgcttctctctctccttgtagtttgtggtattgaaggtggccatatctagttaataatgcaaatcacaatacaagggcaccatttgtagttaaggttaaatgatcttccaaggcttttactaattggctgccacagacaagctgtaaaggcaactcgtttctatggattctgacttttcttgtttgcatccaagtctgtatatgtgaggaggacaaaaggattagaaaggggtgatctagttccctaaatctcagttctgtgcaaacaattataatgaattcrtcatctcacatatattaatattttatataaacatattttagaaaacacaaaataacactaaatattcaaaagtatcatactatttaaaattagaacatagacgtgatgggcaacatacaatttgataatgttaattcatttagataggttaaaaacaaagtgacatgctggatctttttgtaaaacaacaagaaatagtcctagtaaatatcacttcgatgtgggctttaattgcttttactgtaattaatactgttcagtattaattgctttaattggcttagaacataattagtaatattttattaagttaataaaaacctcacgtattgcacaaaattatacttaagtattaactcagcattaagctttaagccatgtatgtttcatatgagatatatatatatcactattattctgacttcatttttaattttaggaaaaaccaatatttgaaataatatcaggagtttagatggggctaaagataatacttgtatgtgttttgcgtctgttttatcagtataacctagtttgataaacaactgcacattatttacaagaaggagctgcttacagccatagaacactttgattttcatttaaactttttgtatttatttatttatttatttagtttttagaaacagggtctcgctcagtcacccaggctggaatgcagtggagcagtcatagcttactgcagtctcaaactcctggagtcaagcaatcctctcacctcagcctcccaagtacctgggattacaggcacatgccaccaggtccaaatcattttttattttttatagagatggggcctcgttttgctgcccaagctgttctcaaactcctggtttcaagtgatcctcttgccttggccttccgaagtactaggccaccgtgcctggctttagtccccttcttaaaacttaagtccaccactaaatttaaagagttactgtcattgtgcctgtttcaatggtccagctcaaactctgtctcctctttgaatacttccctggcctcttcatactcacttccctcctggtgcctctgtctctctcccagtcccagaacactgtaccttgagtggttgtcactgtacctgtgaactctttttaggcattagccatagggtggtgagctttcttcttctcagctacattgcttggcaatgacttcagctgtggcctccagcaagctattttctcagctggttcagttttcttcacctacaaaatgctcatgacttcccttgcctactttacagtattgtaaaagagacagcacgcaaatgccactaaaatgcagtgagaagggtgacgtgtactagagagaccctagcctgggatttaggatgcttgggctccaactcttaatcaggaaaaggtgcctaatctttctgagtgtatttctacctaggaaataacgaacttgaattatatgcttctaaattataattttcaaaaacttaagatgattcttatgaatataaaataaatactgtcaagtgtttttatcaactcattaataaataaggaactcagtaaaatgacaataccagttaraggagcatttaaggaactaggcatttgtagaaaattgaataaagatatgttaagggaaaagattgctgtattagatacaaacctagtaaatccctacagggaaataaaccacaatcttccaggctatcttttctgccagacagaaattatttggatctctgctaggcaaaaatttacaagttagcaagtaacttcactatatttgggatgttgaattaatagttttaacaatgtctattaaaagggcttttccaattctaaaaagccctgaatcaatattactagcacttaattatattaatggtaattcaattactaaaaaaaaattactttgaaaatctgacctttagcaacttctggcgcttactttgctgtttgtttttgttaaccctcatattacaagaaagtaagttttctctccggatgatttatgattaaaacatggataattttatctataaacattcaaattatcatgaaaacaccaataaaggagaatcctcatcagttctcctgatcaggtcagctgatgttttttgttttttttctctgaaacactattacgtgttggccacaatctccatgtaatattaatctgctaccatctaatatctgctttctaataccatctaatatcttcatgtttcattattttgttatttattttctcatctcagaggagattccaaagttctttagttttttaagaattcttatgattttataaatgcaattytaattatctttgtcaaaaggagttcaatctgatgtatcctagaattttctttccttttcttttcttctttttttttttttttttttttttcagtgtgtcacccagactggtgtgcagtggcaagaacatggctcattgcagccttgacctcctcaggctcaggtgatccccccacaacagcctcctgagtagctgagactacaggtttgcaccaccatgcctggctaatttttgtattttttgtagcaactgtttcacagtgttgcccaggctagtctcgaactcctggactcaagcaatcctcctgcctcagccttctaaagtgctgggattataggcatgcaccacggcaccagtgaattttctattgatatatttccaatttgaaatttaggaatctatctaatattttatttgcctgttttcaagtttgttcttgttacacataaactaacattttatccatacaccctggttgtatattgtctatgcatttctattgtttaagtgtgggtttgtgcagagcagaacctgtagcaagcaccgagtctgactagtgtatctgggaggtgaccaaggaagcaaaggtagacaataaggaaatgaaacagccacgccaaggtgtgtgtggagcaggttaccatgttgtggaccacacctcagagttatcctgatggaggacgaggatgctgagggtttgtcctccaactcagttcattattggctgaggtcctgacacttccagtgggcggaaactgtaggagagaagggaaaacttccccattgctcttggaaggcttgatgaacatcaactgacaaaaggcagatgaataggaaaaaatggcatgcaaatttattaatgtgccctggggacaatcacagactgatgacccccaacacaatggggtacagatggtcatatacccctcttcttaggggaaagggacatggagaaaggtggataattttgggggggtgggtagtaaatgatttttaggggaattcaatgggcctgaagaacaaacagtggcttgggacaaaatctgttgggcctgcagagtagacaatgatttgtaacaaaagtatgtaggtgtgttgacagacttcagtctcccttcatgagatattagttcagttcatgtaaatgctgggaagggacaagaaatgattgattgtttttcttctctgtggggcctggcctttaggcagacaagggaacttcagagaacaacttcatcctgtgtttgggagaaacagaggattgagagacaggagagcaggggaaggtcagagagagcttgaggtatcttcttcagttcaatatgtcaaagtgccatactttgggctattggttgataagtcccagcaaagcatcagacggagagttgcagggacagccgagggcataaggcctggggccatgtattagtccatttttatgctgctgataaagacatgcttgagactgggaagaaaaagagatttaattggactcacagttccacatggctggggaggcttcacgattgtggtggaaggtgaaaggcacatcttgcataggagcagacaagagaagacagcttgtgcagggagactcccatttttaaaaccatcaggtcatgtgagacttattcatgagaacagcatgggaaagatctgcccccatgattcaattacttcctgctgggtccctcccacaacatgtgggaattcagaatgagatttgggtggggacacagccaaaccatatcattccacccctagcccctccgaaatctcatatcttcacatttcaaaatcaatcatgccttcccaacagtccctgaaagtctcaactcatttcagcrttaactcaaaagtccacagttcaaagtctcatccaagacaaggcaagttccttctgcctatgagcctgtaaaatgaaaagcaagttagttacttcctagatacaataggggtacaggcattgggtaaatacagccattccaaatggtagaaattggccaaaacaaaggggctacagaccctattcaagtgggacagcccaaaacccagtggggcagtcaaaccttaaagctccaaaataatctcctttgactccatgtctcacatccaggtcacactcatgcaagaggtagactcccatggcttgggtggttctgcccttgtggctttgcaggatacagcctcccttccagttgccttcacaggctggcattgagtgtctgtggcttttcctggtgcacgatgcaaaccatcagtggatctcccatcctggggtttggaggaccatggccctcttctcacagctccactaggcagtgccccagtagggaccaaccccacattttccttctgcactacactagtagaagttctccatgagggccccacccctacagcaaacttctgcgtgggcatccaggtgtttccatagctcttctaaaatctaggcagaggttcctaaacctcagttctttacttctgtgccctcacaggctcaacaccacgtggaagctgccaaggattgaggcttgcaccctctgaagccatggcccgaactttatgttggcccctttcagccatggctggagcagctgggatgcagggcaccaagtccctaggctgaacaccacagggaccttgagcacagcccatgaaaacactttttcctcctacacctccaagcctatcatgggaggggctgtttcaaaggtctctgacatgccctggagacattttccccattgtctttgggattaacattcgactcctcattacttatgcaaatttctgccactgggttgaatttctcctcagaaaatgggattttcttttctattgcattgtcaggctgcaaattttccaaacttttatgctctgtttcccttttaaaactgaatgcctttgacaacacccaactcacctcttgaatgctttgctgcttagaaatttctccaccagataccctaaataatctctctcaagttcaaagttccacagatctctagggcaggggcaaaatgctgctagtctctttgctaaaacataacaggagttatgtttgctccaattcccaacaagtttctcatctccatctgaaaccacctcagcctggaccttattgttcatatcactataagcatttttgtcaaagctattcaacaagtttccaggaagttccaaactttttcacattttcctgtcttcttctgagccctccaaactgttacaacctctgcctgtcaccaatttccaaagtcacttccacgttttcgggtatcttttcagcattgcctcactctgctggtaccaatttactgtttagtcagttttcatgctgctgataaagacatacccaagactggaaagaaaaagaggtttaaggactcacagttccacatggctggggaggcctcacaatcctggcagacggtaaaaggcatgtctcttgtggtggcagacaagagaagagtgcttgtgcggggagactcctgtttttaaaaccatcagatcttgtgagayttattcactatcacaagaacagcacaggaaacacctgcccccatgattcaactacctcccactgggtccctcctacaacacattggaattcaagatgagatttgggtacagacacagccaaatcataccaggccatgaatgccaaagggagcagcaccatctacatggatgtatctgtaaaggtgcctttggtgaatataacactttgtaaagcttgtatatatggagtctttagaataatgcctgttcctggtttttcgtgtcttattcagccaaattttagttgacctttacccagttctgaactcctttgaggcttttgtgctagaacaagatttggggaattcagatagcaagtgagtgatcatacagctctgaattgttaagagctgggaaagggaacttggaaaccatttaatacactttgaactttacagaggattaactggccccaaaatacccagtgttgcatagtaagctcttgtactatgtatgatatcccttcctacggaaagaaaaaaaaaaacattttagctgatgtcatgatttatcagcataggctccaggtgagagttatgagttactgaaattgcctggagttcttccatttccttttaaacaactaatgtcaggcatatctagaataaaagctgaaatttaaaaaaattwaaaaaacccacaaattttctctcccttcacagctttccccaaatcactcaatttcctcctctgcttctcctgtgggctagagtaggcccagatatggagtggctgggccttgacaaccttctctgaccccctcttacttagataatcaggacttttgatatctattagagtgggcaatggtgaataatagataatccaggatttagcatggacaaatttacccactgagaataaatcggatttgagtaagtgaaggcatttttattataactgtatgatccaggtatggattccaaaatttcatagttttgcaacgaagtgatctaatatgtcatgcattttaaaggctcaagtctggttatttctgatggatgttttggcttcatagtttatttatgtgatggcttgaatactgatttatttaaatcatgatacatagtctgattactaatgtttaggccagggcaacaatttcactgactttatgaaagagatttcatttcgctggaaaattacactcagatcatgcaaacctctgtcctctggagttgatatgtaaagaaaagaaagttatttgtgaacagattggagaggggattatgggattaaaagaaagggaactggatgaagtgggtcttctctgaatgccctcagcggaaagaacaaatcatgttgtatgtgtaggagaagtgctcttttattttgtctccctgtgcataagtttgtgtatgaatgtgtatgtatgtggatatgtgaatgtttgtatgtgtgaattttttactgtgtttgtttctaaataagcccactcatcctaaagttccaaagaagaattcaatctttcccagtctctcaaatgtcatctcttctttgtttctaccttttcttttctgccttttctggttttgagaattttataagattccattttttaattccttcagcatatcaattattcttatttttccccttgtttggggttgtacttgagtttgcaatatacagtgacaactaatccaaatccactttcaaataacactataccacttcacaggtagtgtgagtactttacaacagtattaccaattttcctctcccatccgttactacattgctgtcactcattttatccataagctataatmatcaaattctttattgctgttattttgaacaaactattatctgtcagatcaattaagaataagaaaaataaaatattttattgtatgttcattcattcctcctctagcggtcttccttccttcctgtagatttgagtttctgacctatatcattttccgtctttctgaatagcttattttaacatttcctgcaaggcaggtctattgccaacaaatgttcttaatttttatcgaagtctttatttctccttcatttttgaagggtagttttcctggatgcagaatgctagatgggtggattttttctttcaacactataaatatcttgctccattcccttcttactgccttgatttctgaagagaagtccagtggaactcttatcctctgcttctctatagtgaaggtggttttccctctctggcttctttcaagctattctttgtgtctttgatttactgcagtttgaatatcatgggcctgctgctgagttcccgaatccgtgatttggtgtctgtcattaattttggaaaattctcagttattatagttttaaatatttctcctgtgttttcctatctttttttttttacttctggtattcccatttgtgttatacattttataattatccgatggttttttaatgttctgttctgtcctcttaacccttttgtttttctctacatttcagatttgaaaatttctattgacatttcttcaagcttacygttttctcagccatgtccaatctattaatgaacctatcaaggacattttccatttttgatgcagtatttttgaccactagcctttccttttaatcctgtcttagagttacctggtttctgtttgcattatccatctgtttttacatgttgtccactttttccattagatcctttagcatattaatcataattgttttaactttatggtctgataatcccaacatctctgctttatctgagtctggttatgatgtcttttctgtttatttaaactgtgtgtgtgtggttttttttttgtcttttagtatgccttataattttttttattaagagacagacatagtgtatttgtaaaaggattggaagtaaattagtctttattgtgaggttttatgtttaccttgctaggaatttggttttatttttgcagttagctgcagctataggtgtcagaggctaacattttctctagcatccttgtttggtctcccctgttgtctttggatttccctagagagttgttcttaataaggtctgagtcatgtaattccttccatcatatccccctgttgttttacaggatgtggtgctcaggggctacggggggagaagtgttctgtgtggtttttttttttttttttgagacagcgagtctcactctgttgcccaggctggagtgcagtggcgtaatctcggctcactgcaagctctgcctcctgggttcacgccattctcctgcctcagcctcccgagtagctgggactacaggcgcctgccaccatgcccagctaattttttatatttttagtagagacggggtttcaccgtgttagccaggacggtctcaatctcctgacctcgtgatccacccgcctcggcctcccaaagtgctaggattacaggcctgagccaccgcgcctggcctctgtggtcttactggtaggtgtcagtcttttatcaagcctgtgttcctgggctgtgaccttcataaacaattctccattgttgcccccatctttaaatgagacaggaaggctagagggggctggagttgagtgtttctctttctccaacttggtttggctctgataaagccccagccagttagatgatggtgaaacagtttacttgaaggtaggcctcgttaagaacagaatgctctcggcatatttcagaatggtttcttattccctcctccttctgaaggcatgatgggatttttctctgatctttactgtgagaaccatatagagctcgtggaagtaaaattcatgaaagtagggggactcccccaagactggactccttggagtttttaactctgagatttttgtccccactgagtctccagcaatttgtccattacagtttaggttttctcaccccagtgctggctgcggaagagattcctgcttgtgggcttctgctccaatatgttgtcattctccgtatccacctatctgtctctccagttttggaagcagtgatttgccttgtgacctgaattctttgatggatctaagacgagtttttgatttttcaatgagaataagagtgaagactttcaagctccrtatatgccaggactggaaaccagaagtcctcctacttttttgtttcctgacactttcttatacgtaggatccaagctggtgatttcagctttttccctcagcaatatgtctgcttggatgtggggatgagagatgggaggctgagatgaatttcagggttcataatttgtgttgagtggatggaagtatgattaatttataagcttttcacgtgtgtaaatctgccycttgcctctccatgccccaattacaagagtagcatgaggaacttgttatcttagaacataatttatcaaatgttaaatgtagttattattattgcttccaaattctgtgatttttgaaattagagttgcattgataaaacttcattaaagatcaagcaacagctagatgatccgtctctaagcttctacactccattcacttcaaatttattgagtctctaatgtgctaggtactcttccaggcattggaaatacagcaataaatcaaatggccaaaaacttctaacttccttgcatgttgatgccatattctaggttagataaaagttaaaagcaagcatgtaaaatatacagtctaccagatggagacaagakgtagggagaaaaatttacggaatatatattgagatgtcagtgaagggagatggctctttgaaatagggcagtgacagctaagttaattaagtgacaagagccttcagggcaagggaaaaaaacaagtaaaagttctaaggcagaaaatactcagaagagtcaaagaacagctggagggcaccatatggctttcactcggagtgaaaatgggagccactggagagctttgaacacaaaagaggcatgacttgattcatgctttgaaaggtttactctgacagttgtatggaaaataaatgggaggagaacgagagtacatgcagggagaccaacagaaggaagagatgatggtggtttgcactactgtgtttcagaagtggtggggtgtttttggattttggatacgttaagcatatagtggatgctatttgacragggactgagtatgtggtatgagcagagagaggagtcatagtatcaagttgttgtttacagagatgaggaccaccgtgggaggagttggtttcggtggaaygattagggaaacatctggagctttgcttggggaatagttgaagtgtttggcagacagcatcgggaaaatgttgagtgtgcttsgatatattaatcctaaattcaatgcagaggtccaaatataaatttggaagtcataagcaaggaatagacttttacagccttgaactggatgaaatcacctaggtgtaagtgaagggagaagaaaagtgattgatagagcacttctgtattaaggggctagtgagatgaggagaaagcagcccgggactccgtgagctgtgctgatgtgctagggactgtatcctggaaacaactgaccatgctgtctttaagatctttcttagccaaggtataactgtcttcatctgaggatagtactttaattttgagtttgtgctattacttatttgtcatgagagtattaagtctgttctttttttctatcaaattaccaaaggccattctttcgcttgttgaatctagttcaccaaataggctatgcttatttttatagagccctgtcttgtgctcctgtgatatgccccatagaaactaggagactgcacgtctaggctgtggctttgggcaactcatttatgcctcagtgttcctgtctgaaaattcattcannnnnnnnnnnnnnnnnnnnnnnnnnnnnnnnnnnnnnnnnnnnnnnnnnnnnnnnnnnnnnnnnnnnnnnnnnnnnnnnnnnnnnnnnnnnnnnnnnnnnnnnnnnnnnnnnnnnnnnnnnnnnnnnnnnnnnnnnnnnnnnnnnnnnnnnnnnnnnnnnnnnnnnnnnnnnnnnnnnnnnnnnnnnnnnnnnnnnnnnnnnaaaaaaaaaatgacttttgccttgtaaaagctcactgagtgtgaagcataatacaaatgtgcatgtcattttcttcattgtttattttcagaaaaacgtgttaattccaaaaaataatgtgtgtctttttataagtgcttaaaagcttgaaaataaagtaacttgtatataataaaacaaagtgtatgataacagcaaaattccatgttcgttttcataatgtcacaaagcagagtgatgcattcagtagtggaatgttggtggaggccaaacaactgatatttttattgactgttcttccggatttctttagaaacaagctataattaaggactacatgacagactttccacaatagatttcttctgctatttttcggttaattaattataatttgttcaacaaatgggaagtgtttaattttactcaatagaaatgcaaacatgtcagctcaatgctgtgtacgcgcctagtagtgactatatgtctaaattgtgagacccgaagtcaagtcatctctgcaacagaaaatacccaggatacagcatcattgcaagcagtgagaagatggctcaggcttccaagttctggagctttccttgattaaatgcaaatcattgtgactggaaaaaattctcagaacattaaaatctagtacaagcctaggaaatgagactcaggaattgcattaagtgaaatgattccagtcatyctatcacaaacccacctgcttgctgaaaaagtaagagagcattttaatagaaggacttttgaaaactactaagaacaaatgcaagtaaaaagtgaaatacacacgcacacacacacaagtgcttgataaaggggacgttggagtcaatttaattgacggaagagtttaattcatgttctagataaattatgaatattagagaatcatgaaattgccctgatgcttggtcctaattatttagtaatattctgagccttagatcatcaacacaagtctgaattacagactaatgttaaataggaaaaagtggtgcaaaagagaggagtcttgttaataatacaagtaatagaaatggcactaaaatgttaaactcataatatgtatcaaagtcttcactggaaactttcaatatgtggtatttgagcctaataataactttccaatatagatcttatttttttatcatactacatcagatcacttctcttgatttatatttatatttgtattatatgttttgattagagtataattgctatatagtacaatgcacatatcttagatattcagttgaatgtattttcatacttgcatacatctgtgtaaccaccatccaaaaaatatatagaatatttttattatcccgaaaatgttcctcctgccctttcatgcagcaggtcttttcattctgatgctttgacatcatgaggacttcctgactctggagtggtcacccctcctagggttatttagctaaatcttaagatagcaaaacactttctcaggagcttgcttctcacatgcagaccaacttatcagaagcccacacctcaacctcstttgtagagctatcacagggttctcacactcgggtcattattcagtactaatcaccccagggaaactggggacaaccctgtcccagagcccagtgaaattattawaactgggaattataaactgtttattcttctttgcctgttctttcccatggaaaccacagtaaagggccttacccacattttcctcctttcctctgaccgcccagtgtcatggtgtgccctattctcttaaaaaccatgagtagcagtcttttcagtgacaatcacatcttgatttattggtctcgtcatacctgaataatagtaaaacttgcatttttaaacacttttgttttagagacagtgtctcgctctgtcgcccaggctggagtacagtggtttgatcttggctcactgcaacctccaccccctgggttcaagcgattctcctgcctcagcctcctgagtagctgggattgcaggtatgcaccaccatgcctgactagtttttgcatttttagtagagatggagttttgctatgttggccaggctggtctcgaactcctggcctcaggtgatccaccggcctcagcctcccagagtgctgggattacaggcatgagccactgtgaccggccacattttaaaacactttacactcgaatttctcacagccctgaggcaactgtattgtttctatcatcatagactacgtttttgtctttgtctttgaacagtttgactatcttgtgtctaggtgtggattgcattgtgtttctcctacttggcgtttcttaagcttattggacatgtagatggaggtttgaatcaaattttgaaagttttcaaccatgattttttagaacatattttctctccttcgcgtctctcctctcgttctggtactatcatttcacctgtgttgaagcactaactgacgtcccacaggtctctgaagctgtgtttatttttcttcattcttttttctttctgctggttttgagagtggatcatctttactgaatgatcattaagttcactgattattctatcagctcaaatctgctgttgagttcctccagtaaatgtctaattttatttactgtcctttcaaatccagaattttcatttggttcatttttatcattctgttctatattgacagtctctatctggtgaaccatcatcatatttcccttaattctgcaagcatggtttccttcaattctttgagtatatttataatatcttctttgtagtctttgtctgttaaacccaacatctgggccctctcaaagagagtttctattgaatgactttccccctatgcatgggttacactttcctgtttcttttaatgtttgataagtttttgttgaaaactgtgtattttagataatatattgtggcaactctgtattctgatatccccgggctgtgttattgcaatgttttgtttgtttactgacttgccttgactaagtctgtggcatgtttacctccataggtatggcctctgatgtcgtcttctctctctctctttgttttcctggtgttttctatctttttaagtcaggcttcctaagtcttgccagtggatcagcacactttactggtgacaactgattagtcacagcttgtctttaaactgcttgagtgagtttgtttcccgtcctttgctgtcggatttttaaaactgaggaagttaagaagtatggcctgtgttcatccagggacttttagttccaacggccctctctagcctcttctaagttggtccaagatgagtgacagcttagcaaggctctcttttgctggatcttcgtgttaaatttctggctgatcagctttttcttactttccccactgatatcacagcaatgttagcctcccaagattgtttgtcaccgagatctatattgtttgaacaataaccctgggatttttccatggaacttgggggactttttttttcaggagaatttttctgtgctctgcgccaaataaagtcatccttgtgtggyagtgctgtggagctgtcagtattcatgggaggccctgctttccagggcagaatttacatgttatggagcttgaattggatgtgagcaacccctggctaaratgctacagactccgctgtttataaccagattcaatggattttcttgaacaaatccttttcaatttgttgtgtgtcctttggccaatatctagacatttttaattataactgagaraggaatggccaagttcttcacacagatactctgccaccatagatcactttgttcttggatttcagaaaaatggaatcacacaggatgcacttgtctatgtgtgtgtatctggcttcttttgacaatttaaataactttccatgttactgtgcatataaaagttgctctactttttaaaacttttcatttacaaataattttaccttcacttggaaacttcattaatattatagagagttacctgtgtaccctttacccagaatctccaaatatactatgatcagagcaaggaaactgactgtacaatatattaactaaagtacaaaccttatttgagcactgctttaaaacccttgttagacaaggctaccatgtgtgatctctcggtgttgatgtctgctgatttctaattcctgttgtaattcacgttttttttttatttgatgagtcattctgtattgtattctggacattttgagtatgaaattatgagactctggtatttaaatctattgttttagcaagaaataaatgggttagtttttgagtgcacattctggcctacttttgtgggctgttatttgaagttaattttatgttcgaagcctattcaacactattttggcctgccctagtttgcactacccagaggccatttgtaattagggggtattccatgttctagttcatttctccaagctttttttctgttaattctggttggtttcatttggtgtatctccaggacttgatacacatgtgtgaatatgttttcttccagattcctcctttttaggtggcagcaaagagatggaagcagagactctttgctgttgtttgcttagtttagtgtgcagtggggatcacaggcaggcctctgtcccccagtctccacagaccccagcagggagggggccaaatgtcacctctgctcatgacagtacaaagtcagtgcactctgcagtgctgagaaagaaggagggagggagggagggagggagagagggagagaggaaggggagggaagagaagggaggannnnnnnnnnnnnnnnnnnnnnnnnnnnnnnnnnnnnnnnnnnnnnnnnnnnnnnnnnnnnnnnnnnnnnnnnnnnnnnnnnnnnnnnnnnnnnnnnnnnnnnnnnnnnnnnnnnnnnnnnnnnnnnnnnnnnnnnnnnnnnnnnnnnnnnnnnnnnnnnnnnnnnnnnnnnnnnnnnnnnnnnnnnnnnnnnnnnnnnnnnnnnnnnnnnnnnnnnnnnnnnnnnnnnnnnnnnnnnnnnnnnnnnnnnnnnnnnnnnnnnnnnnnnnnnnnnnnnnnnnnnnnnnnnnnnnnnnnnnnnnnnnnnnnnnnnnnnnnnnnnnnnnnnnnnnnnnnnnnnnnnnnnnnnnnnnnnnnnnnnnnnnnnnnnnnnnnnnnnnnnnnnnnnnnnnnnnnnnnnnnnnnnnnnnnnnnnnnnnnnnnnnnnnnnnnnnnnnnnnnnnnnnnnnnnnnnnnnnnnnnnnnnnnnnnnnnnnnnnnnnnnnnnnnnnnnnnnnnnnnnnnnnnnnnnnnnnnnnnnnnnnnnnnnnnnnnnnnnnnnnnnnnnnnnnnnnnnnnnnnnnnnnnnnnnnnnnnnnnnnnnnnnnnnnnnnnnnnnnnnnnnnnnnnnnnnnnnnnnnnnnnnnnnnnnnnnnnnnnnnnnnnnnnnnnnnnnnnnnnnnnnnnnnnnnnnnnnnnnnnnnnnnnnnnnnnnnnnnnnnnnnnnnnnnnnnnnnnnnnnnnnnnnnnnnnnnnnnnnnnnnnnnnnnnnnnnnnnnnnnnnnnnnnnnnnnnnnnnnnnnnnnnnnnnnnnnnnnnnnnnnnnnnnnnnnnnnnnnnnnnnnnnnnnnnnnnnnnnnnnnnnnnnnnnnnnnnnnnnnnnnnnnnnnnnnnnnnnnnnnnnnnnnnnnnnnnnnnnnnnnnnnnnnnnnnnnnnnnnnnnnnnnnnnnnnnnnnnnnnnnnnnnnnnnnnnnnnnnnnnnnnnnnnnnnnnnnnnnnnnnnnnnnnnnnnnnnnnnnnnnnnnnnnnnnnnnnnnnnnnnnnnnnnnnnnnnnnnnnnnnnnnnnnnnnnnnnnnnnnnnnnnnnnnnnnnnnnnnnnnnnnnnnnnnnnacaggtctgttaatgacctgtcctccagtagaagtgtgtggagtgagtccagacagactccagcggagagtgcaccaactaaataccatgggccccaagaaacagatcaatgcacaaaatagaaaacccttctggagagtctgcctgtgagttaagacccccatggaagaagaagagctaagaaatgaaggtggagagaggaagagagagagacagagagacagagagagacctgaatttttcctcgccttaacccatgcctggttctgattttgctagttacacaatccaatatattagcttttattttctgcataagtttaatttacatttgattgtatgacttgtaactgaaagtatcctaacacataatgttcctgctgaacagagcagtcccacaaatcgataccaacaacatgaatcaataaaacacacaatgcaacagggaagtgtgtatataatgtaaatgggaaatttacacacaagaaagatccaaatagaaagttaacagaaaaatcaattccatttcattaaaatagaaaatacgaatgaaagcaacagaagctacagagagttgccatgttaaactatgagattagcagaaaataaatggtttgaaaatatccagtggtaagtgtgtgtggaaaggggtagttttatgatagcgtagatcaatgtaatctttgtgaacataacttaatatccagtgcaggtttcatttaagtttttcctgcaccacagggaacacaccatatgctcaagtaaatgaaagctttttcaaccaaattttgtaccagcgccaccactgttatctgcggtgaaatgggttattttgataaataaagtatgttgttggagtgtgtgtagtcctcagaaaaatggtgttcactgccaacacatcatcattcactatacatgcctgatgttttcaggtaacatcttgcttctagtacatcccacagtctaactctgattggtaaaatatacacatgtaatatcatcctacagaacaatccgtcacagctactcagagcacgtaattcaaatgacccttcaagttaacacatcaacttatatttggtaaaatgcttaacaaaccaaccaagtatttgcttttcatcgcttcctttaacaaatgtaaaaaagtaaaataattgaacatgttgtggtgtactctcttttatggttggatttaaaagcagcgcaaaatatgcgggcataaaactgcctgcagggcataaaaactgtcataaagttaaggaaataggcaaataattatttgaggacaaagaatatattctatctcacctcttaggctaaatttttgtgtgccaagaatttattaaagaatgtttacaaatatggatgccagtgttaagggtataaatttcccatgatgctccaagtgagatgtttgttatttgtttcaacttttaaaaattcaaatgcacattatgataaaatcagaacagatattgagcaatacatttttaagtgaataatgcttcacaaatcataacacctcaaattgattttgcttctttcgtatattacgccactgaaaattgagaaaacaaaccactattatttactgttaacattagttctgtagaaattaaatttgacttcaccagaaatacgtggtaaactgtgaacagcttacaatttgtaatatacaagttaagaatgaacaagccaagaaaaatttaatattttttttcttctgaagcactagacttcaaactgctgacataatttttgyctgttttgatgaaatacacaagaacttatcagaatattatttaacagcctagcactcctcagtgagtccaataaacctataatgcccagcaatagaaacagggctcatggaccatgggagtcattttgtcagggcaagcccagggagcactggggtgcacattgtctgccctcttgactctcagcacgtccctcccatctatgttggtgtcctatggtgagtctggtcagagccagagatcactccatctttggccttctaggtagcgcaggaaagagaaatgaagaaattctatatcagggctttagggtctgtgtggagagtctctcctcacttctaggaagtctatggacagcattctgataaaaagacataatcaggccgggcacggtggctcatgcctgtaatcccagcactttgggaggacgtggcgggtggatcacttgaggtcaggagttcaagaccagcctggccaacatnnnnnnnnnnnnnnnnnnnntcaagaccagcctggccaacatggtgcaatgccatctctactaaaaatacaaaaattagccaagtgtggtggcatgtgcctgtaatcccagctactaggaggctgaggcaggagaattgcttgagcccaggagacaggagttgcggtgagccaagatcacaccattgcactctagcctgggtgacagatggagactccatctcaaaaaaaaaaaagacacaatccctcaggttacaatggcacctgatgcagatgtggagaataaatgttcacataatattcagcagcccttgtaaaatagaaaaatagcttctcttttaatattttataggctttattatagttctattacacttgtaaagcaatatgctgttacaggaaatgagtttacataaatggcatctagacaactttaaatctgaatgctaagacatcagagcaactcccttagttcaggagacagatcccaaagtgcaggtttaggtttgcttatgatttcatatatttagagaagtggtaatgtagaactacaaaagacttcagaacttagttctgcacttcattttcaggtagtaaaaataataataataataatatttaatgccgatgttagaatacctacttactaggaactrttctaacaccttccctgtattcgtgctaatatgcaactgaaagtacaggccctggctgccactgatcagatctgtgacctggggaacatgggggcctctgttttgcaaaaaataggattaaaaactcacctgatttcagaggattgttatgaggaaaaggaagagaaatcgtattttcttttcaccttatggctttgatttttgggtgtaaacacaatcaaaactggaccaggcttctattttcatgtccacagtaattattttaaattctttgtttaaaacacggttatatgatctcaacccattctcttggcagtgttgttcgctaaccatatagctcaatcagcatgaacttaggagaagagcagcagagtgtggacactgtccacgcatttactacacacacatactagcagcttggatgagaatcatgtgctgaaatttggtgtgaaaaattaattctcagtcctggtacatacctttgctgtgacatataccactgtctttamattttttaaaaatgatctttgtattttagaatagtttctggtttatagaaacactgtgaagacagcacagcatttccacataccacatccccattatccccactgttaacatcttacatttagtaccatacatttatcaagattcataacccagtattgatatattaactagcctccacgctttgttcatattccatccttttcatctactacccttcctctgttctaggatcctgtccaagataccacattgcatttagctgtcatgttctcccaggctctgcttggctacaacagtttctcagacttacattgtttttgatgaccctgacatttttggggatgactggtcacatattttttagaatgcacctcaattgggaattgtacaatgtttttattatccatagaccggggttatgcgtttttgagaggaagactgcataggtcaagtacagttctcatcatactatcaatgcaacttgtcacctttgatgataaccttaaacacctggctgaggtggtgtctgccacgttgcttccctgtaaagttattcccttcatcatgcagtactctgcatactttagaaggaagtcattatgcccaactcacactttaaggactagggcattattctatacctcctgaagggaaaactacataaatcatttggaattctgaaaggtaaatttgtccttctccctcatttatcaattgactcaatcatttgcttctatcagtagagactcctggatatttattttatactctgggttataacccaacattactgtatttattttgttactcaaattgctccagcgttggccattgggagcacattctgttagctcctttgttcctttgacatacccagcatgattatattttttatattacattttctttcttacattctggcatttcaagatattccacacttatattctgtttttttctccaatcctagaactagccatttctaagagccccggttcatttcagtagagaayggtattagaaatctggatgtggtctgggcgcagtggctcaygcctgtmatccsagcactttgggaggccaaggcgggcagatcacgaggtcaggagattgagaccatcctggcaacacggtgaaaccccatctctactaaaaatacaaaaaattagccaggcgtggtggygggtgcctgtagtcccagctacttgggaggctgaggcaggagaatggcgtgaacccgggaggtggagcttgcagtgagctgagatcacatcactgcactccagcctgggtgacagagcgagactcygtctccaaaaaaaaaaaaaraaaagaaaagaaaagaaaagaatcaggacatgggcgtgaagaaagttcatttatactggagtgctgttgcttctaagccctctcagcttccaaagcaggagaatatatgtgtttataatgaccatatacatatacacatacatataaacatatctataaatatttctctgtatacccttctatatctatatttaatcagttacatcatggatcattctagcctcctcccttgtttatctgtaaactctcacttccacagatagaatcctggctttccatttaccacccacttgcttaattttttaaggccagaaaatgtgtagtggtttcagatagtaccagtgaagctgcaattcattcttgactatatcttcttattaatatatgcactcctttctgttgagcatatactrtggagtggcatcttctgcctctggcaagatggaatagaaaggaacagaatggcagcccccctgataccttgatttcagcccattactgaatgggcttacgatctatgccagacttttgacctacaaatctgtaagataataaattatcattattggattagggttagggtttcagcctaagtatttgaacctatgtgtatctttcagtctaargtgaatctcttatagacagcatatagtctgatcatgttcttgttttaatctattctgccaatctgtgcctttcaactgtattattttattgtttaatatttaatgtaatgacagataaggtwagatttacaactggggtttttatatttgttttctgtatgtcttaggtcatttttgttcctctcactgccttcttgtgtattaaatatgtgttctctagagtacactttaatttccttgctgtttcttttactacattaaaaaattatgctcttagtgttttccctgaagattataatcatcaccataaagcaatccagctcaaattaatactaactttattttagtagcttacagaaatattgcttcaaattttatccccttttatatttattattatcatataaattacatatttatgtatgataagtrtataagcacagtttaataacttttggtttattcagttgtattttgatccctatggaagtagaaaattgttattaaagtacattggcattgtcttttatatttacctatrtaattacatttaccagggttctttatttgttgtatggcttctgattactctgtctatccatttgttttttcattttagccaaaagactctagaatttcttgtaaagcaggtgtgttaatgatgggtgctctcagtttttaaaacctgggaatgtcttaattttgccttcgttttkgaagggtaattttactaaatacaaaattcttggttgacaatctttttcttatgacagtgttaaatatatcatcccattgccttttgacttccattagttttcatgacaagtcagcttttgatcttgtygttaagcccttgtactatgagatttttttttcttgcttgctttgaagagtctctctttgtcattgtcttctgtcagcttgactattatgtgcttaggtgtggagttcattgagttttttattttatttggaatttgtcaggcctcttggatatgctgattaactttttatattatgtttagaaagtatgaggtcattatttcttccagytatctttgtgacctttcccctctgccctctccttctggagttcccattgtgcatgtgtttgtacaattgatggtgtctcccagtctctgaggctctgttcatttttcttattctttgtatctgtttccccagactggtaatctcaattgacctatcttaaaatttacatttccctggttctttattctgtcagatcaaatctgctgttgaatccttcttgtggattttcatttgctatattatacttttcaaacacagaatgtctatttggtccttgtacgtaatttctatctttttattgcagtccctcatttgatgacacttgaagacttgtacatattaacaagctaattctaaaatttagcaggaaaggcagagagactataatatctaaaacaattttggaaaaaaagaacaaatcttgaaagctaacactacctgattttacctattactataaagctacagtaatcttgaaagtcttattgtcaatagtgtagatacatagatctatggaacagaattgagaatctagaaattaacccatactaatacggtcatctgaatttcaacaagagttcaagagaagagatagtcttttcaacaaatagtcctataagaattggacatccataataaaaaaatgaacctagatatacacctagcaccttacacaagagtaactaaaaagggattatgacctaaatgtaaacaaataattctagaggaaaatatgggacaaattctgcttcatttgggttgggcaagcatttcttagatactgcaccaaaaacatgacctataaatggaaagacaatggataaattggacatttttttttgagacagggtctcactgtgtcacccaggctggagtgcagtggcatgatcatggctcactgcagcctcaacctcccaagctcaagggatcctcccacctcagcctcccacgtagctgggaccacaagtgcacatcaccatgcctggctaattttgttatttctttgtgtagagacagggtgttgacatttgcccaggctggtctcgaacccctggccctcaagcaaactgcctgcctcggcctcccaaagtgctgggattacaggcatgagccaacatggtgagcctgtacttactaaagtcttttgctctgccatagatactgttaagagattatgaagacaaattacatactggaagaaaatcattgcaaatttcatttgaacagagcttgtatccagagtatgtaaggaacactcaaaagtcagcaataagaaaacaagcaacccaataaaaaaatggtaaaagagttaaacagatactttcccaaaaaaggtatataaatgtcagatatgygtatgaaaatatgctcaacataatcattagagaatggtgaattaaaactagattgcagtaccaatacgcacctattagaatgtcttttgaaaaattgcagaataaatgctggtgaggatgtggtggaacaactgagctcttacacatttcctctggaaagcaaatggtatagcgactttagaaaatagtttatcaggttacacaaagtaaaacatacacctaccgtattatcagcattctcatttctaggaaatggaaactcatgtctcacacacacagacttgtacataaaaagtgacagctgctttattcataattgccaaaatttgaaagccctccagacttccttcaactgattaattgataaacaaactgctgtacatccacataatgagatgatttaaaaaaagctcttgattcatgtaacaaaaatagatgaatctaaaaaagaaggaagaccaaaaactacatattgtatgattttatttacattcctctgagaaaggcacaattataggagaaaaaagaggttggtggttacctggggctggaaaatggggaggggtattatcaatgaagaggtagcatgggaaaatgtagggagtgatggtatcgaagtggtgaacacaagactatgcgtttgtcaaacccaatagaactgcacaacaaaaaaatacatttttacggtacataaactttaaaaaaatctgccagagtgtaagcacaaagatgaagttcatacttcaacaaatgaatctgactgtattataagtgaaacatacgcctacatggaagggggcgggggtgcaaagagctggccagagtaacaatatgctgacttgattttgtaaagctaaagaccagaacgactgcaattttagttttgactaacttgtttatttctacaatcctgatacatagggaaacgatacctgtggaaatctacagttctctaacaatttgttatttgatctagaacttgtaatttctctatattttctgatttgccgtgtccaactgcctctatgtggctttcaggcaatattcaccatcattaggacctacctcacgtaattaactttactttaaactctcttatcaccttcctttcttagtctgtccattttgcccccttcatgtaccacaccatacttcctctgccagattgagggcgtattcccttggattttttaattcacattgctctgaaatttgcctccgcctctgctcgtctatggtttgtccctcaccatttctaaactctcctccagcctcccgcttctgctgatagtaattggcatgtagctaatatgaagtagaggattttcgtgtgcaggtatttttcttggtgtttatggtatcacacttaatcctcatctcaaattccaaggcattttcttctctgaaaaattttttttttttttttttgagacggagtctcgctctgtggcccaggctgcagtgcagtggtgcgatctcggctcactgcaagctccgcctcccaggttcgtgtcattctcctgcctcagcctcccgagtagctgggactacaggcgcccgccaccacgcccggctaaatttttgtatttttagttgagatggggtttcaccgtgttagccaggatggtctcgatcycctgacctcgtgatcctcccgcctcggcctccccaagtgctgggattacaggtgtgagccactgtgcccggctcttctctgaaattttagtatataatctataccatttataaatgtgggtcaaagacttaatgtctatatcacatatatgtcaaagtcatttataaaaaagcctgggaatgacctttgcaggaacaacagtttctggatggcaaggccttacattgtgcctgatacatacatatttaaagatgatatatttcaatttgtaagttttcagaggtggagctgaagaagtaggtaatattgccatactgaaaaccatgcttattaaattgacttatttactctcatgcgacatattgtacttttaatttataaatatttattgggaaatcacaaatatatgtattcatacgtgtgtttttgtgtgtgcatgtgtgcaaattgtgaaaagtcctttgaagaaaatattaatatatacctatcttgttttttaaaaagtaatttgagctgaaaatcacaaatatgtgctgattttctaccaatgtggtatagtggaagtgtagaaagtaaggctcctgagttcaaagaagtctttccatatgtttgggtaggggagatgacaagcgcgcgcacacacacacacacacacacacccctctattataggacaatgaaagacattgtataattaagtaatatttgagttcagaaaagggcttgctgactggccaacgtgtacctgactatttgcttaatttttccaaagatagaacgcagtagtccttgaactacagataaaacctgcatcgtcagaggtaaacaagaaagcagatcaggcagaagacacactattacactattattaagagccgggaaggggaagtttgaatagcaagtgcagggcatgcctggactcctcacagcaaggcagcaatctgttttctacattgtgagttgaagcttcccaccgtcagagcaattgtttatgagctttagtcttaactttgaaaattgagcatggcagacctttcctctcatccacaaatctaaatgaaaagagaacaatgggttcaaaagctaaaacaatggcatagcccctcatcagctaaaatatgttatttattacctaaaattatagtaagttgatttattaataacgggctttctactgaacacttcctctgagtcccttcagaaactctttgagaagaccctgaaaacaaaatggagtgattcagctaaaaatggaaaaataaatggatgtcagttctggccattgaaacaggaaagaaagggccctgtggttgctgcagaaatgaacacgtgctttctctgctggactcaaacctgtgcttaagatgcataataacggcctccagtccctgcggttaatcagtattcaagtgccttatttaattacatggcaacggttcctttgtaattcctttgctttccccagacatacctagtaacatttgttcaaaccatagtgcgtttccaattaatatatcaaaaggcacaagcttaagctttgacattcgtagaaacctttgacttggaagtatgttttctaaagagactgactactgtgcttgaccttggggcccttagttaggaaggagagtattttattttagattcaacttaaaccgtcgtctgtacttgctatttgagtggctgactctcagcatttggtccattttgttaaaatgtcttcaatttcctatctcaagactattaaaattatttcctctgaatgatgacagtagacccagatcttcacacaaagacagaaaagatcggcgttgaatcagaagttaaatacccgcattttactaagatgctctttcgaaactcaagtccagagcagatgaatctggacttgcttgctggtgaaatataagcaggagttatattcttgtaaatatcagtctatgtgggtgatcaaaactggtgtctrctgcatgctcattttattttagtttttattctctattttcaaggctacacataaattttaaatcttttatcactttgctrtgaagggatttgtctgaagctaatgcctgatttttcagatgatgtttttcttctatacaaaagccagatatcgagagttttaacatttctttttcctctacctaataattggtagctattagaacgctaaaatgaatactcaccattatattttttaaatgttctttcagggccttctttcttaaactatgttgtgagaataaataagtttatttgagagttttacaatttaagatttttttgcaagatacctcacattttgtatttattttgccatgctttagcaaagcactttgcagtcatgtacgaaagtttccaattaatttatctgctttaaaatactgtcttacaatgactaaaatgctgctttccttaccattgaataagrtactatgctttgatgttaaaaattgattagttcctttcactttattactcttccattcacatgtgggtttatttgttttaaatgatatttaagaaagcacttcattttcttagaactagtcatgtaggagagaccagtccagaattttaaacgagtttagagctgtataaccccattattcctcaccactagatgaggatgtgcagattttgtgctttttcaaattagttatacgtgagtgttcctagctccagatgagcttatcagactgagaggaaattgactggctcaaagagaacttcctattctaaatttcactggtattgtcatcattgtctatggctggttgatttaacgtgcattagtgtagggacgtgtgtcctctaaacaacgaagatgtatttaacctcagacctggctcacacractacagaatccacgacgggagacaaaacagtctcccgtttcatggatcttctcttccgcaagtagtccatagacagaatttggagggaatctttgaacctagatgtaaagaaaatttcatttttatttccactaacctctaactgaaatttagcatgactttcaattttgaatgaagcacaaactacagcagttccttaataaaaataacagattttctcacatcgtattacaatgattgcaggaatttcaaagtgccattttcgttccttactacatcaaaattctagtaaatattgagctcactggtagatgttttatttaatgcatcagcagagaggcrcatatgttactggattggaaaagtgtattagtaggattatcgtttacawcaatgtgattggattccttaattaccatatgtattttattttattcctttaaaaaccagggttctattggcattatcagattgcaaaaaggccccaaggtgcaaacaaaattaagtgcctcatccctaaagtatttcactggtacttgaatattttcaggctttatccaaaacaatatttgaaaatgtgtgaactttttcaatgtagattctggatcgcattcaacttcttcctaagtttacagataattatgtagatatttaaatttctccctctcttgcagttatttcgctctctcactcccttacccctgtgacattctaaccttatttcatgtctccttgtaagtaacaccaggttcacgtcttgaccttcttccatgctctcgcgaccatagttagattgtccagctggactgtagattaactgtgttctctaaggagttgtgcaatgccaagattcataaagcttaagatgagaaaatatcccatatggaacttacaaattcttcttcattatcatgtattcattattgaccaaataaaaataagcaaaggataacaatattttttaaagaggagaatcatgtcttttcaacatattgtattcattcccttgaatgaaatcttaatatgtctgtgtctgccctaatgcagacaattggccacaagcccaaacactgagaaagaagaattttgacactgtcagggatttttaaaaacatagctggtaaccccattattacagtgatgattttattttaaaatagtcatacagaaaaagggcaatgcttcatagagaagaaaaaatatacaggggtgaaattttaggtgttaatttaagtgcttacaattgaatgaataatattaaagccaatccctcttccaatctacttacaaaagccatctaaccaaagaaaatctgtagatgtgatgggtatttcagagtctggtaatagtggactatataattcagataaacctctctgaagacagacaaaaaaaatgcttgaatatttcagaatgctaacaagatattgaagacttaaggggttaagttcaggggaaggaataaacagaaggatggccatttggggccaaccctcctctatggatatcagcattttaagcatctgagagggttgagagctaaggacatcatttgacagccttgtgaatctaaggacaaaatgagcctaaggcccaccaaggggtcagcctggcaaacaccacttatttggcataggaatcctcaagaaatatatcctgggagtaaggataaactagagatatcctggcccttccaggatgggaagctcagcactaaattatgtcaatcttaaaatcagattaagtggatccaggagagcttgtgctcctagttacccagaatgaaatgcaaatcctctccaaaatattcttgtcttaagccccaaattatgtttacaaattttcatattcaatatccagggttaatagaaaatgcacaggcagagaaggagaaaatataccataagcaactaacaggaggagagcaagaaataaatagaaactgattcacaaggacaactgtgatgggacgcccacatctggccacttgctcttttttttctatccccctgcctatacatggggtcaaccaaatgcctcacataggtctagagcatgtacctatgtgatcatcctggggtcttgtggtccggcctatttgataaagcagttatcaatcagactgccaaagaaccattactagaatgttcaagtaagtaaaagataagatataaatttgaacagtgaaccagaaacaataaacaataaagaaacagtgaactagaaacaataaattataaaagaaaaaaattaagactgaaatttaagaactttgaagagagaattagtaaagtagaagattggccagaataaaatgaccaaaaaaaaatgttgaaaagttaaaggatggaaaatatagaagcagaagtacctaccaatcaggcaatgctcttttaccaaagagccaggcatatgtaattggaattcagaaaaaggaagaaaatgagagagcaatgatgttggaagcaatgagagctgagaaattttcaaaatggatgaaagacaccaaatcaaaaattccaaacccctataaactccaatcatggtgaataagaatgtgattaaacacacctaggtaatcagctgaaaaccagacccaacagaaaattattgaaagcacctagagacaaaacactaatttccttccaaggtgcagtcattaccttgagagttacttctcaactcagaggatggaattcagaagacaacggagtgaattcaaaatgcttttaaagaactcctggccgggcttggtggctcatgtctgtaatcccagcgctttgggaggccgaggtgggcggatcacgaggtcaggagatggagaccagcctggtcaacatggtgaaaccccgtctctactaaaaataaaaaattagctgggcgtggtagtgcgcgcctgtaatcccagctactcaggaggctgaggcaggagaatcgcttgaacccaggaggcagaggttgcagtgagccgagatcgcaccgctgcacttaagcctggtgacaaagccagactcaaaaaaaaacaaaaaaaaaaaaaacaaaaaaaaaaaaccgggcttggtagctcacgcctgtagtcccagcactttgggaggccgaggcgggtggatcacgaggtcaggagattaagaccaacctggctaacatggtgaaaccccgtctctactaaaaatatgaaaaattagccacgtgtggtggcaggtgcctgtagtcccagctacttgggaggctgaggcaggagaatggcacgaacccgggaggcggagcttgcagtgagcctagatggtgccactgcactctagcctgggcgacagagggagactccgtctgaagaaaaaacctatcaggcctcctaccccaggagtctgcatactttggagtgctttcttcaaaacttttaagtccttctctggtacctgggctggctgggctggcaatgcctaccttgtaattgtccaagttcctcactggtagctgtgacctgcagcatgtcagtgctgtctcactgggctccctgagcctgggatgcacccatctggcccctggctctttgctctctgacctcttgtttatacgtgggcgtcaaccagataccccacatagctctagagctygtgcctatgtgatcatcctggggccctggggcccggcctggtctgggagggctgtctggttaatggacattgtctgctcactggtatgagcttgggctacaaaaatgatgctgacacaggggtagcagtgggcgttctctacttggggcacccaccgccactggccttcaggatgttggatctccccacttgggactgtgtgacaggcagtcatccagggtggccacatgtatcttctctgagggcttttgagaccactgcccagcaaaggcaacaagccctgtgcataagtgtcctcttctgactctgactggtgaggagtccttgtgctcttggtctgtctcagccgtgtgggatgcgggannnnnnnnnnnnnnnnnnnnnnnnnntgggatgcgggaggcatgttctttgtgtaaatggcatggctctttctgctctgtcatgccccctagattcttacactggtatgtcctcgcaagtcagggtgtggagagtcaagaatagcttatactttgagagcaaaagagcaagtgtgatattgatagaagaataagcaaatggacaaaccaaatggaatagagatcccaagacacaatgatgcttccccagaaacctgttattctaaaacttgcattgaaaacatgatgaaaggatgcattctttggtacataattgtaggacattacttttttctgtatagaacgtaaaataaaataagatccctatacacattacctagaaatcaattccaggttgattaagaacataaatatgaataaaatagaaacattaacacatatgtaagaaaatatctctatgaccactaaatccatgatcagtagataatgatatgttgctcagcctcatttgttattaaagaaataattataaatgtacacaaaaatgagatgacatgtcatgcatgttagattggaaacattttgaagatcccagtaaatatgaagtatttgttaagtgtggggggtcaaggattgctttacactgacagttggaaaatcattatgggtaattggtaaagctgatggtgttcatcctctgtgtccaaacaattctacttttagacaaatatacaagaaaaatttcacttatgcattcgagaagacatttctaaaaatgttcattgcaatacatcttgtactagtgaagaatttatgagaatccaaacgttcatctgtaggtgaattgataaataatggttgatttttttctgtatgtgtgtgtgtttgtgtgctgagagggttttgaagcggcaacagcccagtagcaatgagtacacccagcacccttgtcttggtctctaaatatgattttctaataaaataaactgggactcctttaagaaatggctgattctaggactgggggagggaatatagggaaaatagaggaaaatgtaggcaaatggagcatcctgtagtgccaggaagtaagaaaatgttaaaagacacaaagatggggcatgtaaaagaaataaaggagctcccaatggccaaacactttgaacaacaaattaataatgaagccagcccagtggtgtgcacctgtaatcccagctacatgagaagctgaggcaggaggattgcttgaacccatgagtttgagaccaatctgggcaatgtgttgagactccatctcaaaaaaattgataattaaatttattgaaatttagcccccaaaataaaatatacacgagtccatacagatataatgattgaacatataaataaatggggagggaagaaacacaaatattcctgtcagaagaattcaaaataatttctgtagatacttcttgctaggaggcggagcttaaccccacgccattcccacatgagtgtgggctggacttaatgattttttttaagactagaatatgaaaggggggaaataaaatatctttacaatggtgagacctgacaaacctaatggcatccaagtgatcaaggtgaccctcaccagtgatgagccatgtggacagtgtgatatgatgtgttgagaatagcaaatcacctctgtggtagcccctaaaacactcatgcacatgtttagccacaagaaaacatcaggcaaaaccagattgaggatatttaacaggrtacctgaccagtactcctcaaaaccgtccaggtcgtcaaaaacaaggcacgattaagaaactgtcacagattggaggaaactaaggagagawcacagataatcgtagtgggatccaaggctgaattctggaacgkcaagagggtactagcaaaacttggtaagtctggagctattaaagagtagtacaccaatgtagtttgttagttttgtcaatgtaccagggtaatggaagattaacaatagtggggaaagggtcaaacgtagatgggaactccgtaccatgtttgaaacttttctgtaaatctgatactattctaaagcaaattttttttctttttgttgttgttgttgttgttttgagacagagtctggctctgtcacccaggctggagtgcagtggcacaatctcagctcattgcaacctccacctcctaggttcaagcaattctcctgcctcaccctcgggagtagctgcgattaggggcacgtgcgaccacggccggctaattttgtagttttagtagggacagggtttcaccatgttgatcagactggtcttgaactccagcctcaagtgatccacccaacttggcctcccaaattgctgagattacaggtgtgagccaccgcgctcggctctaaagcaaatgtttattaaaaaaataattggctgccacttactacacacctactggaatgggcaaaatccggaacactgacaccagcaaatgctggcaaggatatggagcagcaggaactctcatgtrttgctggtggaaatgaacaatggtagcacactttggagacagtttggcagcttcttacaaaactaaacatactcttaccatgtgacccagcagtcacactccttggtatttgcccaaaggaactgaaaacatgtctacccaaaagcctgcacatggatgtttgtggcagctttattcataattaccaacacttggaaacaaccaagatgtttttcagtaggtaaatgaataagtcaactttggtacacccagacaatggaatattattcagggctagtaataaatgagccaacaagccatagaaaaacatgagtgaaaattagatgcatattactaagtgaaagaagccaactgaaagggctataactgtatgattctaactatatggcattctggaaaaggtaaaactatggagactgtatagagaacagtggttgccaggggatgggagcaaggtaggaggaaagtggatgaataggtggagcccagagaattttttgggcattgaaactactctgtacgatattacaatagtggctatgtgccatatgtttgtccagatccatagaatgtacacaagaagagtgaaccctattgtgaaccacggactttgtgtgacaacaatgcggtagtaaatgcaccactctggtgtgggatgttggtaatggggaggccatgcatgtgtagggtagggcctccatggggtatctctataactttctctcaattttactgtgacccgaaaactgctttaaaaaataaagtcttaaaaaaaaatcacagactagtagatctgggttgaatctcacaccagtggttctataacaagagtaagtatcagaaacactggaaaattattaaatgcaggttccagggactttttgccaggtctcagaaattgtattttaagaggactgccctggggccttggaatctgtgtttttagtaagagcccccagatgtattgaatattagtgatacatataaatgaaaatatagttgagaacactgtttccagaaaattaatgaaaagccagtgatcgtgcagctatttgtttgctgagctacaaccagaaaccaggtctcaaaatccctcaggagaggcaggaatggctgctttatagttctgaaattatttctaactattaatggacctatggatcctattatcatgaagaaatgaacattgacacaagcaaaccccgggaccaaagcaggtgagaaggtaagaaatgcagcggtaatagctgtgagggccgcgggtctgccatgttttggaattccagagacttccagtgtggtgttttctacttcggggtgactgcagaggacaatagaatttctcctcctcaaggcacctgctgagccctaattgccttcagacttccagatgtcactaagtctgtttgcctgcacatattataagataaacattcaaaaaagacaggaaactggacccattgccttcttttcagcttctgctggtaatgcactttaagaccttgggtggtgcagtgattttttgccccatcatcaagcttgaagatattttaagtttccataaatcatcttgtacagtatgtattatacaactttacagaaacaatgtttaaagtattaagccaattaaatggatttctacacaatgggaatatttccagacccacctttctggtcctttttttttctaaatatgtctgtagcttatctttttatcctaataccagggtttttgacagagcaaaattttaatgttgatgaaatccaacttaatatttttttctttaatggrtcttgcttctgatatcatacctaaaaattcattgtctagactgctgtctgaaagatttattcccatgtttttccaaaatagttatagttttatatttaaatctattttgaattaatttttgtgcatggcatgcaatatagattaaggtttggtgcgggggctatgaatgtccaatttttcaagcaccatttgttgagaaagctatccttcctccattgacttggttttgctcctttgtaaaaaaaaaaatcgcttagacatatttgaatctacttatggagtctctgttctgtttcattgatctgtgtatgtaccctccaccaatggtaaactgtctcaattactgtagctatataattaatcttaacatcaggtagagtgcttcccccattttaattcttttttgaaattgttttagctagtcaaattcctctacctttccatataacttttggaatagcttatcttatgtagcaaaaaaaactctagctggaattttataaggaaccagggagaattgacatctttgttatactgagtcttccaaaacaggaacactgtgcatctctccattatttatatctttattagtatgtagaaaaatatgtagaaaaaatgactgatttttatgtgttgatcttgtatcttatgaccttgctgaacttactcatttgttctaggagttagtttttttacatagatttttggggaattttgtatgtagacaattagagagtgttttctttctttctttccaatccatatgactttgatttcctttttatgcctgattatactggcttaaacttccagtactgtgctagagtggtaagaatggacatctttgccttggtcctgatattggggatgaagcatttagtcttcaaccatgaagtgtgatgttagatgaaatattttatttataaaaccaagaatgtttttctctattcctaattttctaagagtttcagttataagtagatattaaatttgtcaaaagcatttatctatcaaatgataagatcatgttagtttttcttctttagtctattgttacggtggataacattgatatttaatcattgaactgttgctagaataaatcccattttggggttgtatagtccttttaacaaatggctggattcaatttactattttttaaaatcatttttcatctcaatttataaaagatactatagtttttttgtacttttttagtttagcttggtatttaggtgatattgaccttataaaatattgtgggaactatttcatccttatttgtttttgacaaatattgtcagaattgatgctaatatttggtgaaacctccattaaagctgtcagagcatgaagccttcttttccagaaggtttaaaaattatatatttaatttgtgtaatagagtagtattcagattacttattttatattgactgacatttgacagtttccttctggtgaatccaaggtactgtctattatccttttatttaacctttagtatttcccgtagagaaggcttactagtgacattctctcagttttagtttatctgagaatgtcttaatttctccttcatttttttccaaagccatttttgctgactgtggaattcttggttagcagtctttttcctttagcactttgttgagcaggttggtgaaagagagagagagcacacgtgcgcacgctcgtgtgtgtgtgtgtgtgtgtgtgtgtgtgtgtgtgtgtgttggaatgctttcagtgctttggcagataatttacaggcctgccttaaccttcattctaaagttcgtctttcacagatattgaagatccatcagcgatgagacattaggaccatttgtgccttttctgggcatgcctacagccctgcacatgagtatgcccttatagatcttcagttagatattagagcttttcgaagcactgtatttacaatctcatcatccgtggtatttatttaaggattttcacctgcctcttgcttgcccgactagcgtcaccacctcaggcatccaggatgttaaacgactgtggttagtagttttggacaaacactctgtggatatggctttcttcactgaacaagctctgattcaggtcaaataaaaataaaccctatgaatgaggttttctgacagagtgaagaggccagacaatcctccaaagctcctaacccattctgcccccgctacttgttgctaggctgctggttttcatggttaccatagttataaagttcctcaattcaaggctgtcacagaaatgagaaatggggaatgagaattggccaacttaaaatatttaataccccatagcttccttgcattactgagatccagccattcttcctgcatgaactctgcttcaactgttccaagtgtctggttaattttcaaagttctgaataatttgattttaacttttgttgctactgttaccagtattcttactgcttttatgggggggattttcaaaggcttttatatgagtcagttttttgcttctctcttactgtattcctgtgtttttaagtggttgccataggatttacaatatacatattaaataaaccaagctccccttcaaataacaccataccatttaacatgtacttcaggtgccttttcccggtgtatcctcagcttctccctcttgttctttatgtactgatggctacacccagtgcattattactattatcactttcaacagttacattttagatcaattgtgaataagaaaaataaaagattttactttaccttaatttcttctttctccaatgctctttctttctttatgtaggtttaattttgcatttttgtaaattatttttcttctgcttgaagaacttcgtataatatttatttctgggcaggtctgctgccattttgttccctaacttttcatttttctgtgagtctgtatttctccttcacttttttcagtcatgcaagtttcctaattaaactttgtattttgagataactgtagagtcacatgcaaccgtaagaaataatacaggagcttccacattcccttccctcatttccccaatggtgacatcctgcaaaaggatagtacaataccaaaacatggacactgatagagtcaagacacagaacatttccaccatcctatgggatcactcatgctgcccttttttaagccacattcactccctcctgtccttgacccctggaaatcactaatttgttctctgtttctataattttggcatttcaaccatatataaatggtataataccagatgtaaccttttcgaattggcttactttcagtcagcagaattatctgatactcattcagattgttctttgactctgtcctaaataaataaagcgtgtttatattgtgtcatccattcgcagaacataaatcagtgaactaagctcatggattagaggtaggtggtaaaaatgggaagaggaaatcagatgttcttggcagctctcacacgcttgaacgtggaagaggcagcgtggtcttagacctttgtgctgagcattctaatgcaaagccaccctgcagggttttgtatttgcactggctttcatctctcctcctgtaacagttcagtaaaggactaggattttgtatcataaatcatttctttgaaggaaaaaaacaaatattatgacttcccttaaggaaataaaaaattaatgtgttatttttgcttcagtattttttactccaaattttaaccttgcatgtccagttacaaatgatatatttgstctcttaaaaaaattcacagtaaagtaacagttttctttgcttcctgtttattgcaaatcactgtggaaataaatataattaattgcaaagttatttttaatgtgttttgtctaaatttgttttatatttattttttcaagtcaaagcaaccaaaaaaatgaaaagatgcataatctctttagaacaaacagcaagtaagccaatagattataaatcatactttatccattttagcagtgtttaaaaaaagttttatagataatgtacagttacaggagatttttatttacaataattcatgattaaagtatattcaatgaagtaattacaacaagtctaccatatcattttattttaagactacacatctcaaatttgccattatttaaggcaaaaaatgtagaagtaaagcttgaccaaggttaataaggtcaattagagtaaaacaaacttcactagaattagagatattagagaggatttacaattatatgcagattgcatagtttagggggaaaacggtattttgaaaagaaaaagcaacgtgtgtgataacattagaaatgagctgtcacctgtgcttgatgtagcacacgaaaaatcattattttcaagttgtggttacagcttaaatcacatttgagtagataacttaatgcatactttcacatttaattgggcccttttttttaaaactgcattcagatcagtgtgtataagttgtggttgattttaagacggagaatgcagagggagctgagaatgtaagtcccagctgctgaagcttgctcccagaataaaattatttattcatccaaggctgtaattttgcagttatgtctaactcaagatgcacccttttcatctttcgaacaactatttctttggtttggaaagaaggaatgagataccaatttttctacattcctatttttctctcaaatattttcagttaattaatgttcatgtttagaaggactaatttgaataaagtgctctactaggcatctgttaggtctctgatttattctagaaaattaaatttgtatggataaaatgtgcaaggtggagttccttagagatgttaatgctcacagcctttcttttttaattgtgaaggaattgtagatttcagtgcttatgtggaattattgattcaaacactaggtaacctctactgaactgaagttttattctcaagctgcctaaagtttatggaataagtatgtgtaatatttttaaagcaaatgatgtaaacattttatttctacctcttctctccccttgggatcagttcatgttrtctttctggttcatgaatgtcccaaagccctcatggtttctctctttctggctcttcttgccgtcacctgcctctttcttccgtgctgttattgtgctctcaggtcacctctgtgggcagcctactctttattctagtgagccgtggctttcttaacagcctggaggggtttcattgggagacggatttcttccaagtctggaagaggcccagactctacctattgtgatgctttaagtgggaaggtcctgctgcttattttaaacaaataaaagctgcttattttaaacaaatgaaacaagcatttacagatggggaactcaaaggaaatccagggactagggagggcttggtactgatgaagcatccacttaatgcatttaataccttgaatttgttggcatgttctgcatagttttgcttaactggatggttgtgactaagttatctggcatcacagagaccacactctcatgagctgtcatgtcccatgtcagagactctgaacatctactgtccagagtggctccaacattctcctgctgaaacgtctttgctttatcgtcattttcctgccccgtgtttttcagaagcttgggtgaccctgccctcctagctctctaaagtaggtgtcaaagtcttcagaataacagcaattccctttcctttggcttctttccagattttttctttatctttgattttcgggagtgtgaaagtgatctgttcaggtgaaatttttattttcggcatttatcctgcttaaggtcctctgagcttcctggatctgtggtttcgtatctgacrttaatttgggtaaattatcaagtcaatattttaatttgattatcaaaatcagtattaaaaagtaaattaattttaaataagtattaaagatgttgtcttttcctttctctttctcctcatattcccattatgcatgtgtttccccttttatagttgtcccatagttcttgaatattctgttccattatttctgtttttttctctttgctttgcagttttaaagttgtctatttctatctcctcaagctcagagatgtttctcctgagctgtatccatctcctagtgaactcctgaaggcattcctcatggctctgacagtgctttgggtctggagcatttctttttggttctttcttagaatttccatctctttgcttatatcgcccatctgttcttgcgtgttgtctactttatccattagatctcttagcatattcatcattgtagttttacattcctaaataagaatgatatgatggactctggggaccgggggaaagggtgggagggggatgagtgtacactgctcaggtgatgaatgcrccaccatctcagaaatgcccactaaacaacttgtccatgtaaccaaacaccacctgttccccaaaacctactgacatttaaaaaaataaataaattcctggtcaagcaattctaatagcccttccatagctgagtctcattctgactcttgctctgtttcttctgtgaaaggaaaacttaagaccccaattcactctgccaaaagaaagattaagctggaagtggggccatgcaagaaagagcctttccttttgtcctaagcaaatagccacagataaaaggttaaagatcttcacaggtagctactctatggtcaccttactgagcatgagataaatacataattgagtatttccctacctgctcctttcctcttgcaacatatggattaccataccccccctctttctagcccacttttcccattcaaatgttgaagccctcaaaatcatcttcgaagaaaggcacaggcatgtgtctcaggaatatccttaacttgagcaaagtaaactcctacattggttgagacctgtctcagatactttttggcttacatgtcaaactgtgcctattagaatgtcttgtacttttttcttcatagtcagacaggatgtaccgggtaagagaaactgctttaaaatggcctctaatcatatggtggtaaggtgtgggtggggaaacttcatctagtcctgtgattgggtctcaggcttttaatgagcctgtgccacttgactgaatttccccgcttaggtgggatgcatggcctttggtgggctggagttgagtatttccctgccctcaggtcagtagggctctgataagaccccagcaggttaggctgtgtttgaacagtatctgctgagggcagcctttgctaagaagaaccgatgctgtggcatatttcaaaatggttccttttcttctccttctgccagagcatgaggggcctcctatctgatattcactgtaagaataaggtagagcttcggcaggtaaaactcrcaaaagtgagggggttttcgacggttgagtccccctggagtttctctctctcagaatctgccacactgagcctccagcaagtccatcaatgatggttcagttttccctgccctggcactggttcccacagaggttttagcctstgggtttctgccccggtaaattgcggttcttcctatgtgccgatcagcctgtccatttcagggatggtggttttgccctgtgacctcacttctcttaggaatccaagaagagttactgattttcagtttgctcagctttttacctgtttttcacaattctctttctaagaatgtatataaataataagaggtatgtatatccaaagctgctaatcacaaagaatcattggaaatgacttaaatgttcaatgaagggtggctgtttaataaaataaagtaatcaaccccttaatggaattctctagagcagtggttnnnnnnnnnnnnnnnnnnnnnnnnnnnnnnnnnnnnnnnnnnnnnnnnnnnnnnnnnnnnnnnnnnnnnnnnnnnnnnnnnnnnnnnnnnnnnnnnnnnnnnnnnnnnnnnnnnnnnnnnnnnnnnnnnnnnnnnnnnnnnnnnnnnnnnnnnnnnnnnnnnnnnnnnnnnnnnnnnnnnnnnnnnnnnnnnnnnnnnnnnnnnnnnnnnnnnnnnnnnnnnnnnnnnnnnnnnnnnnnnnnnnnnnnnnnnnnnnnnnnnnnnnnnnnnnnnnnnnnnnnnnnnnnnnnnnnnnnnnnnnnnnnnnnnnnnnnnnnnnnnnnnnnnnnnnnnnnnnnnnnnnnnnnnnnnnnnnnnnnnnnnnnnnnnnnnntttggctgggtgctgggtgcagttttctgctagcaggtcatgttttccatctctaaaagtcacttctgcttctccccacttccatccttccatcacccggggctcaggtgccctcaggtccacagctcatcggccttcacagtgtgtccgctttctctcctgtcaacctatttccccacaagctccctcaaatgctccttcactctggttactgccactgtctctgatggggtctctacctctgtcatttcagcaacaagatcatcttgggtcaagtgtatttttcgtttttccccttcttctcgtgcgaggactgggcaggggttccctttgtatcagatctgccaggtgcctgtcactgatrtgcggtagctggtggcttggtgcacacttcacaagctgtggcatgggctaaagccatctctccatctcctagtgactacctttggactagtcccttagcttccttgggcctaggctcttgcctatactcgagtcatcctatttcctgtggggcttttgcgaggatcagacaatatggtgagtgggaaaggtccatcacctgcagaggctcaggagatgtgcctgagatgctgtggattggcccgcactgaagatcagcatgagcaaaagcaactcctacaaagcactgaatgctcacaggagaaacagagggaaggcagcagccctgcctcagatgaatatgaaggaaggaggcctgatgaccggccaggggaccctgtgagcccagtgctggctccaacaagaagtactccaggccatagcagcagagctggaagatggtgttgctctgatgtagtgaggggaaaatgggaagggaaggagcaatcwcctgggaattaatttcacactaagagacaaaacacagcaaggctgtccaggaggagaggtgcgtggcctcaggaagcaggcctggccacccagactcttccttgacccctttgcacctgagctcctccattcataatgtgaggagggagttaccygaaagcagcaagggtacggcaatggtgccctccgcagagacaggcaccagccctgactctgaggatgtcactgattcagctgccactgtgcagccragccacccccggccacaggcacattccaatggcccccaccggtgaggcttttgcctgtgcagcagagtgagccccagagagtcccatatcccccgttagcttctagagaaagagtgcattaaggaattagttggtaaacatatgaataataatttttaaagccattgtttttacctaaaataaaatgttttctttttcaacctgggggaaggggaacctccgagcaattgtggcacaaatggaagcaatctttaaaccagattttattgcactatcaatttatgcctttttaaaaaaaataaaactatttaagtcaggacccagagtctgcaggcatgagtatcaagtctcaggaagtggttgccatgacaactcggggctttgcagaagctaggcaggctggcagctcaggctgggtggaccgcggcaggagatgcctctatcaacagtaatggtacacctgcagttccagttctgaatgcacaggtactgctcctctcctaatgtgaatatatctcattgtgttgcaattcacttttcaactgccacattggtacgataggtcttcatccttggaaagggagaagggctcatttaatcacagtctgatttgccttctgcctaaacacgaagggcccctgcacctcctgcaccttccagctctggccctacagtgcccactggccttctcgatggtcctgtccttgaccaattcccaactttccaggtacccacgccacagctttcatgaccacccggccctcaggctttttgatattttgacctttggttcttctaacttttttttcatgttctgtcccctgttccttttaagccatctcaattgtctagcatagycttttgtgttaaactgatgagcattaaggaataaatggttccacatggtctctggatgctgcccttcaatcctggctgcctagcctagaattatttgcactcacaagaggaaatacaagttgctgttaccaaaggatggagcctccgagtgtcataggaagcaaggtactaaacggagaattattgagactttcaataactcctccgtagccaaatcatgaacaccacatgggcagctttgtccacttaaacataaagatggccccattatgattttcactaaaggagaaaatacagctttgaggtaagagatggttagcaggtagtcagcaagattccagtcccatttcacactcaagtaacggaagggtggctcaaaaccatgttgaattttgatcactgatgtttagaattgcaacatatcaagttgctcttctgacaaatgggttgggaacttgctgacaaaaatgtayaggatagactggaagaacaaaacttctttgatgtctttaaaacactccaagagacatatatttcaaatgtttgattttttaaaaaaaatcataatctgttttccactaacttaaacactggggtgttaccattctgggtgtaatagccaaggctgtgaagaacaccaagggttgttttctttccttgaaaacaaaagaaaaacaatcaactacttcaatgcagcatttctgtagagggtagaccctgccgtgcaaatcctttttttagaatactccttctctcaacttctttctttttcctctgaatagactttcagttagatttctcaaacacaatgaaagacagatttttaaattattaaaataatataaatctcactaagaaaaatgcaggaaaaagaagaaaatatgctatcaaatgtagccaaataagtgaaataatccagacacagaaagacaaatactgtaygatctcatttataagtgaaatgtaaaacagttgaacttggggtatgaaagaaatggggagatgtttgttgaagagttcaacatttcagttatgcgagatgagtacgttctggacacccagtgactatggttagtaatgcctattccacaccgggaatttgctaagagagtagatcttaagagttctcaccgcacacacaaaaaatctagtaaccgtgtgagatgatggacatgttaattagtttgattgtggtgatcttttcacagtgtatacatatatcaaaacgtcaagttttacaccttaaaggtatgtaacttatttgtaattttacctccataaatctggaaacggttataagtgagtcaatggtaagaagttggtgattattaaagaggtgcaggcaggatactttgactaaatttatagtttctcacattatcattcacaaaactatgtggcaaagaaaaactaaaaagtttagttaaaaaataaaagtagtgccaaggaaatacacaaaagaagaaacagttctgtgtgataagtaaatgtgctcggggcttgtggatatttgacaccttcttacactcttcactcattcagaaaagttaaggagccttgttttgtgccactcgaatttaaaacaaacaaaaaagaaactcttaaattttgtggaaaagcatggaaaagtctatgttcaggtgcttcaccttctgagtccctcgtgwagggcacacactgcatctgaagactggtttccctggatactggctcctcgaccgatgacacatgctgctcaccactgctgagctgatagttaaggccaagaagaatgtctcaattccctggtgctcatcagaaagaaggcccacacattgaattagctttgaggacagaggagtaactcccaaagaggaaaaataatgagttactatttatatcaatggacagtcttcatctcattctgtttccatcattcgaaaacactgtggaagagaaaatttgcccaaagttttaacctatacaatattccccaaaagaagcatccatgtaagtgtgtcacatatccactgagtgttctaaggcatccatggagtgggctgcgtatccaacaatactgagtattctaaggcgtccatgggagtgggctataaatccaccaatactgagtgttctaagatatccattggagtgggctgcgtatccatcaatactgttttaaggcatccatgggagtgggctataaatccaccaatactgagtgttctcaggcatccatgggagttggctgtaaatccaccaatactgagtgttctgaggcatccatgcagtgggctgcatatccaacaatactgagtgttctaaggcatccatgggagtgggctataaatccaccaatactgagtgttctaagatatccatgggaagtgggctgcttatctaccaatactgagtgttctaagatatccatgggagtgggctgagtatccaccaatactgagtgttctaagatatccatgggagtgggctgcatatccaccaatactgagtgttctaagatatccatgggagtgggctgcatatccaccaatactgagtgttctaagatatccatgggagtgggctgcatatccaccaatactgggtgttctaagatatccatgggaatgggctgagtatccaccaatactgggtgttctaagatatccatgggagtgggctgcatatccaccaatactgagtgtcctaagatatccatgggagtgggctgcatatccaccaatactgggtgttctaagatatccaggggagtgggctgcatatccaccaatactgagtgttctaagatatccatgggaatgggctataaatccaccaatactgagtgttctaagatatccatgggaatgggctgcatatccaccaatactgagtgttctgaggcatccaggggagtgagctgcgtatccaccaatactgagtgttctaagatatccatgggaatgggctgcgtatccaccaatactgagtattctgaggcatccatgcgagtggactgcgtatccaccaatactgggtgttctaaggtatcgatgggagtgggctgcatatccaccaatactgagtgttctaaggcatccatgagagtgggctataaatccaccaatactgagtactctaagacatccatgggagtgggctttgtatccaccaatactgagtgttctgaggcatccatgggagtgggttatctctctgtcaacactgagttttctaaggacactaaacactcatcttttctagtgttactttcccccactgggtttctttgtcatactgtttgttttttgaggcttaaaatgttcaacattgatatcaataatgtgacaaaaatcagtgactttaaagagaagactgcaggggtttaatcttgtttgagggtctcaagaccacccccaggtgtgctgattcactaggagaactcacaaggcaaaagagcaggttatactcacgactaaggtttattgtagccaagggatacagagcaagagcaactgggaaagatgcattgaatgaagtccaaagtggccaagcactggcttctgagaccacccctatcctgggccacacaggagtgctttctctcttgcatgagttaaatgtctctgctcagggaagccagtgtgaacctgggggtccagggcttttataaagggctggccacagagacrcatcttactatatgaccagccagggtaactgaaattcagggctcccaacagtgaaacccagtgtacatcatcaagagttatgcttgtgcaaaggaatcctgacaagctggaatggcatggttcattgtcccaggtatacaaaaaaaaaaaaaagtcattatgataaaaaaaaaaaaaaaaaaaaaaacctctagagagccaaattcccaagccttgggcaagaatcagtcatgctttcaggcttccttaaagacacacaaatacagagaaatgagacctgctctgttaactctttccttaagcttgtgttatcaatgatgctttaaacatcagttcacagtgagttcctatatgtagggaaaggagcattatgcagtctattatcaaatctggactcaacattttattatgatctgtgagaatttgagcaatccatttacttctccattttcttgttttttggttttttttttttttgagacgaggttttagggtcttattctgtcgccaaagcttgagtacagtggcacaatcacgaaacactgcagccttgacctcctgagttcaaatgattctcccacttcagcctcctgagtagctgggactacagtcttgcaccaccacacctggctttttcttttccyttttttttttttttttttttttttttgtagagatgatgtctcattatattgccctgtctggtctcaaactcctggactcaagcaatcctcccacctggtcccccaaagtactgaaattacaagtgtgagctaccacacctagcttccattttcttatttgcaaaataggattgatgatagtagctagcatatgcagttaagtgccaagtgagttaattggcatgaatttttcagcataaagttgaaacataatacacagacaataaatgtcagtagtgctcaacttactatgctagtatattctcctgcaggaaagagttaactttgcccaaagaaaggagcaaacctttgcccccagctcctggaaggtaatctctaaactcttggaatgtcctgcttgatgagaacgtctttgcttacctggggtccctgggccacttcagctagtttatgctaacagtgtgatctatgatggggtcttgggtcacaccatatagcctatgcaaatagtgtgatttgtagctagggctgtcttagttcatttgtgctgctataacaaaatacccaagactgggtaatttataaataacagaattctttctcatagttaaggaggctaggaagtccaagatcaaggtgacagcaggttcagtgtctactgagggctgccctctccacttctagatggtgcctagctgctgtgtcctcacatggcagggtcggagggcagatgggagggagacagctcccttgtacctctttcataagggcattaatcccattcatgagagatctactctcatgacttaatcacctcctaaggtttcaccttttttttttttttttttgagacagagtctcactcttgtcacccaggctggagtgcaatggcatgatctcagctcactgcaacctctatctcccaggttcaagcgattctcctgcctcagcctcccgagtagttgagactacagacgcctgccaccacacctggctaatttttgtatttttagtagagatggggtttcaccatgttggccaggctggtctcgaactcctgacttcaggtagtctgcccgtcttggcctcccaaagtgctgggattacaggcgtgaaccaccgaacctggccaggtttcacctcttaataatatcacattggtgattacatttcagcgtatgaactacggggacacattcagagcatagcaggggcctagggccatgcgatatcaagcttgacctctggaggggctaagactcaaccagtcacatttgcacttgaccatgtctccaagacaaatctccagtggaatctctggacatcaaggcccaggtgagcttccctgattggcagtactccagctgtcttttcatacatcttgctgaaagaagtaagagctgtccgtacaactcccctgggagacannnnnnnnnnnnnnnnnnnnnnnnnnnnnnnnnnnnnnnnnnnnnnnnnnnnnnnnnnnnnnnnnnnnnnnnnnnnnnnnnnnnnnnnnnnnnnnnnnnnnnnnnnnnnnnnnnnnnnnnnnnnnnnnnnnnnnnnnnnnnnnnnnnnnnnnnnnnnnnnnnnnnnnnnnnnnnnnnnnnnnnnnnnnnnnnnnnnnnnnnnnnnnnnnnnnnnnnnnnnnnnnnnnnnnnnnnnnnnnnnnnnnnnnnnngcggatcacgaggtcaggagattgagaccatcctggctaacaaggtgaaaccgtgtctctactaaaaatacaaaaaaaaaaaaaaaaaaaataggcgtggtggtgggcgcctgtagtcccagctactcgggaggctgaggcaggagaatgatgtcaaccctggaggcagagcttgcagtgagctgagatcacaccactgcacaccagcctgggtgacagagcgagactccatctcaaaaaaaaagaagtgatgatggaaccctcaaactttgtatttcataaagcctaaaatctatttattcttgcatcagctacttaaaagttgttcctaagttggtgcaaataaggcttttgagagaatcttttcttattacttctccttggagaatgtaattgttgttgtgtaattggtatgaaggtttaggcctggaatggactatttttagtaaattagatataactcttttctaaatcttcttcttttattcaatgtttgaaactttgatttgttaaacacacaagaaagtggttcactttttgaaaagagcttgacttaacaagtgaagaagctggtagagtgtggtaagtaccctctcccatctggctacaatggcaatggagaatgttatagaacaatcactcgttagcacagtctgagtttgcaccaatttgaatactgaattcaaatactcagatatacctgaagattcctctcctagaataaaaatgtcagaatctctgcaaggaactaaggatatcagagctctggtccaagatgaagagtctatcaccaagtgcctcctccccacagaaagagaagagctgatgatgaaaatgggcggtgggaaaaaagagacaaaactcatctcctttgactctgcccacctgataaagcaggcctcgttttgttaagcctggtttataatgtgcttgtctgggtttgcccacacaaaagggcatgaaggaaaaaaagagttagttattttaacacttccaaagacgtaactttgcagaagcctggtgtccaagctgaggacatatgccaggcagtcccatgggaaatccagtgacaacctctaactcagccaaagccatgaggtaygaaacacacgtgccaaattataaaaatgacagaaagaaaagacaaagcctttcttggccaggcgtggtgtctcatgccagtaatcccagcacttcgggagtcaagaaggtagatggcctgaggctaggagttcaagaccagcctggacaacataataagacctcatatctaccaaaataaataaataaaaaataaaaaataaaatttagttgggcatagtggtacacacctgtagtcccagctactcaggaggctgaggcaggaggatcatttgagcccaaggctgtagtgaggtatgatgctgcccctcactccatcctgggtcacagagacagactctgtctccaaaagaaatttcaaaagaaagctgttctgaagtttctcaagggttcctctgctgcttctctggttgtggcttgcactgcatgatgctttcagtcccataaattttccaggccatctggaatcaggcctgttacattagcatttagtagcattcatgttttttgaagagctctgaatgacaaccaaacatctgatgtttgggctccattagaaaaggaaataaaattctattgtttcaatactctgtcttctgggaaatgatccaaatgtgcgagactaaatatgttcctttatataggatttatgatggtgttatgcaacaatatcattttataattgtgttttatagtaattgagttttaatcctttaatatttaatgtgcaataattttaaatgcctcgtcctaattcatccaaaagcactttctatatacacaatcttatctgatcttaaaaaatttgaggtatatattttccagtccattttgtagataaggaacctaaagcctaatgaagttggcaataaacagtgcagtgtggctgccaagagtttgctattagaaagtctgtgttcaggttccgccttgtgcatttggatcagctatttcacttttctaggccctttgtaaaatggggaattatcctaccttctgctgtgatgtagtttaaacacagtacaccatataaacagcttcatgtaggcctgacacagaagaagtatgtaattaatgcttctattattttccttgttatcattactaggcatgtggcaagcagctggccccagatctatatctaacaaatgtcatttacaagatttggattcaaagccctacctctatgttcagttctcatttaatcatttgttccaaattacaaattcttgcagaacaaattggaatcaagcacagggattaagtagttcatttttttctcttcagtatgttggaaattttattcttgtcatacatgcctgaatattttcataaatcaagatacatccctcccatcctctggagtggcttgttaatttcaacttctctgcaattttatgtattttacttatttatttatttttgagacatggactcgctttgtctcccaggctggagtgcagtggtgcaaacatcactaactccacccttgaactcctggactcaagcaatccttttcctcagcctcctaaagtgccgagattacaggcccatgccaccatgcctggctaatttttttttaatttttcttttgtagagatggagtcttgctatgttgcccaggctggtttcaaactcctggcgtcaagcagtcctcccgcattggcctccaaaagckctgggattacaggcatgagacactgctcctggactgtgcaattttaaagacttgagcaaataaccccttaaaatgtgagttttaggatggtgggtagggcttcaatttgaaaactgttaccagggaatgtgattataacatgcacagttcccactaagtgtgaaaatatagctgagaagcatgattaagagtactgtcatgtaattcacaccagagatatatcgccaagggttattttcatcctgaatgtattatttctctgtctgaaactatttgacagaacataagctgagccctagctcccacctgttttcacatgaatgtgaattaggtgggcaagagaaggagctaacctccagtgagaccacgcacaattttctgccaatttattgacactttttttattatttgaggaatttgtgtaattttcaaaaataacatatgtaagaagctgaacttttcttgttcatttttaggggggttgtccctcccagtttaacctgatattttctaatttgtccaccagacaaaaatgaagcagagacaaacttaatggggggaagtcttccttcaccacaggcctagttaattttgctagctgacagcaaggagggcatgtggtattaggtgtcttgagtgaaaaagcacacaaacaaacaagaatctggagctgagggaaaaaaaattaggtcaatttaaatttgtatcagtttrcaaatggatttcctataactaaatggtgacatgcttacattttgtctaaacctctcagagtttacaattcagggaggaaagtcaggtacgaatctgtgaagccaaattctttgccatgttcagaaaacatactgatgaatatattttaaaagatatagtttyatacatatagataaggttcaaatagatctttgcaatctagaatgacagatctcactgagtctcctaattgtttcatttacttagaaattgaaatctaggagtgagaattacttgaccacactaatagtttcaaaacacaactgttgtatgtgttgtatattgtaaagatttggagataaatcattcatattattatagtcttgagaaatggaaggaaaggagatgcccttgtttgacctttccgtgtcctacatgaagacaatatattcatgattgaccttgggtaggcttacatggcgatgagtccttcagagttagcagaagggcttggactgggctctaagtctcccataacctggtggtctggtgactcattttcaagtcacaactttaatgagatataattcacatgccataaatttcatcattttaaagtatgcagttcagtaatttttagcatgttcacagaattctgcaactgtcaccactgtctaactttagaatattttcatcaccctaaaaataagcccagtatacatattaacttcccattctctttccccagatcctggcaatcatgctcggtacttgaatttgcttcctttcagacactttgtctaaatggacgatgtgatatatggccttttgtgactgacctctttcacttagaataatgttttcatggtttgtctacctcatagcttatattagtaccgcattcctttgtattgctgagtaatattccatcgcatggatataccacaatgtgattagccatggatctattctgtggctgatggacatttggattgtttttacattttggtcctataaataatgttgctgtgaaaattcatgtgcaggttttgattatttatttagtgctgttgggcttatacctaacaggagaattctgtggtcctatggaaacaatatgtctacattttgagaaattaccagtggcttcaccattttgcaaggccatgagcagtgtaagggggtttcaatttctccacatcctcaccactttggtattgcctgtcatttctattttaggcattccaatgagtgtgcagtggtatttatttcaaggtgattgattttcatgtttctaatgactaatgatgttgagcatctctttagatgcttattggccattcatatatatcctttgaagagatgtctactcaaatcctctgcccatttttcaattgggttatcatttttattgttgagttgtaaaatatctttacacattctggatgcaactcccttatcatattgtatggtaaataaatagtttcttgtattctgtgtgttgactttccacttactaatggtatcctttgaatcacaaacacaggaattttaaattaaawwtaatttgaccttttttttcctcttgtttttgcttttggtgtattatctaaaattccattgtctagtgaagatcatgaagttttatttctaatttttcttctaagggttttatagttttaacactggcatctaggcatatgatccattttgaattaatttttgtatatgatgagaggaagagatataatttcatttgtttgcatgtgcatatcccattgtcccagcaacatttgtttaaatgactactgttttgcccaattagttgtcttggcacccttgtcaaaaatgaattgactaggctgggcacggtggctgacacctgtaatcccagtactttgggaggctgaggcaggtggatcgcctgaagccaggagttcatgaccagcctggccaacatgccgaaaccccgtctctactaaaaatacaaaaattagctgggtgtggtggcaggcgcctgtaatcccagctactcaggaggctgaggcaggaagatcatttgaacccaagaggcagaggttgcagtaagccgagatcgctgcactgtgctccagcctgggtgacagagcaagtccctgtctcwaaataaataaataaataaataaataaataaataaataaataaataaataaatcagtagtataagggtttatttctagactctcaattctgttttacttgtctatccatctatccttatgacagtagcacactatwtttattagtgaagctctttagtaagatttgaaattgggatgtttgagtcctccaatgttatttttctttttcaagattgttttggctaatctgggtcctttgaatttccatatgaactttggaataagatttccagtttctggaaagtgagtgccatctggaagttttaaaaattgcatcatttttgtaactcgcctttcagatttttcattgctattatatagaaatacaatttatttttgtattttgaccttgtgaactgcagctttactgaacttttttattctaatcgtttttttgtggattcattaggaatttctatatatgatatcatgctctctataaatagagattgttttacttcttcctttccatatgcatgtctcttatttcattctcatgcttaattgtcttgtattaaacctgttgttcggttttgaataaaagtgttgagagcaggcattttgtcttgttggaagggggaaggattccgttttgcaccattccatttgctgctagctgtgaggttttgtagacaccctttatcactgtgaggaaagtaccttctattccatatctcctgactgcttttttcatgaatgtgtgtttgttttgctgagcttgttgtgaatctcttgagatgatgatgttatttttatcctttattctattaagagtgtattatagcagctgattttcatatattaaaccaaccttgcattcacgctcttgtttaaaagtatttcctttttccccttgggatttcttctttgaccttttattctttaggagtgtagtatttaatttccacatttttgtgtatttcccaaatttattcctattattaacttctaatttcattccattgtggttggagaacatacatagcatggtctcaataattttacatttatcgaagcttattttatggcctagtctatggctcatcctgtaggatattccatgtgtgcttgagaatgacgtgtattgtgttattattgtttggtgatgatttctatatatgtctgttaggctaattaacatcttaaaacaatgtagttgggattaatattgacttaattttgacagtatagtatatacaagctttgtttcgatatggctagctgctttccttcatcctaccttcgtgctattaattatatagaaatcacttatctgtatattataagcccataaacacgtttatgtaattattactttatgtagttgcctttcaagttagacaggaaaagaaaagtgttacaaacagaatacatttacactgtcttttacatttgcccctcagagagcctttggtgctctttatttctctctgtggatttgaatttctgtctagcattctttcattagctgagatggctgagtggatccaagagtcacatgcctgatcacctcagagaggcctctgtgtgactgaatattctaccttttgatgtttagaaggtacaaaggatagtccagccacagtctcaggtttttccagaacacatttttctgactgaatttcctaaatttagcatctttagcaatctggatgtgctgaaaatttctcatatcatgaaatcctggttcctttttgcttagcagtttatctcctcaatgtatctctttcctatcacattttgctattggcatcaagaagaaaccaggttgctccttcaacaggttgcttctttcyaactgtgcttggaaatctcctcacctaaatatacaactcattgtttacaaattctgcattccacatgacagtctaacacagttctgctaagcttcctgccactgtacagcaagaagtcttttcccccagtttccaagaacatgttcttcatctctttctgcactgtcaccaccaatatttctaccaagaatgtgtttacgatgatttatgtatactccaagatgatgtagattttctctactgtgctcctcacttcctctgagtcctcattaccagagttgctagtgaccatattggtactcaaaatctttccaggccaatctaggctttttctaacgtggtcctcaaaatgcttctagtttttgcccatgcccaaaggcggaaccccactccaggtaccaaatatgtgttaatttcatattactcctgtaacaaactaccaaaaacttagtggcttaaaacaacacaaatttattattttcagtttgggtggccaggagtcgaaaatggctcttaccaggctaaaatcaacatgtcaggaaacctgtgtttcttcagtaggttctaggagatgcctttccttgccagcttttagaggctgtccacattcccctggacattctccttcagctgttgcctggccttggctaattttcagagttccgaaaaggttgattttgatattttttgccaatgttctctttgcctttatggagaagtggattttcagacgtctttactctgtcattctggaagagcttcccctctggtggctctttttaaatctaattaatcaaaatgatcccctaattcaacagatgccatgtagccctccatgagtttagggctagtattgtatgtgtgtcgatatggttcatatggcaaacaattgctctatcgctatggaaagaggctgctgaataaatcagtacaaggtatgtggaaatcctcacaggccacctgcctccaaagatgctgactctgaactttctggggaatcacagtcataaatcatttattagactctcaaactttctgaaaaaggtgaatttcaagtcgaccttgtgtcctgtttacaaacactaaaaagctaagattaataattttctagcaaatgtttacctccccccaaatgtttaggaaacacaattcttataggactttacacgagctcttttatttgtagcattttcctcattagttatccatgtcagcgctgctatggaaaggccgtgatctgacccaggaaatacatttttatagcaaatttcatgcagctgatttctggcttcactaaagctttttaataaacatggaaattgctggagtgacactatattcacacacgttataagtggcccagaataatgcacagcatattgatgcagatgttaacagcagattcatttagtgtgttttaagtttgtgtttgtggctatgaaaatggtgggacaatgaacatttatggataatcattttgtcaaataaaattctaaaaaataacttgtcctttgagaaccggcagaattcaagcacagagcaaaagaaacgtttaacttacacaaagaggtctgtactataccattgatcacctgggttccatctcttcagcctttttggcctttatagtatgtagtgaacagtgaatgatttgaaacatttcatattttacataaaataattcataataaataattatacattatatatataattatcaaatccagaatgcagaaataatctaattcatgttgactacctcttaaaatgaaaacaaatgatagcacataatataacttacccaaataaagtataagtctgtggaaataacaacagtcccttcatattccatcagagccggtgccactggccattgagggcagtgaacacctggccagagcagcagtatgaggcatagagtaggcagggagtggaaggagcagtgcctcccctctggtggctttggtttggagggtcttctttgacgtctaacaggagaaaaggtatcttcctgcatcctgccttaataattcccctttggcaagtagctggagtccgactgaaggttagccatgtgtccatctatgcatttacttcagtttccttcctgctctcatctttccacttctctccaatccaacaggccaagaagccctgataccccagctgttcacgcaacatgccaagctctctctgtgccaggcctttgtgctcactcccctctctttctggaccactcttcccttgaatatgcaggacctgtgccccacttttgtaggtctcttctggaagttttccttstcctaagggtcttccccatcaccctatataacagatcagtgtccttttatactattttatatagtcttttatattttatatataattatataaattatattatactattttatatactcttcccccttttatactattttatttttccctctagcagagttttgcaagtgtctacaaatggtaaaatagtaaatattgttatttacttttttaagcckttttgggccgtatggtctctcttgcaactactgaactctgccattgtagtgtatgtgtaaataaataaatgtgtgttgctctgttttaataaaactttatttacaaaaaatgagtggagaccagattttgcacacagccatggtgcactgaccctgcttctgggcttgcacattctgccactgaggattattgctgtttttaaattgtctgtctctgaccaccagaatataggtgctcaataaataggttgagtgtatgaggaatgaatagagggtgtactttaaatattaaaatatttatgctagtctctcgttatcttatctgggtcaagtaacttaagtttacggtattggaatcaccactgaggcctactaaagtgattattctaaacccggagagaggctagcatccagaatttataggcttcatgcctctaagctatgtccattagccattctttaaacatttattagaaattccataaacagtcctgtgacccctcccctgtatcaggtatgaggtggggaaagcaggatccaacttgcctctggctgctctattccctgggctctgggaatggcacagggtcagggagaggccagagtggtgttaccagtaccaggtgatgggactttgttcaactagcatagtgcggtagagatggaaagcagtgacaagattcaatatagatatggggattagtcctgatggcaattgctgatgagtgtcttcgtcaggtcaggctgctacagtagaataccaaagactggggggcttaaacaacaaatattcatttctcacaattctggaggctgggaagttcaagatcaaggcactagcagattagacgtctggtgagggcccacttcctggtttgctaatggctgtcttcagagaaaggaaacaagctctttctgtctcttcttataataagggcactaatcycacttgkggggggaaggggctgcatcctcatgactttgtcacctcccaaaggtaacacctccaaataccactgggaattcggatttgrgcacatgaattttggagggatgcaaacattcagtccatggcaaatgagagatgggtgttacagaggagatgaataaaaagtactgcacattcacttttggcttcaacaccggacatgtacagttaccatttactgagatggtagataggtttgtggggcaatgtcaaacatgttggacatagtaacatggtaacatgattactcttgttaaacatacaagtggagatgctgagttactcactggtagattaacctggagggctggaagagtctgaaggaaaaataatgtgacaattgtccacacatccttaggaattaaagccatgggactgaatgtggctcctagtgcagatcagagcaaccaagaccatggctgggcttcccagcatgaactggccaaaaagagcagtgcaagggatggcaagaaaagaacagagaacattcagagggttgggagaaaaaaaccaggggcaagccgggcttggtggcgtacacctgtggtcccagctacacagaaggctaaggtgggaggattgcttgagtccaggagttcaatgctgcagtgagctatgataatgccactgcactccagcctgggtgacaaagtgagactccttctccgaaaaatagagagagagagagagagagagagagagagagagagagagcgcccacattctcatgaggacatcagcagtgatatttgtttgtttccatgttctaatggcttagcttggataatgttggttatcaccaagcatcttttaaattcgtcacagacacacacatgctaacctgttaaaattgtagctgcttagagaaattgaaaaaaaaaatcaaaactcaaactttagaatgaacctgctctctgctcacatgattcaatttatttggcaaacaagtttatatgttttagagttgctgaacacagaacccctaaacatgtctctaattaacaaatggagtaaaattaaattttattttatgttggtatttttggtacaaacaaatttctttattatctggaaaatagattggttggaattccatttcacttagaacagaggaaaatggctttttcttccacagatctttttctactttcagattccctctactccttgtccctgctcacttccagtagaagcattttttttccagtcattcttttgttctgcatatacgtatagagcacccattatgtcctggcccacaacaaaaactagacatgcattggagaaaactggacatggtcactgctactcagcgaagctgccagtctggagaagatgcagaagtaaacacaggatctgggcctacgtaggtgttttcatccattcgtgttgctgtaagagaatacctaaggctgggtgatttattttttaagaaggtttatttggctcatggttatgcaggctgtacaggaagcatggcaccagcatctgcctctgctgagggcctcagggagcttccacttatagcagaaggtaagaggggtccatgtgtgcagagatcccatggtgagaaaagaagcaagagagaggaggaggttccaggctctttaaacaaccagctctctccaaaacaagtatagccagaactcgctcatcactgacaggagggcactgagacattcatgagggatccatcccacaacccaaacgccttccagcaggccccaacattggggatcagatttcaacatgagatttggaggggacaaatatccaaaagatatcagaagctccagggatccaagatgggctgctgaaggagacagtcttcctgcatgaacaggatttctgtacgctaagtcagaagccagccaggttccactctcctgaaaatagcgtgggattatttaactggcactggaattttttacttctaataaatttatcattcaccagagacctgtttagaattttcttaatagcttagctaaatttaaagctgcttgctaacaattttatgtgcattttacatttttatgaagaatttcataaaaagtaaataatacttaaaagtcaaagtaaaataaataccttgaagtcctgtgctaactttctaatggtaatacataggctggcattgcctacgaagtcggagtgaacttgggaaaactacgaaatgcttccagctctggaacagtcaccccacatctctgcttgaggcaggggagggctgccgtctgctcagagcccacatttgtgcaaacacgtctctctgcatgccagcatcaccttcagaacaggagactgcagggagcccgcctcctgctcctccgggtgtccttctgccttggagatctcttttaccgcctgatgcacacttccagaagatgaatcaccaagagaatgccaagagctacgtttttcttcaaaacagccactgttgaatctcaaaaatcatcatgagtacattatgattttctataacaagtggaccgtgacacccagccagggtgcttggcccagggcaccatggagctttctcagcctcacctggaggagccaggtgtctgttgtctccctggtggctctgactctgctctgctccgggaagcacttcccagcccagtgctggaatttcagactaagtgctgggagcatgttcagagtgcacacagcattcggtggagaaagcctggggagagctgaatacctggggaaagaggccaacaggaaaagccaccttgtttttgctgttaactttctcctcctcctctctacttctaatgcaagggcctcctccaaggtcagaaccagcagcctccatttcctgtggttgatcttgatgctaacaggaactcctccaaacgggagatgaatcatggtaatcacaatactcccccaagtcaggtccctggggtgcgactttcttctcaacagcatgagaggaaaactgcattttctggttaaaaagtagagttggacaaaggagagatgggtggatggtggaagcgaaaagtcttattgaaaacacttgattatatgattacattgggctaaagcatgtaactctcatttccagtagataatacactgtttgaaatgagaaaccaaaacacaagtcatcttactgcagattgatgttgatcatctgtccccctacagacaaacactacctcagaatcattccctacaccattyctcaggtgtttatgaactgacatcaaaaatagtgattcccacgggggtccatgtatgtattgtggtccatgatcctcccagggctggctggacagtggtagtctcttgccctaggcctttgcagtctctggaccctctgctagctgtgctgtttccacgtggtcttgctcaagacagtgtacacagcacacaacacagttctagccatcatagctgcaggcacgttctatttttttctctctgagattgcaactggaatttgggatctcccaactctatttccagacagatcactgggttattagtccaggtgataaatctcgtcatttaggggtagacggcaccagtataacccgcagggcataacatgtgtgatctggcaccagagaccttattgcgttcccatgcctctgcatccctcactgcatgtgttagacctctgtcatgtatgaattatgcctgtctgtggcctatgtgcacatccmtgaatggtgcactttgtgactgaagtgtctccctctgcccgtcccacttctctccagattcccacccatcctgggcatctgcacacacagtgcttcgaggtgctgatctttacaggcaccggccctgccaccctttcccccatccccaacactctcaaaaattcctctgggctttccctgacagggcaatgcaccgtcttaactcatagaataaccatgaaagatctttccgcgttgtacatgggaacaaaccagctgcggaggatattcctgagccattgtgatccttcatgctaaaaagctctacctgcctagacaacatttttgtgacccctgcgattcatgtgtatatatttgaggtcttcatcagtgaaccttttttctccaccaagctaggcatattggtgaaccatttgcgccttctggctcccaaattccttttcagtagtactcatcattagctttctcatgggcattggaatgtacctgatgccatccggaatatcaaagtccatctgttggtggcacttctcttggctaaacattcataggcctgtgtgaatctttgttcctataacagctaatattgaggcagggcctttcctgggccaggcacgatcaaccatactaaatattcattatcacctaatccttgtatcacaccgatgaggtctgcatttgtaatattccttctctattttacagttacagtagctgagatgagagattcattattttgtccaaggcaaggatggaattagagttactccttaaaggcaatatcaatggaacatagttaagactagatcataattattcgattaattattccattactgaaagctgtcctacaatggaagttaagtgatgatgtaaatagtatacccatggggtaaaccatagattttagcacagagggcatgagattagagataatcctgccttggtgtaaaggacctcaactttaaagttgctactcatcacagcgagggatctccacagtctgtttcagttcaaaatatgccatcccatccccacctctatctcagaagcccaagtgagaaaaaaagatcaaggggttgttgtttgtttttaaaattattatacaaaggtacagcaaaaaatagggcagatacttctaatttgtcttgagcatttatttcaagcatccactttgcatgacttctgaaatattgctgcaattttctttttcaaaggaatggaatactgtagaacatttgtgcactgtcagtttcctgtacctgctgtaggcttaaatctctagcagggaatatattgtgtcatcctaaatttatcatgttaaattattgatccttgtaaaccacgtggcaggtattttattgcttggctctagatttagccagcaaagcacagaacagcttttgagatggttttgtttcttcatgtttgacatgaagagcagccctggaaagatacctgtgtccctgaatctcccactgcagagcaatcaggtattcccaacgcctagtcccaagaggagcatgatgatcaatcatgtctcttctcctctcctggcatcacagagcaattcctgcagacccatcttcattcgctctgatgagaaccaaaacctgatctggaaaatcttggggtcttccaatctaccctgagagcttgttcaaatcagggggattgggggaggcaggacaggccagccagggccaccactgagacccttcccctgtgctttcttctctgcgccttgacctcctggggagaagcaggcatgcccacacagtctacggagttgttcccatgacactcacagatttaatgttatgttttttttaaagcttgtgatcaggcttggcaaccactggattaaacacatttcaacaaggtttgctacttcaggattactcgcaccagctgtgaatgttggagagcataatgtgcagatttcccaaattatgttgccacagacccctttataaaaaagcagtggtggggcttacactaggggacaccttgaacccaaggctaagacctactgaagcatggccaggttcagagaagcccagtctccagtgttcctccctgccatggacctgccaggagctgagggtttgggagatctgagttcctggggctgctgggagcttgggagcaagtccacacccagccttggcagagggcacaggtgatgcaccaagccgggctcttggtctcagctcctactccccagccaggccccatagccaggattcagctaaatcagctccccttcatctgaagtggcttatacacaccactttcccctgagagctccacaagagggatgcactccatacccacagcctcaggaagatgggcaatgcctgggcagttctgaggagaagctggctgagagacggaccaaaggagtgacagaatacactcctgtgcacatgtccgccttatagcacacacagatgtgtgctccacagctctgctgctccgggcggcacaagccctggggagaggaacccaccaaaggtgcccagcatacacgcatcctagtccaggcttctcatcaagccacctgaacaaaaccaggcaccctggcagctagagcccacatgtagtccccttatgcaaagcgcactttggaaaccagtcaagtgatctcttccacatattctgccgtgtcttctagttttcttcctcctacaaggaacttcaaagttattttttcgactttttctacaatctgacccctttatacagagaagttgaaatggtgagggtgtcaattctaataacatttttatatttcagaggaatagagaaaaatagtccatacatacaatcattttcttccaaggggtagaacttcaagaggtcagtgcatcagctcagcaaggcagatcagctgcccaatgccagagccttccaatgaggttgctctgtgtgccatcagagcggggacagggccctttatggcaccagagcttggccctccccaaataaagtcggttatgggctgcaatgcggtcagtcccccaaatccctgtgttgaagccctaacccccagtacttcagaatgtgactatatttggaggtagagtctttaaagaggaaattaagttaaaatgaggtgatgagcgtgggccctaatccaataaaactggtgtccttttaagagattaggacaccgatatacccaaagggaagaccctgtgaggacctaggaggaagacgaccatcttcaagccaaggggagaggcctcagaaggagtcagcattaaattaataggccaatttgcaaagaattgagaattcaaaagcaatgagtctttccatgtgctacattggtatatctctttatttagttaggtcttctttaatttttctaaacagtgttcagtatacaggtcttgcaccacacattctgttaaaattatccataaaattttcatgcttattacaagtggtattgcactttaaaattcattttgaatcatatattgctaatattctgtttactgaccttgtacctgtgacattgctaagctgtcacataaatttaagtaaccttttatagataaattaaatatgttctacatacaggattatgttttgcttcttcttttccaaaacacctgcattttatttcttctccttgtctgattgaactttctagaatgtccagcataacactgaatgagagtggcaagagaagatatccttctcttattcatgatcttagagggaatgttgggagcctttcatcattaagtgtgatattagttggagggttttgtcaggtaccctttatcaagttgaagaaatttcttctatttcaaatttgcctggaggttttataatgaaccggtgtcaaattttgggaaatgcttttacctcatctattgagatgatcatactgttttctcttttactctgttaataaggtaaaacatatctattaatcaacaaatgttatagtaatttcctggggtaatcatttattgctatcatttattgctagattcggatagttaatattttgttgaagtgttcatgtcaatttcctttcttgaaatatcattatctggttctagtgtcatggcaatgctatcctcacaaaatttgttggaaacagttgacttttcatgttaaccttctgagtgaaagaatttactgttatttttctgaattcttaggaagtgggatcaacttcatcaatcatgtttttcaaatcttcttactatgtagtgatttttttgtctatttattcaaaaagtatataaagatcttccaaaatgattgaggatttctctatttctacatgtgattttgtccattgaggtttatgcaaatttagaattatcattaactcccccaaattaaaatatttaaccactattaaatattatttattttctcttaaagtccatatattgtaatgctaatatgggtacacatgctttattttggttaatgatgtcatgatatattttttaccttcactggacttcgaagtttctgtatctttatgttttaaatatgtttcttgaaaatagtatattgttgattttcaggatttctcaaagttcaatctgataatctttgtcttttaattatagctattagtcctttttaatatatctaatatgtttggacttaaatctgccagcttactatcaaatttttaatttgctccactttgctgtttctcctcctttattctcttcctactttcttttgaatagattatatttcgtcagtttactttcactctctattgggagttatacagtatcttttatactttagaagtttgctcattcatcaattgatgcacatttccaaagccagctttaatcctatatgaataatattgttaagaacattcatgttcaagatttttttttttgggacagagtcacccaggctgcagtgcaattgtgcaatcttggctcactgcaacctccacctcccaggttcaagcaattctcctgcctcagcctcccaagtagctgtgattacaggcgcctgccaccatgcctggctaattttttgtatttttagtagagatgaggttttgccatgttggccaggctggtctcgaactcctgacctgaggtgatccacccgcctcggcttcccaaagtgctgggattacaggtgtgagccaccatgcccagtcatgttcaagattttatgtagacatgtttttattttaccttggctagaagtgaaactgctgggtcatacagtatctccttgcttaatctcttgaggaactgccagactgtcttccaaagtagctatatgattttacatacccaccagcaatttatccacctcctcatgagcagttttcatttttgatttttattagagccatcctggtaagtgtgaagtggcatcactttgtggttttgatttaaattccctacatagtcattgatgttgagcatctttttatgtgtttattggccacctgtacatcttctttggaaaaattatctattcccatctgctgaccattttaaaattgtactatttgtcttttattactaagttgtagtggtttaaaatatgtcctatatagaagtcccttatcagattatgtggtttgcaaacatttgctcccattctgagcatcattttttctctttcttaatgataatttttgaggtgcaaaatttaaaatttaataaagtgtatttttatatttatatctttggtgtcatatctaagagggtttttttaacctgagacttattgctgtgttttcttctgaaagttttgcagtaccagttatgtcccattttgaattcatatttgcatatggtgagatgaagtagtccaatttcattctttttagcatgtggatatccaattgtgccagcaccatttgttgaaaagacttttttttttcctattgaatagtcttgggaccctttgtaggaactaattggctgtaaataagaggatttatttgtgaactctcaattctattttgttgatctatatttctatcctgatttcagtaccacttttttaataactctaactttgccactaggtttggaaataagagaattgtgaattcttcaacttcattcttctttttctttgttttagctattctgggtctcttgcattttcatatgaattttagaataatcttgtccatgtctacacaagagtcagctaagcttttcatataaattgcatcgtatctatagactactttgagtagtattatcatcttaacaatattaaatcttctgatcaatgaacatagtataccttttcatttatttaggtctttaatttctttaaaatattttgtaggacattcgtgtgcttctgatttgattgaagattgaattaatgtcctaacaccagaccgacccctgaaatatcttaggaaacacaagtgcaatagcattccaaatgaaagcaattttcttatcttgctgttttcagccaccgtccatatatcagcatgaaggaaaatattcatttaaatgagacaagactgttacattatctatatgttttcataaaaatttctagcagaaaaaaaaattttgtagttttcagagtataaaatttttacttattttgtttaattaatcttatgtattttattctttttgaggctattgtaactggaattgttttcttaattttatttttggaatggtattgttgtttatataaatacaatttgggaattcttgttgatctcattggacaggtgtgctcaagtattactaggatggatgactcttttagagacagaaagactttctgaatccaggggagtcagtggccctccattgaggctcagttttaaaaagcacagaggaagctagaaatatggcattctgtgagaatacacatacacccccaacacacattcacacacatatactcatgcccgcaccgactcacacactttgtgccttacttctccacacagagttagctttcccaccctctctgatgctcctcccatgcaccaggggcagtactatgcattgaggggctagggatgaaccccacacaaagcctacatgggaagacacatctgcaaaatattaacatctggtagacaagggcagcaatcccaatgttcataaaatgttccagcagcacagaggacggaacaactaattctatgtggaggagtaaggcaaggcttgggaagaaggttcccattccaaccagagacataattataggcaaaatcagagtcaaaagagacaggcatgtcccagaagcatcagactaacctgcagcaccccagggaaaggagtcgagcatggctgagactgggcatgtaggcagacatactcacaggcctggtggcctcgcttagcaaggggacatttatgctatgggaaatggggagtcactgaggattttagtcagaaaaattgtataattagggtttcttaaggtgaataaacctgaagtgtccaagtgggggagatgccataattatagtgagaaattagaagactgctattgtccagaatagagttagggaggatctgaactaggccagagatgacagggctgagagatggggacagatttgacacagacctacacatgctgatgatgagataaaaggactggataaagaaaacatggcacatatacactgtggaatactatgcagccataaaaaaggatgagttcatttcctttgcagagacatggatgacactggaaaccatcattctcagcagactaatacaagaatagaaaaccaaacactgcatgttctcactcataagtgggagttgaacaatgagaacacatggacacagggaggggaacatcacacaccagggcctgtcaggggtaagggggctgggggagagatagcattaggaaaaatacctaatgtagatgacaggttgatgggtgcagcaaaccaccatggcacgtgtatacctatgtagcaaacctgtatgttctgcacatgtatcccagaacttaaagtataataagataaaatacacaaataaatatttataaaaacaaagctaggtctctggtaacagagaaagatagaggaacttacatttgttattaaggtgccatgtattaagtaaaacaccaaacacgtttttttttaaaaaaaggacaaatgggtgacaactgatattttttacctgcatatctgagaaaactgtaatatatttacccaaggggtagtgaaggaaagacgattttgttataaagagaacaaacttggttttagacacactgaaataattgtccatcccctttcccaatggacgtggagggcacaaatgggatctggaattcacgtgactggggctggatctggaaggcactatttcccaggaagtagaagacatggcatggaagaatacaaggaggaatcacgtgtaaatgcaacccatttcatgtgaataccactcatgacgtaattattcacatgattatgcctgaaaaaatagaatatgagcacacttacgtggcactgggatgtgatgatactatattctgttttaaagaaacttgattcaaatcagtttggcaagttttgatggatacacactatgtaatccctgccagggaaagtattacaaagaaaaggtagggatttctgttatgccctatgtcatagattccacaaggaagatattcagaaaatgtatgtttgttgattgaaacgattgcctcaaagaacttacaaaactacacaaaaagcagaaaatacataactacagaaagtatttcacataggagtgccatgcctgtacatgtgtgcatgtgtgcatgcacacacacaaaataagttacgaagttatttaaaaaaaaaacagataaaaattatttaaaagtagccaccttattgtatggtctaggtcagggatttcccaaattgtctttcacagttctttcaggcagactcaggaaacagctggataataaatttagtaagtttctttactatcagtcttttaagagcctccagtgtaatagtgtattggaatctccaagaggggagtagagtgggtgccctgtccaaaatgtgtttgtgacagatacatggtctgacttcctttcttttcgtgctaatccctcatccttgccctgcttttcttctgaaataggtgcctccctgcaccaataagtgaaggaaaggagtgttctgggagctgtagcctttccaacagaactctgcctgtgcatactcgcactggaatgttacagctccccacacttcctcatgctccagccaagccacctcctcccgcatccaggcacctctctagcatcactcctgacctctctcaggaaggctggtgaagcccggagaattcaatcagcaagagcccagctctgcagaaggtttccttatcctctgaccctattttggacaagccattctataaggttgtaataatgaaatctaatttttataaaaatctccattttgaagttaagatgataaatgccatgaaaataggaagatgtaaaaaatgtttacattttgtgatggtagttaagccagaaaagagtttcattattttgagattcctccatgttgtccaaggtgagtcagacaatctggttaaaatagtgaaaaacaaaaagaaatatttaattgctatgttggctctaactccagaagaatgagtctgtttatgtgagtagtaaaagaaaagttatccacatgtactagggtgttggcatggttaatgacaatgaaggctgactctaaaaatattaaaacacctacacgctgagtcgtacggcagtcaattcaatttgtgtaaagttcatcaattcaatttgtgtgaagttcaattagaaataatcttgtgttctcaaatgcttgctgcactctctcagtagaaaatgaaatgcacttcttaaggtatatgaaagtgctggtaagtttatgtactttttctataggtgtacatatgtcactcttttaaaatattcacaatatatgaaacatgattttgtaaactcaccctgctatctgtcattttgcactgcagaaagcctggataaatgttcagtttataaatggagattccagagaaactgcccgctccacaagagcagagctgttttctggcagacacacacttgtgggggtggagtttcataggcctgacaccctccccacacaagaaaaacctgtcttttgcaacttcctctcctgccgtcatttttttcgtgtttaatctaccgcatatgttgcttcaaaatatgaaaatacaaagaaaaactgacaggccaacatccccgatgaacacagatgcaaaaatcctcaacaaaagactagccaaatgaatttcacagcaccttaaagagatcgtacaccatgagcaagtgggacttatcccagggctccaaggatggttcagtacatgcaaatcaatccacatgatacatcacattaacagaacaaaggacaaaaaccttatgatcatctcaacagatgcagaaaaagcatttgccaaaaattcaacatattttcatgaaaaaactcaacaaattaggtgtagaaaaaatgtacctcaaaataataaagaccatatatgactagcccacatttattacactcaatggtgaaaggctgaaggcttttcctgtaagatcaggaacaagacaaggatgtccactcttgccacttcagttcaacataggaagtcctagccagagcaataaggcaataaaaatgtcgggggtgggggggtggcatccaaatcttctgaaaaaaagaactaaaaatgtctcaggttgcaaatgacatgatcttatatgtagaaaaccctagtcccccaaattgttaaaactaataaacaaattcagtacagttgtgaggcagaaaatcaacatgcaaaaatcagttgcctttctatacattaacaatggactatctgaaaaggatattaagaaaacaatctcatttaaaatagcatcaaaaatattaggaataaatgtagccaaactgaaaactataaaatattcatgaaagaaattaaagaagacacaaataaatgaaaaaataccccatgttcatggattggaagcattaatattgtcaaaacgttcatactacccaaagtgatcacccaaagtgattcagtgtaatcccaatcaaaatttcaatgatatatttctcagaaatagaaaaataaaatcctaaaacttatatggaaccacaaaagatcccaaatatccagaacaattctcataaagaacaacaaagttggaggcatcatacttcttgatttcaagttatatcataaagttacagtttaaaaaatagcatactactgacacaaaaacagaaacacaaaccaatggaacagaatagagaactcagaaataaatttatgcatttctggtcaattaatttttaaaaaaagatgacaagaacatgaaatggggaaaggacagtctcttcaataaacgatgttgggaaaactgtatagacatatgcaaaagaatgaaattggacccttatctcacaccatatacaaaaattaactcaaaatggattaaaatcttaaaggtaagaactgaaactataaatttctggaagaaaacatatggggaaaactcaatgacattaatctgtgtgataatgttttaaatatgaacccaaaagcacaggcaacaaaagcaactataaacaactgggattatatcaaactaaaaacctgcacagcaaaggaaacaatcaacaaagtcaaagaaaatctatggattgggggaaaatatctgcaaactacacacctgataagaagttgatatccaaaatatgaaaggaactcaacaacaaaagcaattaaaaatgggccaagggacacatggctgcaacttgactgatggagaaaatataagcatatctggtggagagagatggagagagaaagggacaatacaaatgtagtaaaatgttgtcataatatttggtgatctgctggttatctgagagatctttgtactattcttataacttttcttaagcctaaaataatgtcaaattggaagaaaatttttaagttgaacaaaagtgcgcaggacctaaacatttctcaaaagcagacatccaaatgaacaacaggcatatgaaaaacagtcaacatcactaattgtcggggaaatgcaaatctaaacctcagtgagatatcacctcacgcctgttagaatggctgttacccaaaaggcaaaagataacaagtgttggtgagcatgtgaagaaaagggaaccattgcacactgttggtggaattgtaaattgatacagccatgatggaaaacagtatggtggttcctcaaaatactaaaaatagaactgtcatatgatccagcaatcccaatatagagttgacccttaaacaacatggggattgtgggggccaatacccccacagtggaaaatacatgtatagcttttgacttcccagaaacttaactcctaacagcctactgttgactgagagccctacctataacaaaaacagtcaattaacacacatttcatttgttatatgcattatatactggattcttaccacaaaataagctagagaaaagaaaatgttgttaagaaaaccagaaagtggaagtaagtggatcatcatagaggtcttcatcctcattgtcttcccattgagtaggctgagggggaggaagaagaggaagggttggtctggctgtctcagggatgacagagacagactaaaatccatgtgtaagtgcacttgtgcagttcaaacccatgttgtgcaagagtccactttatatccaaaggcagtgcaatcagtatgccgaagaggtagctgcaattcccatgttaattgcagcagcattattcacaataaccaaggtcaccctaagtgttcatacacatatgaatggatgaagaaatgtctatgcacacacagacacaggaatactattcagtcttaaaaaggaaggaaatcctgtcatttgcaacaacatgggatgaacctgaaggacattatgctaagtaaaataagccacagaaagacaaatattgcatgacctcatttatatgtggaatctaaaagagtccaactcctagaagcagagattagaatagtggttgccaagggctgagggcagggaatgtgagaaaatgttggtcaaactgtacaaaacttcagttatgcggggttagttctgagatgtaatgtacagcaccatgactatagtgagcaataatgtacacctggaatttctaagagagtagatattaagcattctcctcacacacacatactcacatacgaaggtaactaygggaagtgatggatatgttaattagcttaattatgggaatgattttgcaatgtatatcaaaatctcaagttatacaccttaaatatatacaatatttatttgtcaattatataaagctagaagaatatgaaaatacatgttattcatatactcaggaatagaatagttgcatgtgtcttgaagttaaagcatattcatttaattatctcagtaacctttgaaatctcacagtatccttcaaaggattttaaatgcaaaacaacacagactttattcttttcttgtttgtttgtttgtttgtttagacagagtttcactctgtcacctaggctggagtgcaatggcgcaatcttggctcactgcaacctccacctcccagattcaagcaattctcctgcttcagcctcctgagtagctgggattacaggcacctgccaacatggctggctaatttttgtatttttagtactggcagggtttcaccatgctgcccaggctggtcttccactcctgacctcaggtgatctgcccaccacggcctcccaaattgctggtatcacaggcatgagccaccacacccagccaacttcttaagcccttctctccattcccttgtccagcattcccattgtccctttaactgtttctcagctrtgcctgtgtgcttccctccgtggtcctgtcttaaggctagagagctccacagtccactccatgtccacaccgggaggtagttccacagaggcagctgccacactgagcaggctcacccagaagttagaggaaaaagtcttgcacaaggtcaatttggggttgtaccttgtttatgtgactccagtatgtgcctgtctttaagatatgccttttggtatgcctttaatattttctcaagaattatacaccatttccttgaacacttcagaaaaatgaagcgtgtggtccaacatggacatgaatggattctgtagtctgtccctctgcctgcacagaaatgggagaaaagccacaaagcatcataagcccacgccttatctaagcatttacaaggctgtcctgggagatttgatagtagaggtctacatgcaggaaagttgagtaatggatttttaataacgttgcttctaaactgaaaaacatggtagaaaggtcattgaccaccctggtgacacgggtgtgactatctctccagcagagtgaatgatatggtcccagagtccaaggcgcctcatgactcagtaatgcatcaccatcctgacgcccagtgctgctgatgtaatgccatttctttcatgctgggaggattcagaaaggtgaaacccacacatcacattttgttttttagctatctggaacagtaaggccacagaaacaaagcagctactgtattatgatgggtattccattcatgcatttcagtccttagcaagtaagtcatccctgtccacatttggaaaagcgctcatttctgcctcttgcaaagaaacttcagtgtcaacacatacgtacgttgacaaagtagaaaactgcaagcagtaacccccgcaggaagcaataatgagttcattcagttctgtaccaaatcttgtatgaaccacaatgcctggcatgttacacggtcattattcatctctttttctctcccttcaggcagttagctctacgtgcattcgtttgacttcaataaacataggcatcattcgcatttactgtggcatcttaaggtagctcagtaaacattttccattatcattttaataatgttcttcctgaggcctgaaactgtctaaagagaatattcttttcattgaagtcattttcccttaacagaatcttgactttgtgaggtcttagaaggtgatacactgctgacactcctggctatcacggtcctgtgggctagcagcatgaggggctggtaaacagcccccaagactaggtcagctctggctgctgcaaaaccttacaccttccgccctttaatctactagtgtgtatgtgtgctgtgcatctgcgcatttgtgtatatgtgcatggtgtgtgtatgccgtgggtggttcgtgagtttgtgtggggtgtatgtggtgtgtatgtgtgctatgtgtgtgtgcatttgtgtatatgtgcatggtatgtatgccatgtgtgattcgtgagtttgcatggtatgtgtgtgatatgtgtgctgtgtgtgtgtgcatttgtgtatatgtgcatggtgtgtgtatgctatgtgtggtttgtgagtttgtgtgtggtgtgtgtgtggtgtgtatgtgtgctatgtgtgtgtgcatttgtatatatgtgcatggtatatgtatccccgtgggtggtttgtgtgtgtgatgtgtgtgtgtatgtgtcgctgtgtgtgtgcatttgtgtatatgtgcatggtgtgtgcatgctatgtgtggtttgtgagtattgtgtgtggtgtgtgtgtgnnnnnnnnnnnnnnnnnnnnnnnnnnnnnnnnnnnnnnnnnnnnnnnnnnnnnnnnnnnnnnnnnnnnnnnnnnnnnnnnnnnnnnnnnnnnnnnnnnnnnnnnnnnnnnnnnnnnnnnnnnnnnnnnnnnnnnnnnnnnnnnnnnnnnnnnnnnnnnnnnnnnnnnnnnnnnnnnnnnnnnnnnnnnnnnnnnnnnnnnnnnnnnnnnnnnnnnnnnnnnnnnnnnnnnnnnnnnnnnnnnnnnnnnnnnnnnnnnnnnnnnnnnnnnnnnnnnnnnnnnnnnnnnnnnnnnnnnnnnnnnnnnnnnnnnnnnnnnnnnnnnnnnnnnnnnnnnnnnnnnnnnnnnnnnnnnnnnnnnnnnnnnnnnnnnnnnnnnnnnnnnnnnnnnnnnnnnnnnnnnnnnnnnnnnnnnnnnnnnnnnnnnnnnnnnnnnnncactgtcccactttgcccgtgtccagactctaggataagcctggtcactggacatgaatttgagaagcctgtggttgagagtccacagccatcttaccccagtgtgttctgacatcctggggcccacccttagctttctatgattgagacctgccctgaactgggtgactatggtcccgcactgcttctggtcctgcaggtgattctgttttctgactcactatgaccaggtgccagtaactgctgttgggcctcccagtggtcacctccctgcctgcttgggcctgggctgtcacatctactgccctggacaggtagaaacccaggcctcaagtcttaccccttcccatgacagctgccatcctctgtagatctcaagaactgtaggacaatagttggtcatgacacccacagatgagagaatgtctgtgaaaacactgggtcaactgctaattcccaagagtcgctgagtgaccagcatggtgtgcagaaggtgaagtgtgagtcccctggcatccttagkggcgctgtgctttattcacaccccaaataaaggcactgggcccccccgggaaggacccgcagagggactgtgatgcattcagttcagctcctgctgcacattatacaagaagaggccaggagtccaccagtgggtcgagaatgcagaggttcagcattccctcccctcccacggacaaaggaaggaggatgtcttcccaaggaacggccaatctggaaasagtgacagggctgccstggagtttggggactgcagggctcatagcggaggaaataggcaggctgtactgggtgatgggacccaccgtctccygggtctcagatacttgtgggcctrgaagagagcctgctccttaatccttgatcagggcccctccctaggaggcttgctgcccgtgccaggaggagcccaaagtcctcagaggggttgccacctgcagcagcaggaagaagggccctccctaccacaggcacctgcagtgctgcccagagatcaaggagccagccccaaggcacaggcacagtggccatcctaccagccccagaagagctccccactttcccgagctccacctaccacgccgacctcagaaggacctgtgacagcaggggtgtggaagtagaaggagctggaggagrggagctgcaggcctcaccttctccagcagcttgacaccaacacggtgggtgtgagtggagggtggggagttgtagcattcattagagaccacagtggcggcatgcagctggactgggagtgactgcaaggctgcaagaactgcccacgctccgacagatgtacagtgcagggccggcggggtggtggagagaaaggaggcatttcctttctacttgcatctcacaggaaggaggcttggaagatatttggactaagtccttgctagcatttgacgttttgttttttgcgtttgtagaaacatcaccttcagacctacatccatccaaaggctacctgttccttttttctttcatccttctctatctttgttcactgacaatcttcttgggcacatttctttcttgagataaacaatcttttaacacagcaatgggtctgggctttaaatgaagagcttcacacttggcagaggaggacctgcgattagatacggacacgttccctgccccgtatctaaagtggcttggccaggattgatccactgtaccagccctgccctctctaggacgggctgcctccttggagtctgcagcctcacatcagcctagacgcctggtccagccttccttactctgacctgatggttgcagtcgccgtgttttctggccagtggtataacgagtacccactgctttttctgcctgtgtttcacaaggggctctaaaggacrgaatgtatttgtcaaagcacctgtgcagtgactcccactcagggaaaccatcagctttcaattggagtgttctcctgactccacatctttaaacaaagcttccaggctccagggctttggggtctctcgtgggaccttattgatgtagctgaaagaggaggcagaaacagcctgtgaccatctgcttttgtcgtgaactccttggacggtgcaggaactatgctcaggccccccgactctgggttctctcttctcctctgagtccccacctgtctcagtcccccctccctgtattggtcagctgtgtggcacatgctggacactggcgcacacacagtgcacacacatccaggccgcatcttcaccgaaagcacccgcagatcgtgrtaagtgcggccaccaaaaggcggcttgtaggagaagtgtctctcctattcttcaaagctgctaactgacacataatatgacatcgctccatcctcataaattgtattggccttgacgctgtttatcttcattacactttaggggaaggaaatgcaaggccatttaataatagtactttttgactggtgacgtgcatgtgtctagccaattctcaccctgattgaaatagtcgaaatggcctaatttaatacagccttggttactgggaatgtaatcatctttccctgaaattgcatccctgttcacaagctcgtcaagtctggagaggtatccacagctgcctcgcaatttgaggagatgcaagctccatctcattatccrgctgagaggcaatcaatgcctggtggcgccttcgaatcagagattgggtggcaataacgtgtccctcttagggaaggctctgtgaactgagcagggctcactttctccatatgcctctgacaaaaaaaaaaataaccaaaaggagaaaaatccaggcttattttccagaggcaatttctaatgtgagctagctagataaaaatggctgcaggttactacagcagaggctgcaattgcaatgacgagagcctcatctgcccagtcttctagatgagctcgggctcctgtggccctgggcatgtaggagtgggtgcagctggcctcaggccctgggcccattggtcagtgtctctgtcccgtctccggcacattctcttcctctctggctgtggtgtgccccatcctctgcaggcatcattgctcgattcttccaacacccttaagtcttctcttcgattcttccaacacccataagtcttctctctccacctttccccagaaatacttcccccgtcagcatgtgtttgtgaacctcaaaagccgattgtttcctgccctctgtctcaacaaggtttcgatgtgatgtgtgataccttagaggactatgtctttccaaaatgctgctctcctggtgagaaagagagccttggcaggctcggtcccatacagtagagtcttgtgttcctgctgctgggagtccctgagcatcaaggtgagcacacatcaccgcatgcatggacagctgcatgcctcaagtggcacaggtgacaattcaggagttttccaaaaggaaagaaaaattcatctctagggtatcatcacccaaaccatgtcatcctctacctccgtaaaggcaaaatgaaactgggaaacagcattgtgcctgttggtaacactactgaattacacacttaacagtctgctaagaggcagatctcatgtgctcatattaagtgttcttactgcagtaaaataaaattttaaaaaacatatctaattgtatacctgaaaaggatgattatactaatgtaaattgtatctcaataaacctgacaaaatattttttaaaaaagaaaaaggaaactataaaaaaatataattagcatagtgaaacttgatcaaagtgaaaatttcaacactggtcattagatggtctttgcaatttcatggttgcgcatgtgcacacacacmcacacttccttgtaagtaaaattaaatacctcagactgatatacatttccttttggttcaattttcagaagtttttccctctcatttcttgctagcaagtgtaacttttcattatcatccaagagttgaacttgcatttttttcatttatttatagtcgcttgtttctggattttgagagtgagggaaaggtgagtgtggttggctgacttacaggagtccctctatgtcgtaatggtggtcctttgaatggaattggactgccttattactgttgtcattactcgaaggccatgtctctgaagccacagctgcattcctgaagaytgagtttacctaaatgctaacctttggataaatttaagtattataatagtattataaccggaagtacctcaaatacatcacagttgttaatatttttgtccaacaacaacaacaaaaacaatatttcaagccttttttgtggtaagttgcatactgcaaccattcaaacaaagtctaaaagcagagtaaaaactttccactcctcttcatgccacccgtgtccctgctggaggctgagccatggttggtgtgactgagccagactggggtctgcttggcaggtgcactgaggccaaacacaaacatcaaagttttgctgcaggagaaaggagggtgtttatttgcagggcgccccgcaaggagaaccaggaaactcacactgaagacctgacctcctcagtggattgtgagcaggagtttttaaaggcaggggtaaatttcagggaaacagaagttacaggcaaaactgcaagtcagtacataatacatggagattacatgctggtttggcctgaacaggcaggagggtatcttgaagcagaagcttacaggtcagaggtggattcagagactctctgatttgtgatcggctaaggaagtgaaactttgtctaaaaaatctggggtggacagaaaggaatgttaagatctggcccgaggacatgactacctccaggcccctcaggaagaaattgggaacaaagagcaaagtcagagtgcagccctcagctcctgtccctgaggtctgccttccagcccatccatttggtgggggtccaggttccttccatcaggttgcttatttacttctcagggctagatagctaggtgcctggaatatcccgcaaagggactcaagatttttatttccatgctttgcaggtttggtaggccctaaaacaggtctctgctcgttcctgtacatctgtttgctcatgcaaacttatacaaacatatctactctcccacttgtacacacgagattgtttttgctaagatgaactcactcactccctcctcaccactcagggtcccgcagttcaagatrtgcggcaggcgcctttcccactcagagcactgctgctgctgcttccttattaatggcatcatcctctcccataggatgcagaattcctgccttcattcaagctgtcaaaaatagcacagcaacccacatgtgtgcgttatttttattactttttttttgctggcactgtatttctgtcatgcaaatttcacaaatcaaagtttacaaacattgactagtctgatagtgctgcattccgtgccattgtgtccagaattggttccttctggtgggwtcttggtctctctgacttcaagaatgaagcctcggaccctcgggtgagtgttacagcacttaaagatagtgcccacccaaagagtgaacagcagcaagagttattgcraagagaaacaacaaagcttacacagcatggaagaggactccaggaggttgccactgctggcatgggtggccagcttttattcccttatttggccccactcatatcctgctggttggtccattttacagagagctgattggtccattttacagagagtgattggtccgttttacagagagctgattggtcggtttttacagagtgctgattggtgcatttacaaacctttagctagacagaaaaattcgccaagtccccgccagacccataagcccagcgggcttcaattctcaccatggttttgcattcaatactagagccaaaaacagtgtagagagacttctttttcaccacttttgtctacactggatgtttcgatacatgtgttaaaagttgcccctctcacgagaaaagtgaacctcagttgatttattttcatttccctgactcttggattcttggtgaacatgcccattgtctgccatgcttcttggccagttgctgcttctagaaccagttctcctttccctcatctgcccttgctcagttgtcttcctcgttcttcctgaagcacacccagccccttgctcaccgtctttgatggtttcctggagaagtcctcatctccttccgggtcttatagggaatttttggatcacctcccctctgagccggctcctcactcccaccactctcatcccctgcctccactctaagcttatcagcatctgcctgtgtgcaatcttgtcccccaaggataagcccaggagagcagggaccttgctatatccgtgttatttctgcagcatttagaaatgtgccaggaactgactaaaatggaaacagagcaaaaccaataaataaccggaactctgggtttggaaggaagctaaataaaagccaagccccagcagattggatagagaaaagtaaaacagaaatgtctaaaatatgaaagaacacagaaatgatactcatatataatattctgtgtatattatttcaaggccctagtcttatatatagtattagagataagttctaccaaacttttaagaaaccagtgtttattattctaattaaaattgtaagttgaaatactgtgttttattccagtgttaacttctcctatcacttgatatagagggtttttaaataacttttgtgctacaatgtgaaatacatggcataccacaatttagtatcctactaaatctgcaaagattaatatactgtctgcttaattcggcatttatcccaaaactggcatactataattccagaaagatgacaataatgcaacattagaatatctttcaaaataatttgttaaataaacaaattgaaatttttaaaatatgattcagtgacctatttcaataaaaacactatgtattaaagagagaaatattggatgtaaaacacatggcaggtatcaggaacgttgtctctgctttagtgatatatgaaggaaataaaaataagcaccacaagttttgtaaaagttaatattattgtttacagatgatatgatcagatatcttgaaaaaataatgcatgctactaaaattattaaaattaatatatgttttgaagtgagcttgattcaaaattaatacataaggtttaacagattttatttgaattacaaacattgtataaaaatgtaaataaaacacctctttatattagacaaaaaaggaaagcaaaagcaaacatatgttctaagactcatgatatatataaagaaaattgttaaaattctattgaagaatgtgaaacaagtactataagataggcatatattcttgacaggaaagatttgatattgcaaagatatctgacctcccatcactaatttggtatgtaaatatttcaatcagaattccaatttttctttaaaattatttgtgttattttttggtatcaccgaagtgtggatctttaacagtgggccagaagcagatgactgtgaagatgaaagctgaaactccctggccctcattcacacggctgattccaagaccctgggagaggccctagcacaatttgcaaaagtgagatattgaaaccatgctgtgtgaccagccctgcccctttcccagtggcctccctagcaccttcttctgtgggggtgtgctgtgtccatgtttaggatgtgagctcagaagtgtgtgcatttcacagctgtgccttctcctggagacacggagccgagtccagacactgctcctttgggggtgccatgaaaagcttggcaatttagaagcactgtgcagggggaggctgacagctgttctgttgctccttaaagctagatgttcactacatcactccaacttctctcttcgctcttctctcagggagtgggctcagttcagacaggaccagcaaacccacgtgcccctcccataaggcatcattgttcatgtcacacatgagcagctgtgtgtgggtgtgcaagtgagaaaacgagctggtgtcacccatgcatcgtggccccctaaacagctgtgggagcaccagcactccgcattttcatactactccaggtttttttaaatgactgctttattgagatatatttcacataccataaaatgcaccaattttataccttggcataaaggtgtacagttcagtggtgtttagtatattcacagaattgcttaactattatcacttcctaatttgataacattgtcatcrccccaaaatgaaaccctgtacccattaagcagttactccctatccccttcctcccagtcccaggcaaccactgatctattttctgctcctccaaacttgcctattctggacattttatataaagtgaattatacattatgtggtttacttaacccattcttccattggtacctcttgggttatttccactttttggctattatgactattgctgctgtaaactttcatgtacaagttttggtgtgattgtgtacaygtaggactggaatttctgggtcctacggtaactctgcatttaatattttagagaactgtgaaatggctttccaaagtggcttcaccattttgcactcccaccagcacggtatgagggttctaattttccctaacccctcaaatastgtacttccttgttaaaatcctagccatcctagcgggtatgaagtgatatcttgtactatttatttgcatctcttggtgactaatgatgctaaacatcttttcatgcacttattacccatttgtatatcttcctttaaaaaattctatttaaattctttgyccatttttaaatggactatttgtctttgtattgttgacgtgtgaaagttcttcatatattctgggtgaaaatatcttatcagatacatgatttggaaatattttctctcattctgtgccagcactcttttaaatttgcattgactttttttaatcttgtggattattaaaattgtacaaagctaacaatttcaaattaataaatatgtaagtctttatgaatagcttaattttcacaactaccaaggcagtaaacctcagaggacttaagaaggcacatgcttccaggcacagagcccgtgaatgtttccccagcctgcacggatcaagggtgatgaagctgctgcctctctcagctgctggtggaggggggtctccccttgccacgtcagcccacttgcctcagcagagcccatttttctcccatttgatgggaccaaggatcagtggcactctttggagaattactaaagagagtaatgtgtaagcatgtctagacttgcgttttcacgtttttaaagctactgaaatcctgaaaaattacatgaaaatggatacaaacgtaaggtctctgcgtgactaaccccttcctaccagctcagctgctttccctcagggaacacaattggaaaacctttcctttgtgccaactgatgccccacaatgcagcatccgttccaaggacacactttgcttgttttttaaaagatgagtcagtggccaacatttaaaagtcaggagattttatacmgaattccctatttctgcctctttttgaaaggccagatgatttcgtgaccataggcagattctttccagagaggagggacactgctttgcctagggcagtggctccaggtccctgtggcacttacacttcattccagtcacccaatctcttatttatcctccctgcactgagtttgcaaattcacctctaggtagtctctttcaatggctcataccaaatctctctggaaaagacattttccattccacaacaaggatacatacagttatatacacatagtgaaaataacacaaaataatatttactggcactctgcatgatgccttctgatatgttcttttgtattctgctgtatttcattttaaaatgctggacatgatccactgaactgattctaaagacccagtgtttcaaaaatactgttgtagaccaccctgttgtattttaaaaagataaagccccaagagattgagtgggttggttaatatctagaaacctggtaaagaaggagctgaggctaaacaacctgtaggcttcaattcaaggccccttatttcataaggaaaaacactgaatgccagaccgcactgagttgagaaatctctgaagaaatttaaagaagagtctggcgtagtttctaaacagtgggcgaagggcttgtgacccagcagcagactttacaatattccatagaagaccacagaatattcagtagaatctacaatgtctcttaatctctagagcctcctacccccaacagtggtaaatttgtaactgatgattcccctgagtcaattccaagccctgggacattggtgtgacatatgcatggggaaaatagcattgttcatagaatcagtaaaattatkattatacttggacacattaacaactacagacaagaaaatgatcccaatttccaaagcagaacttatttcttattgcacagaaacaaaaataaatttggaacagcttgatattgcatcttttaaatcaatgcttgtcttcttttccttctaaacatttctcaaagtaggtcaaatgcaacagaccgggaagctaccacttaacacttatcattcaaaacaaatatcactcttctgtagacaaaaggctgtgcacagtgtaatttttctctgaggctgctgctcctcttaaaccgttgtatcctagttggaagcacagagagaggaggaaagtggcagagggaagaggaagggaccccaagggtaagcatggtggcagtggggcgactgctgctctccaagcctccccaccaccctctttagcagccaagggctggagacccatagagggagagctttccagagagcccagtgaaaagggaaaagaactttttaatatggtattttgagtaagggatgtagtttttatgttttttggcagcacaataaacactacagttaacatcaactcagtaatgactggcctggaacactgctgtgcatttaatatagcatcttagtcatctggggctattataacaaaaacccaaaaactgggtggcttaaaccaccaacatgcatttctcacagttctggaggtggggaagtaccatgatctgagtgtcagcagacccggtgtctggtgagggccctcttcctggcctgcagatgtgcaccctggctgggtcctcacacggagggagaaacatcatctctttcatatctcttattataatggcactaatcccatccggtcactctcatggcctcattaacctcccaaatgccccaccttcaaataccgtcacactggggattaggacttcaacgtatgaatttgtgggggggacacagatgttcagaccatagcatatagttacatgccatcttcagtaccactgcacttttaggaggtgggagtcccgtccacattctctgcagttcacagacaggaggtctgagatctagaaaggtcttgaattacttaatgggatcgtagtcttacagcttgtgagtacaggacagagtctgaatccagggcctaagattgcaggtactgctgtttggggcctacctatgttgttttatgttgataaactttttgagcattaaaacagctatttcattggctaaatatagcctttagttctattttttatggataaaagagtgcaatgaaacctcatgtgccagttattccacatcaactttcttctattttggctgcatgtatctcctctcatatttgtgaaagagtactttaaagtaaatggtacattgtatggattttcctagaaatgtagtcgtctcccctaatccacgttttgctttctgcagtttcacttaccttcagtcaacctgggtccaaaaatgctaaacagaaaattccagaaataaacaattcataagttttacattgggcaccacactgagtagtgtgatgaagtctcttaccatccagctccatcccacccaggatgcaaatcgtccccttctccagggtatccacagtgtacacactgtccacccattagtcacttcggtacagttatcaaatcaacggtcacagtactgataccagcgggtcaggggaagtccccatacacctgtgggacctccacccctgccggtgtccaggctcttgacaccatcgtgagaaggaattcaaggatgagtcagaatacagtgaaaatacagagatttatcacaaggtgaaaagtacacactcaagaaaggggagtgtggcatactcaagagagagtcatgccatgggatttggggcttttatctttatgggtttctttaaccaagtggtggaatattcctggaaaaacgtggagacttctcagaactgtggtgccacccatttttacaacaaatatgggtgttcctggaactgtcatggggttggtggttgtgtggtttactgtgttaatgagttgataatgaggtcctaggggaaacctaagtcaaattcagtgccgtgttggatccagttggtcttagccagtttggtccacatcctggtatttcagggtcttatcagctcatagcatctgcagctattgcaagttcccttttgctcatgatgtgaaactactgcctggattttctattctcttgtgaccacactgtattactcctcactgtattattatgtctcagtatcacagggcttgtgttcaagyataatttttatttgacttaatgatcccaaagttcaagagtagtgatgctggcaatttggatatgccaaagagaagccatgaagtgcttcctttaagagaaaagatgaaagttatcagcttaataagaaaagaaaaaaaatcatatgctgtggttgttaatatctgcagtaaaaaaaatcttctattcatgaaattgtgaacaatgaaaaagaaatttgtgctagtattgctgttgcacctcaaactgcaaaagttacagccatagtgcatgataaattcttagttgagctgaataaggcattaaatgtgtaggcggaagatataaatagaaacaccttccaaccaacagcagtagattcagcactatccatggtttccagcatccactaagggtattagaacatatcccccatggaggctactgcaggggactgctgtgcttcattagctacctctaacagacatgcctctgttaatccaatgtcataattacacaaagttagtatgggttccttactgtcatagaacactcagcccacgtgccatttctgcagttgtcttttttacagttggcttgtttgaagcagtaccagtcaagatctacacatcacatcctgctaatacttctctcaaktctctcttcttttttattttattttatttttttggagatggagtcttgctctgtcgcacaggctagagtgcagtggcacaatctcggctctctgcaacctctgcctcttaggttcaagcgattctccggcctcagcctcccaagtagctgggattataggcgcccaccaccacaccggactaatttttgtatttttagtagagatgtggttttaccatgttgatcaggstggtctcgaactcctgacctcaggtgatctgcctgcctcggcctcccaaagtgctgggatcacagacgtgagccaccgcgcctggcctcaagtctcttttaatcaataaaaattccttctatttatttgggcagaaactaggccattttgcccatcaaatctcacacatcctaggtttggctgactatattctcatggtgtcatgtaaggtgtttctctatcccccacattttctgtaaacagtagttaattctagaactttgcttagcttcaagttgaactcttgggataagaacatatcataggcagccctgtataattctttgccttacaatggaaagaacataatatctgttcctgctgccttgacgacataagacagactcttcagtgggtaacagccttggcctctggtgctcccagattcatcggacgctgtgaagtggcatattctaattatatcattcctcctgcatttgttagtggtttgtttattgaaaaaacttgcacatcagtacttatttagcctgaaattcagtatctacaggaaagacagggaaaatgcttaattctttccctttacttatcaaatttcagtgtgatttgttggtgcccagtaccttgcatttctcttattaggagtgaatttgggtgtctttttttctttttcttttttctttctttctctctctttttttttttcttgaggcggagtctcgctctgtaatggcgcgatcttagctcactgcaacctccgcctcctgggttcaagcagttcttctacctcagcctcccaagtaactgagattacaggtgcacgccgccatgcccagctattttttttttaaatttgtattttagtagagatggggtttcaccgtgttggctatgctggtctcgaactcctgagctcaggcaatccactcacctcagcctcccaaagtgctaggattacaggtgtgagggtgtaatcctttttttttttttattggcttatgggccatttttatttcttcctttgttaactgtttattcacagtttctaccttttcatcctattggatttttggtcttatttttcttgtgcctataaatcattctttattagcataattagtccttttcctgttacatattaactctgttttccccaaattgttatttgccatttttacttttcttatagggtacttttttgccatgctttttttaaatcatttttttaatgtagacaattttgtaagtatagtttttaattacctctagattttgagtcattgctagaaaagtttttccaaagccaaagctataaaggaatttattcatatttctcaaatcctagtatatggctgtttttttttttgtttgtttaatatttagatccctgatccatttggaattgtaactgcccagtgggttcatcttgcctgcatcccagatagaggtgatttatcaagacagaggaactgcattagagaaagagtttaattttaatccacacagagccagctgaacaagagaccagagttttattactcagatcagcctctcccaaaatttagaggccagagttttttaaagatcgtttagggggtgggggctagggaatgggtgctgctgattagtagggaatgaaatcatagggttgtggaaagtggtcctcctaggctgagtttgcttctaggtgtgggcaccagaggagtggctggtcccagtggagtcatccaggcatcagaaatgcaaaagtctgaaaagacatctcaaagggccaatcttaggttccactatagtgatgttatttacgggagtaattgaagttacaaatcttgtgacctccagacaatgcctggttatcatttaactacacctacatcttagtagaattcaggcccctctcataatcctaaacttgtggtctttcattggtttcataaaggcagtttagttttggcaagggctaaaactataaactaaattttccccaaagttattttagcccatgctcaggtgaacacaggcagcttggaggttaaaggcaaggtggagtcagttaggtcatatctgtttccctatcataattttcttgctgttataatttttgcaaatgtggtttcagaatktattctcatatgtgatataagaatggatccaaattgattttttctcatatggcttccactgatcataaacaccttcttcctcctactaatttaagtaaccaccttcatcataaactaatcccaagagaagtttcatctttcctgtttctttgatcagtctagcaccaatacacaataggtttagtgtagagttttataatagttaataacctatgaaaagctagccccactcactgtacttctcctggccattcttgcttgattgttcttacaaataaaatttatcatcaactttggaaacataaaaaaagttaataatcttcttattgagatcacatgtaattcataattaaacttggagagaatcagcatctttctgttgtatgtcatacagtcttcctatgcaagaatatagtgtgtctttacatttttttaatctatgtttggctcagtaataacttacgaacttcctctcataggatttgaatgtttttttttaagtttatgcctgggtattttatgataatttaggaaaatatttctactagtttattaattaattcctttctgtcttctggatatgtaaacatttgcttttcttttgctcttctttctttttggaaaatggagtctcactctattgcccaggctggagtgcagtgnnnnnnnnnnnnnnnnnnnnnnnnnnnnnnnnnnnnnnnnnnnnnnnnnnnnnnnnnnnnnnnnnnnnnnnnnnnnnnnnnnnnnnnnnnnnnnnnnnnnnnnnccggggttcaagcaattctccagcctcaacctcctgagtagctggaactacaggcacataccaccatgccctgctaatttttgtatttttagtggagatggtgtttcaccatgttggccaggctggtcttgaactcctgacctcaaatgacctgcccaccttggcctcccaaagccctgggattacaggtgtgagccaccgctcctggcaacatatgttgctttctagtctgtatgcctctaattgttttatatatttatttatttactttcctaagagtatgttaactaatatgtacaacgtaatgacaaatagtaaggaaggcaatggatatgatcttgctttcaattttaaaaggaaaaggaactctattttcctattaatttaagttattggatcttaggaacatatgtactctctctctgtctctacatatatacatatgtatgtatgtatatatgtatgttgactaatatattttagcttaatcagtgttcttaacacaaacatacactgcattttatcaaatatgttttgctttctatggagatgaatgtatgatggattatactcatgaatttctactctcattcctgcgtaaatcctattagatcataatatattaatgtattaaaagaatgtgctgatggattccgttaactatcattttatgtgagattttacattcatatttttaagcaagaatgcttttcttgtgcattcattattaggttgtatatcattgtaatactcactatataaaaatataattagatatttttcttgcatttcctactctctgggctggctgaaatggcactaacagcatctgaatgttaaaggtttggtagaattccctgcatacccattggcctggtgctttctcatacttgccctctttttgcagcccttatatgtttcttctataggacccaaattgatttgcaaggaaatttgaaactatggaaaaggggagaaatacacctgtcattgagaattagaactagtaaagtgcaattttttacaggggaaagtgctatgtaattgtkcagtagtgtgttgactaagactgaatgtgttagaaggtagttagaaatgattacctttctgacagatttgaccagccactgaaattataaacgtctggtccaaaaatcattgatagttttacttaatctatgaagtattaaatttaataagctggctgatcagyttttagttttcttttttcaaatgcctaactttgtatattttattgttatttaagaaaaaagaagtggctttcatatttttatcataggttgataagtcaggtaatagatgaaatgtatcaggtttccaaaagaatctatgattatgactagaactgtgatttctctgcgatgctgtagtgaatattacactcaaactgataatttaggaattaacctgttatctcatgatgtgtgtggaagaactaatagttaaaaacagtatcccttcactttcatgaaaacacaaggcaaccatgaagttaacacaaagtatatgtaagggttaaactctgtcttgtctgtcttaaagttttcttaatattggtttctaggttcaaaaatcaggaaatgccttgtttcataggctttacacagaggccctgaagagggacttctctatcccaagagccagggagcaggcctgaacaggtccagccatcacggccatgctctcagggctgactgcagccacaccaccaccacatgaggctagacagacagactgatggagcagattaggaattacctgatatgaagacttcattttcctaaacacaggcattttcttcttcaaaaatttggtgacaagtagtatttgttaatatcacaaatatacccaattggcagtcagtagaaaggcccagaccaaaataatttcagaatgactaacaaatgaaatataaaaatatctgagcatgtttcagggaagtattacttaaacataaatacaaagataaatatagaaattaatgatgaatttaatataagaatgctaaaattcagtatgtcaaacatccaacaaaaaataccaagagaggaaacaaatgggacaggaggtcttttctaatgattcaaaattatccacaaaaaaagctgctgtgtccctccagcgctttggaagggcccctgcaagcaagggctctgtgttcccagcttcattagcttagtggcatgtcaatctctgatcaaatgcattcacgaccttgatttggggaccctgaagccttctcaagagtaggaagtgttttataaaaagccctgcaaagaacaaaagtgtttctattaagtctttgagaaaactatggaagacaggctgtattttaaatgattgataatcttaatgttcttttgaaacattacctgtatttccataaaggtcaagacaataagcagtttggaaacaatcacctccctactcttgagaaaagtggatttataaaaagggtggctggctgggtgcagtggttcacgcctgtaatccctgcactttgggaggstgaggcaggcagatcatgaggtcaggagtttgagaccagcctgaccaacatggtgaaaccccatctctactgaaaatacaaacattagctgggcatggtggcaggcacctgtaatcccagctactcaggaggctgaggcaggagaatcgcttgaacctggaaggtggaggttgcagtgagctgagatcgcgccagtgcactccaacctgggcaacagagtttgactccatctcaaaaaaaatctgtctaagttgaggaacttggatttggggaacatgacaatcagaagaacagatggagaccagtgttgtgcagcgggtgaagggatggacactagagtcatacatcctaaccttatactctgtctcttccttatgtacattacttagtgtctcagtgcctcagctttcttatctgtaaaatggagacagtaatgtctatgtcattagaattattgtagacttaccatatagaaagcnnnnnnnnnnnnnnnnnnnnnnnnnnnnnnnnnnnnnnnnnnnnnnnnnnnnnnnnnnnnnnnnnnnnnnnnnnnnnnnnnnnnnnnnnnnnnnnnnnnnnnnnnnnnnnnnnnnnnnnnnnnnnnnnnnnnnnnnnnnnnnnnnnnnnnnnnnnnnnnnnnnnnnnnnnnnnnnnnnnnnnnnnnnnnnnnnnnnnnnnnnnnnnnnnnnnnnnnnnnnnnnnnnnnnnnnnnnnnnnnnnnnnnnnnnnnnnnnnnnnnnnnnnnnnnnnnnnnnnnnnnnnnnnnnnnnnnnnnnnnnnnnnnnnnnnnnnnnnnnnnnnnnnnnnnnnnnnnnnnnnnnnnnnnnnnnnnnnnnnnnnnnnnnnnnnnnnnnnnnnnnnnnnnnnnnnnnnnnnnnnnnnnnnnnnnnnnnnnnnnnnnnnnnnnnnnnnnnnnnnnnnnnnnnnnnnnnnnnnnnnnnnnnnnnnnnnnnnnnnnnnnnnnnnnnnnnnnnnnnnnnnnnnnnnnnnnnnnnnnnnnnnnnnnnnnnnnnnnnnnnnnnnnnnnnnnnnnnnnnnnnnnnnnnnnnnnnnnnnnnnnnnnnnnnnnnnnnnnnnnnnnnnnnnnnnnnnnnnnnnnnnnnnnnnnnnnnnnnnnnnnnnnnnnnnnnnnnnnnnnnnnnnnnnnnnnnnnnnnnnnnnnnnnnnnnnnnnnnnnnnnnnnnnnnnnnnnnnnnnnnnnnnnnnnnnnnnnnnnnnnnnnnnnnnnnnnnnnnnnnnnnnnnnnnnnnnnnnnnnnnnnnnnnnnnnnnnnnnnnnnnnnnnnnnnnnnnnnnnnnnnnnnnnnnnnnnnnnnnnnnnnnnnnnnnnnnnnnnnnnnnnnnnnnnnnnnnnnnnnnnnnnnnnnnnnnnnnnnnnnnnnnnnnnnnnnnnnnnnnnnnnnnnnnnnnnnnnnnnnnnnnnnnnnnnnnnnnnnnnnnnnnnnnnnnnnnnnnnnnnnnnnnnnnactacattataatgaaccaaggtgaaccaaaggagcacccggctcaaaagtaacataaaagcaacaacaaccacaaaaagccagcaaagaactcaatggctactgcagcaaacacataatctataaaattagtccaggaaagtcacttagcaaataagtggcaagaagagaaacaacagaaatagggacaacaacaaactctggagtggaggaaggtatctgatatcagagttgttccaatatgttgtctaaaagcaacaaagaaataacaaaatcttaaaagacacagaaaagcatgccacacacaaaggaaaaagctattaatagaaactatcattggagaattctagatattgaatgtatcagacaaacactttaaaaatgtgtgtaaagaacttaaggaaatcatgccttaaaaaaatcaaaggaaagtataacaactagatatcaccaagtagacaatatcagtgaaaaggtagaaattgttaaaaagaacccagtagaaattctagagttgaaaagtacaatgactgcaataaaaaaaaaatcactgggttgacataataacagatcttagtataaagaagaaagaatcagcaaacttgaacatagaccaatggagattatccagtgagtggaacaaaatgaaaaatgaatgaagaaaaatatacagaaatgaatatacctgtggcacatcatgaagaatgccaacaaacacataatgggaatctcagaggagaagagaagagaagagaagcaggggcaaaattacttgaaaaaatagtggccaaaaatttgacaaaacaattcatttttacatctaagaatgtcaacaaatcccaacgaacttaatgagattgacatctgtacacattatagtcaaactaacaatgttaaagacagagaacattttgaaaacagcaagagaaaagcaatatttacttacaggtgagtcacaatatgattagcagcagatttctaatgagaaaccatggaagccattaagaatattagatcatgccttcagagtgttggaagaaatgactgtcaacaagtaattatattcctagcaaaattttcctcaaaaaacaaaggaaaaatcaaaagacaagtcacatccacaaaaaacttgcacctgtatgtttgtagcagctttattcataattgcccaaatgtagaagcaaccaagatggctttcagtaggtgaattaataaataaaatgcaatacatctagataatggaaattattcagcactaaaattaaatgagctattaagccatgaagacagggaaaaaattaaatgcatattactaataagcaaacctgaaatagctacatactatatgagtccaaccttaagacagtctagaaaagaaaaaccatggagacggtaaaargatcagtagttgctgcagggaagggttggagggaggratgaataggtggagcacaggggatttgtagggcaggaaagatactctgtacaatactgcagtggtggatacatgtcattattcatttgtccaaacccatagaacgtgcaacaccaaaaggaaaccctaaggtaaactatggactcttagtaataacgacatgattaatcaattgtaaccaatgtaccattctgcagcaggatattgacaatggaggaggctgtgcatgtgtggggcagggggtatacaggaaatctctgaactttccactcagttttgctgtgaacctagaagtacactcgaaaataaattctattaaaaagaaaaggaggccgggcacagtggctcacacctgtaatcccagcactttggaaggccaaggcgggcagatcacaaggtcaggagatcaagaccatcctggctaacatggtgaaaccccgtctctaccmaaaatacaaaagataaaaattagctgggcatggtggcaggtgcctgtagtcccagctactcaagaggctgaggtaggagaatggcgtgaacccggaggcggagcttgcagtgagctgagatcgcaccactgcactccacagcctgggtgacagagggagactccatgtcacaaaaaaaaaaaaagaaagaaagaaagaaaaggaattctggagatggatgcgccattgcgaatgtactttatgccgccaaattgtgccctcaaaaatgattcaaatgatacactttacattatgtgtatattaccacaataaaaaaattccagtcgcttcaaaagaaaagatgaaccacagaaagggagaaaatattttaaaacatatatctgataaaggacttgtacccaaaatatacaaataactcttaaaactcaacaatataaaaacaacccaattaaaaaatcagcaaaagatctcaacaaacacctcaccaaagaaaacatacatatggccaacaaaagcatgagaatatgctcagtattatcagtcattggagaaatacaaatcaaacaatgatgatatgccacgtcacacctgctaccattgttatcactaaaaagacagaaactaacaagtgttgcagaggatatggagaaatagaaacccttgtacattgctatagaattttatgttccagccactttggaagacaatctggcagttcctcaatatgttaaatgtagttacccagactcaacaattctactcctaggtgtataaccaagagaactgaaaacatatatcaacacaaaatcctgtatacaaatgcccataacaacattcataatcgtgaaaaaatggactcaaccaaaagatctatcaactgatgaatggataaacaaaatatggtatatctgtacaataaaatattatttggcaataaatgagaatggagtactgatgtgtgctacgataggagtgaattttgaacacattatgctaagtgaaataagctatttacagaaggtcacatatcgtatgatcccatttatataaaatgtccagaatagaccaaactatagtgacagaaaatatataagtgactgcctaggactaggtgagatgggtggtggatgtgggcaggaaaggggggaaaaggggagtgaccactacttggtcaggtggttcattttggtgatgaaaatattctaaaattagattagggtgatggttccaccattcagagaatatgtgaaaaaaaaaaaaccctgatttggacacattaaatgtgtgaattttatgtatgtgcattatgtctcaaataaargtgatttaaaaacaaagttaaaaaggaagaattgtagcatagagcaccttttgtaattatggggataggaagcaattgggacatggccaatggccaaggacagtgtttgattccttcatagaaatgcttcagactggctctgggtcccttgagcttagcattttcaagttaagggagagcatgtatccctgctgtgttgacaataatttcaccgggcaacccacaatcagaaagcagggcatgcctgtgcctgtrctttattttagtctttcaatggtggagccaagccagcaatgtcaggcagagagggaaaaaaatgaagaaggcagattgcctctaagaattttgcaaactgatttaaatgtttaatcagcacatttcaaccactttattaatatgtttgcatacatatgtgtgcactaaggcagtgcttttagtattcagcataactcatcaagatggtgcatacatttcttccagagccatgccatcagtgtctgtatgaatcamtgaaggctgagaatgccaatgctgtcacgtgttgccaatgacataaggcctagacctgttcttgagagtagggcatgccctgtgaggcagacagagctgcagagcctgcagatcaggcagtaaaaagagagcaggtgcaccaggtcaaagagctccagcagagaggggatggtgttgttccaagcatggttcagaaatggggaatccaggagtacagttgcaggtagaaaagcaggcatctggcaaatagccagctctggctcagggagccagggagccctggtgacagtgcccrcaggagcgggacagagcacctgcctgatgtcatgatctaggcagtcaccaacctgggtcccaggcagcagaaacaccaggcttacccttcctggaataattaaccacatgagaaggggtccctgaagcaggtcaacattcacctatcaaagctgaagactgataggagaaagggtctatcaaatcctggagtgattaccttagtgagctcctctttcctgagatctggatggactacattttggggaaggatggaaggtgtgtgggcatgggccatgtagttagatctgcatggcgaggactcagagtctgggagccattgacaagcacctccactcctcgaaggccgacggcagctgtggctctccaaggttgaagaaatgaagacaccactccctgtgtgttgtcagtggccaggcctatgcagtggagtgcctggccattcgtgaagatctacagctggattaggtggcatttagccattcatttttcaagtttctgtgtcttggaggaaaattgagaghgcacatatggcctaaaagtttaactcctaactcctgtaattcattgatcagaattataattttcactttaatgatttataaatgtgtaccttcaagtgctaatgtttgctctgtgtttttagatggctatcccaaagaagaaatgatttatagatggagaaaaaattcagtggaggcagctgaccagaaatcatggcggctttatcagtttgacttcatgggcctcagaaacaccacagaaatcgtgacaacgtctgcaggtaggaatttactgaaagaggcacagctctcaaaagccagagaggcctaaggccatatgtagtcatatccttaatgtacaagccttttgggcaaccatgatacataagtgatatttgagacaaaacaagtgattcaaagtgaaactrtgttttcatgttttaattggtatgggagagggatgttagaaataattcatatttttgaatccaggctgtgtttgcataatgtctataaacctagctataaacttaacctaactcattactgaccatatttacataaaccaattttgctgatggggagagttctgcaaatttccacgtacataagaagaatcaaatattattgagaatccacacataaaagaagctggtgtgatatgtcctttgagtttcaattgcttttatttactctaagttttatctttaactttgagtttctttttcaatgattgaaagtaattacctaccaatttgattttatgaagtgatcattatatgcatattcaaaatcctgtaattaaataaaaagagttgttctgcctatgaatatatgtgaatgtgttttgttttgctttttgtcttatgtcttatgttgttttttgctttgggtatttaattattcctagggtccactatttcacaactgattttcttttggtagggtgtggggtgcagatgggggtagagtcagcttttctactgatattatttgttagtatgaagaatttgttgggtcttcaaattatctaataatttattttatgggtgactagattaagatgccagttttgagaattaattgtaaatatctttaaagcccagtcttaattcttggtgcaactgtaaaatagagagctattgacacatcaagaaaagttctgaaaaagttacctgattaagggagaaaaacaaaagattctctatgagtgtcatggtagaaaatctgagaaatgggatctgtgtttaaatattaaacaatgacgatgttaaataatggaacaccacaatttatttaaatgaactgtggaggcagcgcaaagggaaacgttttgggatgcttgctcccaattaagaggcacctaccttagtaatgtaattccctgtcttagaggctgcaatgtaccagcagacctttggggtctaaggccgcctgaagggagtcaccaagcagcagggaggactgctctagcatttaaatcccaaaggcctttcctggtgttctcaaaacaaaaggaaatgcaaagttaagctgaacccaactaactcaggggaytttgaaactgattgcaagcaaatactagctcagaaaagtggcaaatagaaggagacaacagatttgaggcaacagtctgaacaattcttgtgctaggtgttactgtggctcttaacgaaattataatcaatctctaaagtcatatttttaataagttttacaaccayattcaatcttttgtataattacacttgtaaggaaaatgtcctttggataataaaaaaattcccatttcatacgctcgggacggacgcatggtggctgtagcccacaagcatgagaagtcacgccctgcctgcagctggggtgtgttgttgcgtgtgtgcttttcaggccatatccagcatcaattcaagtgtcaacagttcactgtttaatgaatattcatgaaacaccattgcttgctaaatgattgacattttcacaatgtggaggatcactcatgggactgtgttggcattttaaaggatccctctcagataaatgcccttttataggcaaatgttattccttgtttctcaatctcctaactcaacattatgactatggcagtaacacacttacttacataatcccttttttccaagaataaagcatttgcaacactgtctacttggttctcacaagtcgttgtaaagtttgaaaaggatggatatgattgtgccaagttttcaagcttatgtaaataattctactagggaacttatctgtgaaatggaaacactttgggaaacctcagaatcaggagaaagagatgtgaagcctgcaggtgcattgccgagtccaggccctgtgaggtggtctctgtccattatcgcctcccaccatcttctcactgtggccactctggccccgccatgctttgggcacagccctaaacagctgcatttatttgactggacccatttttctctattgggataacataaatatcaaaaatattatttatgacattctgagacttggatgtaatatattaaatatgtttatttaaaatgcacaaagactgttcraaaacattagtcactgaattagtttcctggagctactttaacagttctaccaactgtgtggctcaaacaacagaaacaacgtgttgtctctcagttctggaggctggaagtctaaaatcaagatggcaggcttggcatcttccgagtgccgtgaaggaaggatctgctccaggcctctctcgtcggcttgcaggtagtattctttccacgtccttctaacctgcagcaaattcaaggaagtgaattctgttctattgtcttctccctggaggtgttgatccctgtatctgcatttcctctttctatagaaacaccagtcatattggattagcctgccttcatgacctcaacttaaccattttcaaagtctctatttccagataaggtcatgttcacaggtactgagggttaggactctaacatcttcaggtgaatacaatttaacccgtggcagtaacccagaaagtttagcactttgtgaggagtggcatttcagttgcactgggaaatgaggcgttcccttgtcccagacgcatcctttttacttggacttccttgcaggtgtcagcgttccccctctgggtgaatctgatgatgatgaagtttggaaggcattgggctaggctaacttaatgagtacagctggtggatggtatagaaatcacattcaaatgggatcacagcttagtgtactaagacttctgactggcacagcagtgtgctttgtcatgttactgatggtcttgaacagtctctctgcygtctttatgccttcctcagctattctccaaggacaattgcagctgacctttcccttgcactagccaaaggccaccatgcrtaataaaaatcacatacttttttttcttttttttgagacggagtttcactcttgctacccacgctggagtgcaatggcacgatctcgactcactgcgacctccacytcctaggttcaagcaattctcctgcctcagcctctcgagtagctgggattacaggctcctgccaccacgcctggctaattttttgtatttttagtagagacgcagtttcgccatgttggccaggctggtctcgaactcctgacctcaggtggtccacgcatctgggcctcccaaagtgctgggattacaggtgtgagccactgcgcccagcaaatcagagactttttgttatctcttctatatatctatatctatctaccaattgcaataagtaaacctcctacatttttttattctgataatttaaaatatctgtaggcttaccgacactgagaataacctgcagcgaattcaaggaagtgtaccttggaattatcggaaacaggctgatggcaagatgttcagctttggttttcattaaatgttattaattaaaaagaagctaaatatatatggatatgcatacatgtatgagttgatagacacacgtatatttcctgctctgtcagctgagaagtcctaggagcaacaacactgcaggagcaataagtacccttagtgcccagatcttggtttctaatatcattctccaattaaaggaaccagggctccttggagaagtggcagattgtgaggctgcagcagtgaatatacaagatgagcctagagaatcttgcagttccagaaactaaggcatgctaaacactcacctcacacccagccacctacacacaaaatcatggggctatatcaacagacgccaactaaaagatatcacaatggtcaaagctaaaaatgtgagcagcaagataaatacagtagtattggattataacccaagaataaaataaatatccatgaggccacattgatgcaaataaatgattgaataaatacatacaaacatgggagaacacagataaatcccccatgcagaatttcacatgatttatgtggatgttattccctcaaggaggtagggcatagcccccactctttaattgtgggctgcacctggtgactttcttccaaagagcgcaggaggagacaaaggaaggacatgtataggggataacgtctggtgaacaccacttggccacgtgatcggtgaacatggtcagtgattatagatggtgatcctatgtgccmtgcatatgatgcgatgaaaatccaccttacgagtctggcaagaaggtggctatggaaagttatcctcttgggttggcgcatcagtgaaagtcaataattaaaatacctataagccattatctcagagagaaaggaaggaaaggcaaatggactctatactccagacattttctgaatttcaaaactgtgaaaagaagaaagcgaagaaaacaaggagaaagggtctgaaaagcagactctatcagggagggcaagataaggaaagagcatcactgaggttgcaccaggagggggcgtcacggtgagcatgccactggagctagagcccctggagttatctgtacagcaagtgcaaaatagactgaaaaacctgttaaactacagctcagccttcagtcaccccagcccctgatggcattaaggtgattagtcccaatctttggcctggaaaagagaatgatgggctccccttgaaggataataaatttttttattacagattttcatacagaaaagtgcactgttgccaaatgatcaaaacccaaaaataacacaggtatctgactttttaccagaaatcatggcaaccagaagacaatggaattccaaatgtgaaaagaaacagaattttctgttaaaaagccaataaaaataatggtgaaatagtgatgttttcaggctaaagaaaaacaggaagagagaaagagattgactctatgatctctatagcaagctgcttctctcctttgtgtaaaacctttatgacatttgcaggttaatccatatctttgccatatcaaggctgcccataatgcctatttgaacctgagtccagttgtctaaaataatttgggtagaatgcgcagcgtttttttcttacccacagcaggttttgtgagataggactggaaatgtgaaggctgctttgcagtgggcatacttatggcaaactgaggggtgctcgggtcaggctcagagcacgcttagaagcggctttgtagtggaagtgatcctggcaaaggctccctgacgtcagaggaagagatcaaggaagaagcctggggctccagattaattgcactaggagctttccctctggtgcctggtttattataagaccacaaataggcttccccagagactagttattatagtcaaaacaatcaggagaaaggctgctctcgcatggctatggcaaaagccacatggcttgatgtggacatctgatgtttttgaagttgattcagtctttacgtgtagaagcttctgtaagtaattctccaaactcaaaaaaagtattctatatatgaagtttttgatactgtgtgtttaacattccagctaattaaaaaatacatatatttcctccagcagtgcccactgggagggagggagcacagggggcaggagctccagcactagagtcagaccacactgtacttgaacatatctgcaccacttacctsctatgtgaccttgggcaattcctctgacccatccacgcactcctctcataagtgagagggaaactgccttctcctttatatgggtattgtgaatttaggtgaatcaacacatgccaagtacataattgcaatatatatatacaaatattgcctattattattgactcaatgtagttcccgtgaggagaattgagagatttacgcattgtctttctttagtaatcatccactaaaccagctgccagcattttattcaatgagacatgctccaacaggatgctatagtgagatttatatcttgaatgcaaataggaatatatgtttaaatagctcttgtagaagaaattcaagaagtggtttcttcttggctttttgtcatatttttctgaatgcaatctgggtaatatatcagtctgggtttgaaagtcataattttaaaaatagtgtcagtatctttgttcacaagattgagtgaaaaatctttcaaacccactgtgagtcatcctccatctctaattcagacgggaaatgcagaaaaaacctcttcttggtctaatgaactgctcgtctgctaagaaaattgaaatcctgtgatacaaatcatatctgaatatgtctgttcttttaaaatcagatttaattaattactccttccatgggacctgaataaattataacatttaatatattatgacagtaatatttctacataagagaattttatggtttttatttggctctcgctctatactttgagcaaggtgggacatgagccaatacctttatttatagatgaggaaccagtctcagcaagatctcaggcatggccttcagcagtccacacaatatgtactgtagctagcattagaccctctcattctgaggccagtggctttttcatgatgccagggccacraagagttaatttgacttcctgtatctgactcccggtttccagaacattttatttatctatccagtgttggactgtatataccaaacagtacatcccctggcatggatgatattttatatcatcatttttccattgtaggattatattactgcttccaatatttgatcagaaggaaagtcttaaatctgtaccatgacataagagaggaggatgatttaaaattatctataaaagtacattattgttgagatttagggctctggaaactgtttctctggaatatcgccatgctgaagatgcttaggaacactcattgttttacatgcttttttgatgacactacaaccctttaaggtagttaggccactatcccatgacgcaaatgacaaactgaatcttaaaagtatcttagttcatgaaatgcgagggcgagccgtcctgtagcctcragatagctgtggagcgcagcactctagaatgcgccaggagaaacctgcactggataaaagccaaacagcctttgacgcctgagctgaagctcctggagcacttgttcctgcccacatcctagcaagcgctcatgccacactcccataccctcccagcccacctggataacttagtagtccctgggcttttaagcattgawgtcattcctccaggaggccattttcaggagccgctcccacgtccctcaaaggccaagacaggttgacagccatttacttccataatgccctgattttgccccatagtgacacttagcacatagcattgtactgtgattgtaaccaaggaggacttggaaaacggaggttgagaatgtgatgctggagccatcctacctgggtttaaattccaggcctgcactcataaggtctgtcatcttggatgcattgtcttacttctgagacacagtttcctcatctgcaaaatggggaagacaattctagtgccggcctcagagataaggaccttgtgaggattgagcttcaaagcagacagcaatcattgtctggcattcattttacacatttcccaatgaatccacctgttggtatcccagggagctagcaaaataattagctcaaagaaagtacttgaatgtttggaagagaaaatgacccttaatttgtttagcaaatgagtctaaaggataaatatatccctttgcaaatatttagttgtcatcttagaaaaattaatatggaagcattaatgagacataggagtgaagatattgttttgatattttagtagctacacttcactcctgtttatattaatagtttcattatttaaaatttatccaacaagggactttaaaaaattttttttattttactttaagttctaggatacatgtgcagaacctgcaggtttgttacataggtatacacgtgccatggtggtttgctgcacccatcaacctgtcagctacattaggtatttctcctaatgctatcctcccccatccccccaccccccgacaggctctggtgtgtgatgttccccgccctgagtccatgtgttctcattgttcaactcccacttatgagtgagaacatgcagtgtttggttttctgttcttatgctagtttgctgagaatgatggtttccagcttcatccatgtccctgcaaaggacatgaactcatccttttttatggctgcatagtattccatggtgtatatgtgccacattttctttatccagtctatcattgatgggcatttgggttggttccaagtctttgctattgtgaactgtgctgcaataaacatacgtgtgcttgtgtctttatagtagaatgatttataatcctttgggtatatacccagttacgggattgctggatcaaatggtatttctggttctggatccttgaggaatcaccacagccttccacaatgattgaactaatttacactcccaccaatagtgtaaaagctttcctatttctccacatcctctccagcatctgttgtttcctgactttttaatgatcactattctaactgacatgagagggtatctcattgtggtcttgatttgcatttctctaatgaccagtgatgatgagctttttttcatgtttgttggctgcataaatgtcttcttttgggaagtgtctgttcatatccttcacctactttttgatggggttgtttgttttattcctgtaaatttaagttctttgtagattctggatattagccctctgtcagatggatagattgcaaaaatttcctcccattctataggtcgcctgttcattctgatgatagtttcttttgctgtgcagaagctctttagtttaattagatcccatttgtcaattttggcttttgttgccattgcttttggtgttttagtcatgaagtctttgcccatgcctatgtcctgaatggtatttcctaggttttcttctagggtttgtatggttttaggtcttatgcttaagtctttaatgtatcttgagttaattcttgttaaaggttgtaaggaaggggtctattttcagttttctgcatatggctagccagttttcccaacaccatttatgtacttttcagataagcctagttttgccatatggatacaaataaatgaaccaaaatttttgaaaggggcagagcagattgattttagttggttgatatttatttttataaactcacacaggcatgtagcttaccacaaattcgttttctatgaaagtactgagtgctttcagcaggattcagattttaaaagtccacactgcttctgtgcagacaagggatgctgtggacctatttggaggctggctgcctaggtggggaattgattccttaggagtcccctggggagtcaggagcttacataggtgatgtccatccagctcacctgaagactcttggccagacgtccattttccatcttagtcaacacagaatctgaagaaatgcaggcctgtttcctgagataacgaagcttttgccagccagggtcaatctctctctaccattattatcacagtagccgtcaattagataacctgggtgcgtttcctctttgtccaatgaaacttttcttactggttctatttcagctggttgtcactgatcagacacttctgtgcaggaaattttgaatgcacccaaaatagttccttccagaccccaactttccctggacaacagcactgctcttcggatgttgctcagttcccacttcgctctccataacaaataaagatatatttatcttgtagactcatttgctaaacaactgacagagacaggagcatgggaattgtgtggccccacgtgtggcccttgtcctgccaccacccccaccaccacccccccttcacactgctcttgccgcatttctgtggccattgaagatgtctgtcgtcggagtcatactacattggacttagtagttcaccttctccttttgatttgctctaaaccaagaggagactcactccatttatcagaacaccacgcatgagaggaatgcaggaatgcagtcgttttgcaagcacctggcccttggcaggggtgctctcatgccctccttccttgctgtgctactgagatgctcacgctggtctgggtggaagcatgcaagcccagctccctcagccctcagtggcacagcatcagccccacactgcggcccctgccttcagtggcctcggggctccccttcccagagggtatccaaacattcattcagtcaacctacttactcttcccagggaagaaaaattcataattagagaagccacgcagtcagctatgctccagccaagcacctcccagcctcagacaggcagcccagtccagtcctggctagggttttcctcgtaatcacaactcaaagtttacttnnnnnnnnnnnnnnnnnnnntacatctttcttcctgtccgtagggggtttccttgagtatcacctcatgtgtcatcatacagaaaccaaaaaattctactaccaccttgattctacagttgatatttgttttattacttcctttaagctatccatccgttaatctttggatttcaaacatctgctgattggccgtaagaccagtatatacttgtgttcagttagtattttatggtaaaatttaagtatgaggacaataaaatgtaaaaattatatgtccacgtaatgcttaaatgtctattcctcaaagaagtaattaccagtaaaaaagtgtgatcagaacaaaaaaccgacaaacaaaaaggagtctgaggaaaagcctcactgaagaattacgaggacattgaaagtcacctctgttactccctgtagtcgtacttcaaatatgcgggctatttaggcagtatgcatcgctctaaattttcttcttattaccccatatgcccaatgctactgttatttacagaattaattttttagtcatatcccwtatgacttgtgtaattttatttatcaaagccttgttatcaaaccacgttggggtaatttattggtctttcataccaaaagcctttgttttaycaatacaaaacaaaaagctctagaggtttggagtttatccagaattgcacggcattgtgattagcccatttgtcaggactaattatgctcaacttagaacaaagtctctttttaaaaagtagctagccagcccccaattctaatgaggacttagagccacagacttggcttagaattcatcacagctctctgagtatgtgtcaagtagaaagagagggcacattccaactgctctttatttcttctgtaataaagtcacagataaaaggagcataaaaagcatgctttggtcttggtttaagtctcacttcaaaagaatctgaagatgatgtgaagttaatgcgctgctcccagcacatcataagatggctaggcatgcagcccagggtgactgcagcagctgccagccctggctgtgggatccggggcaagtctaaggagagagagcagttgagcctggaagccctgtcccagcctctggctagcacagggcttctttttctttctgccattttaactaagctggaggccccagtgtattccagggaatcaatcttcaaaataactgctgattccatgcagtgatattgtttgtttcataagcagatttgcttttataaagtagaacatctatttgttcaagacatatattcatgttgttctttgtgttgatgagagaaccactgaccgacatctgtgcactcactttgtgcgtgtaaaggctggccttaggccctgcatttcctggttaacttgtctgccatctatgagattctgtgtcttcaattcacaagctgttcaacaatttgtattgaataagaagactaagaaagatttagtcattttgaaaaagaaaatgctcataatataatgttaggtaaaaatagttgtataaaatcttctgtattgttttatgtgtttgtattggggtgtggagatgcaccaagataaaaaatacccttgagacaaaatagtagtggtggcttttctctcatatctccataatgcttttcttcttaaattattgatgcatattccaaatgatttaaaattttgctttaaaaaatctttaaaatcacagaaaaatacgtagaagaaaacaacaaatctgcatctccaccagtttttgttaatatcttggtacatatgtttccagagttttgttttaacatgagacatactcttttccatacaatagactcgatttcatatttttaaaaaaatctcaaaagtggggaaaaatataaacatgagaattttttttttaaaaaacttaaattctatctcctagtaaagatcacagctaatatcaggtagatagctttcaaaataatcttcaatgaattcacacagagagattcatagaccagtatgcagatagaaaatgtagcaatgtttgataacaattttgtacgattgatgttattttaaaaagtaaatgggatttttctggattctattagaataaaaaaagaaatagaggaattaaaacttcaaacaagtgggttttttaatcaacaaatatattattttctgaaagactgctctgaagttaagaaaaacaattttaaagattcagagatagaaatatattattatctgaaagattgctctgaagttaaaaacatttttaaaagattcagagataactattagttatattcttcaattttagacagaatcgatagtctcaacactatgaaaaatgaagtaacgccaatacctaccagccagagattgttaagaacacactgacagttgattgattgggatgattatttgttgcggtgaaagaacacataccatggggaaccgtggggcacctcagtaagagggaaataaaggaattattgtaggtcttaggtgtttggatggaaggtttgagggactaaggcttggctctcgattggattttatcaggaagctgtggttattctggttttataaaagaatggatgttgaattttgtctactttttctttatcatttgatgtgatcatatgatttttttcttcgttaatattgtgggttgcattgatcgattttcaaatattgaaccaacctcaaatccctggaataaatctcatttggtcattgtaaataattatgtctataaattactgagggtataactactcttataaatattaatgcaaaattcttaaaatattaatattgttaatattattaacaatacaacattaatatcaattcaatattaatattgtatcaatttgatgatatttgtttatatcttgttgagagtttttaaataatatttatgagagtaattctggcctcataaaatgaagagagaagtgttccctcctctcatacgtcctggaagagtttgtgtagaattggtgttaattcttctttaaatgtttggtaggattctctaggaaataatctgggactgaagattttttgtcgggaattctaaaattatgaattcactttacttaatgattataagactatccaaatgccttattttatattaagtgaactagggcagtttgtcgtttcctataaattggtttatttcagctaagttaccacatttatgtttgagaagttgttacactattccctgattatccctctgatgtccttacaagatctgtagttttctgttttatttycaatattggcaatttgctattatctttttgrgggggccggttctcctagtggtttgttaatcttattgatagtttggagaatcatctctttgtttcttgkttttcttctatatcattctgagtcatcaattccattaatttctgttctttattgtttcccttattctacttgatttgggtttattttgttcttgtttttctggtttctaaaagtgggagtttagattattgatttcagacttttcctctttcctgaagtgtacatttagtgctataaaactctcattaagcactactttagctgtatcccacacagtttgatgtcttttatttcacactctactagtatggacattttatcagtttaattgtagtgtagaagccacatctcattttacatcttctatagccactaaacagtaattcctcctccccccaacccatgggaaccaccttactaccttctctttctatgactttgactactttagatacttcatataagtggcatcatacagtatttgtccctttgtgcctggcttatttcacttagcataacgtcctggatgttcatccatgttgtagccatgtgacaggattttcttcttttctaaggttgcataatattccattgtaagtatatgccatatttttaaaattcattcatgctttgatggatatttgagatgattccacctcttggctattgtgaatgatgctgttgtgaacatgggtatgcaaatatctctttgagatcctgatttgagttctcttggatacacatacatttagaaccacattgaacagttttataatatttgcttcaactatcaacataaattagaagactcaagacaaggaaagtctgttgtataattctttccactgatctcctctgtgttctgaggagaacacaattcatgttcaattcatccattgaatttttaattttgtttatcatacatttcaattttaaaatttcctttgattatttttgtgtctcctatacctttgctgagactctctatttgtttccgaagtgtttgtaatcacttgtgaaagcattttttgagggcgactttaaaaattcatgtaaaattcctcacatctttgtcaccctggtattggcatctgttgattgtccctttcttgttctatgtttagcaaactgttttttattgaaagctggacattttggatgttttactattaggctctgaatctttctaaaatgttgtatgaagcctcttttgacactgctctagtgaggaggagagggacattgtctccttacttgcaggtgggggtagaagtccaggttacctacttggccttcagtgatactccatgggtgaggtgctccttggtctttctgggcagaggtaggaatttgatttctgcactaggcctctgctgatgccactctggcttggaggggtttggatttgacaccgtgccaggagygctcatggccatctggcaggtatggaagtcttgggtcctctcttgagcttctctcatgctgccctagtggaggagttgggggatcacattacaacagaacagtgggcaagcctagcttccttatttggccttggcaggagtgagtgaggctgaggccacaggctttttctgggatgtgtggctggaatcgggtgattattgtctgaagtgttctgttgtgtgaggctgccactttcttgtgtctttacctagagagaatcagcctttgttgggcattgctttttggtctgtacttgttggtgcttccaggttgctggctttttcagcccctattctgggttacgtgatgcaaaaagacaacccagggaaataatcttcatgtctttcctcgggtcccaaagtccctagttggtcttctccacatttcaaagcgttatgattatttcatataaatatgtaggtttattagttttacttaacttagtggatagggtaargtatgtagacttcatcttctcagaagcaaatgtccaaaaaagaggtaattgtatgcttgggtatcataataaatcatatctaaaagggaagacgaggccaaggctgagtctgtaatcagtagaggagcagcagccactcacatggcaggatgtagaaaaatgtttggtgattcttgtggcttagacaatgtttatgctttgtctctgtttagataaagtggtcttcttttggtcttgatatatcagggtcacaaaatatccttgtctgatgatgatgttctgtgaaaattttatgctcaaaaggaaaacaccaagtctatctgtgagtgccaggccaggtctcagcagcaccaagccctggcccattgcaccagtccatagcccagatgcaggaggctgctgtcctctttcccacagacacggtcactctcagatttcctctcatcagtatccccctcatggctagttagtgcttacattattagtttttcattgttaggttctataaatgccaagttatcttttaaaattctgttttccaaggttgttttgcactggtttatatttaagtgaattcagtgattactgtgcttcytgatataatacttccttcctctctgagttcttaacttgggtgggatttatttttaagtaatttctcttacgaaagactcacgggtgctgtattccagaatttgtttccttttgagaatgtctgcccatgtattgattctttaattataccttgactgagtcacagtgtctttcccgcaatatcttatagacattgttctagtgtcttcagaccttgattatcgttttggagaacttggaggccaaactcatgctttcgccttggaaaaaatttgccttattttactgaatgcctaaatttctttattcttaaatgagaaaattttattttaaaaaagcttaaatgtgaaaatgactcggagttcagaaaagtatgtattattttaattggcagatttggtgttcctatttctttgattagggtagagttttatgtatgatattttttgatatgttgtgtgtttcatatgagtgtttcctaccctatgaacaccaggtaatttagattggattgcctttctggctttcatatttttgtcttacttctaatggctttaattccattttcccctgtgtgtgctacattcaccatgatttcttccaggtccatcattgaaacttcaccattgtttcttcattcctcaatgtttctgacaaaggtaatcatctgcaacaggtttttgattcyaagtttgtttacttaggtctgcaatcagcatatcctgtttgtctcattctgttgtttcattttaaattatttttataaattattcatttcttttcttatgctactgtgtgaataaactcagggaagtcactttccttttctctgagttgtgttttcttaggatttatgtcttgatttgtcatatatgtgatatgcctatccatgttcccttccttctgtttctttccttctccctctttctttcttcttccttccctccaccacctggcatggagtgtctgttcctttcttccctcagactgtgagactagtgtttgctgcttttacgctacactttgcatttccatagctagtctggcttctcgggagaaggctgggaactctcctctctgcttctaaattatttgtttctttctgattttaaagctttgtgattgattgtaacatttgtttttattttcttctgcataacattttctcctttacttctttggtcattgtgtgtgacgtccaactccaattccattagatgtgggttcatcttttttttaaattaattaatttattttttgagacaaagttccattctgtctcccaggctggagtgcagtggcgtgatgtcggctcactgcaacctctgcctcccaggttcaagcaattttcccgccccagcctcctgctgggactacaggtgcacgccaccatgcctggctaactttttgtgtttttagtagagacagggtttcaccgtgaggccaggctatttgaggccaggctggtctcaaactcctgacctcaggtaatccacccacctcagcctcccaaagtgctgagattacaggtgtgagccaccacgcccggccagatgtgggttcatctttgactccaacttcctggaaagctgaatcataagtcttatcagaaagatggcagctttacagttttcacggtgatcactgtgactgtccgccactctgtccagaaggcttgtctctgactcccacgacaagcatcaccttttctgtgatgtggctgcgcttagtccagcctttggctgtaatgtgggaagaagatatctgctcatcagtactttctcacggagcagacctcgtcagttgcagtggtgctaagggcggtgttttcggcatcccaagataaccaacctcatatgccttggggtatgcatttgtcatattgataattacaaattaaaacagttcttagaatgttcaggatttaatttgatacaaagatataagactaattctaggatattgaaaactcagatcaatgaagtggttctttgttcttattctaagcacttatcgatctcagacaaaaaattccccaggagtctcaggaaacaaaacacagtgcatggggagattggcctcctgacgccctcctgtccattcagatctcccattattgaaacaatagcgccacatagcaagacaaatcactaactataaacaatgcagtccctggcaagaggacactcaatttaaaaaaagtccagccccagtctgaggattaggcttgcatttgttttcagcagccaactcccttttgatataaagctattgttttaatggaaatgtttatgtcggagtaagaggcagtacagttctgagaatatttgataagccataagcatgagcatcaattaagctcgtagctcttattgaaggaattcaatacaaatcataaatttcactcacctcattctgaaaagcctgaaaagtgtcacacaatgtctacracttcagcacattttaaaagcaaagctaacacgtgctggtacttcccatggcttaggccctgttctgggggccgaggaaagcccacaggcagaattctccataagcagatgtggatggggagcctgagctcaccccaggagtcaagaaagagaccttgaaactgagacccaaaggatgggaggagcttgccaggcaaaggctgcctcggacctggtggaacaggtgactctgggcagctgggctgcttgagagccaagtcccctggcagaggatgcacagtgtgtccccgctgcaaaaagagggtcagtgtctggaacacacagagcaaggaggcatggaagagcagcactcagagaagcaagctcatttctctctgtgtggggagtggactttacgttatcagctgatttgagctgggcagagagtgaccaggaaatgaacacgagggaactgaatgcagggaattcaaggctgaactgaagggcagggaagacrggggatagtgagataccccagagatgataaaggatggaagcaccctcatgcccagcctggtaggacagaggcagcaggcactgttgctagaggcccggttcacagcagctcccagaagccaagacagcacccgacacacagcccgaggcagaaggggaggagaaccgccctgacttccctcctgctccacgctgtcagctacgtttcccaccgcgactccaccgcgacttccyttagccatgcactggggagctgcagaaacagccgcacctgtcaaccttcgaaaggtacagagtggtgcaagagagaggtgaggaatggatctgtgggcaaaggcccagcaccagccagacgttacgtaaacgtgctaaataaagcaggcccttatattcccagcccctaagacgcctttcctgttgggatcttccctaagccccacctgctaatttagtcctaaaaatgtatccagcctactccatgttctcatttatttttattttaggatacattcccctgttgtatcagttaagtgagtgcaaactttgcagtgttcagtaccacagtctgatcatctgcattcatcatatcactaagtttctaatatttttagtgacctgcaggtgtaatttgtatttgctgttaaaaaaaaaaaattaatccaggaatcttatataagggggaatggaaaggtaaaagatgacgttagatttagcctggggaggctgtctgagaaaaataggaagtaacgtatgttttttttttttttttttgagacggagtctcactctgtccccaggctggagtgcagtggcgcgatctcggytcactgcaagctcctcctcccgggttcacaccattctcctgcctcagcctcccgagtagctgggactacaggcgcccgccaccacgcccagcaaattttttgtatttttagtagagacagggtttcaccrtgttaaccaggatggtctcgatctcctgacctcgtgatctgcccaccttggcctcccaaagtgctaggattacaggcgtgagccaccgtgcccggccaaagtaatgtatgtttctaaatgttgaaatgggtggtagaagcagattaacacctttgtccctgaagagcacagacatcaaccacagtgatgtaaccagaacagactcttttctaagcaagctctacaagtcttcctggaatattccctgcagatagttatgggacgaaacgagcatcaggttagtcttcgaggctgccttttagagcctcaatgtcagtcacctcagagatgttttaagcccttctcccagatataataagttccattccaaatgaggctcagtctcctgcaatctactgcatttaagtcaggtctcctaactgacagctcatctctcactcttgagttgaatggattccatcacccatgaaaaatcctgaagccttaggacacacgatctgagcggatttatacaaaggaaaatatgcttatgaaacatctyagcctggctctcctcatcttctgcatccttcaggtatttatagctgagtccaagttctgtctcgtttggttgtgtgcaagcacctttgaacacttagggatgagaaacaaagagttttcatttcaggtacacctctggtttgtcatattggaatcacctacaagcaggagaagagtgtgggatgygatattgagacaatgacagcttttaggggacagcacttgcttccttccccatgagtcttgcayacccatgttgaagcattctcamacattggctatcagggatctcaacccataggggccaagtaacaaggtgagtcctcccaggactgaagccacaatcactagcatcagaacactctaaaagtaaggtcaagctcaaggtaggagagtgtgtaatgtgtagacaataaaaattagatggcttaggtcaaagaagctaatcaaatttaacatgaagtctaaattacaaccatggatcatgttaactaagtttattttcattcagtgtttgtattcaatatcattgttattcaatgaataatactttgtagcttatattttgatttattgtttgatccataggctgtttaatgattttatttaaaaatgattttatattgaaatttagttgtaagaaaaaatactgagatcccatgcatccttattcatttgccccagtggtaattgtagctggaaaaacacacactcaaagtgctttatcstattccctcactcaacagcaacaatcaatacagatttctgtgaccaaatgtgtggcttttttccccakatctgaagtgtgcaatcagttctgcaggggacaccagctgggtgtccacctattcaattctaacactctccacctggagatagcatcaaatcctaaaggttgagggctctgtccttaaaaccaccccacacttaagacaccagtcccaagtctaggtctccagagcttctgaccaacgggcttcaagttggggttctcacaaccccctctttggrtttgatcaattttctggaatggctcacagaactcagggaaatacttrtttcagattactaatttattacaaaggatatttaacaggatacaaataaccaggctgatgaagagatacgtagggcgaggtctggaagggtctcagggcaggagcttccctccccatggagttggggtgcgccacctgcatccgcacatgggtgagttctcgttccygttcctgccagcctccacatgttcggccatctggaagtgctcagaacyctgtcctttggggcctcttacagagactttattacataggcatggctggttaaaccgatggccattggtgatcaacttaactttcagctttctcctctccctagaggttggggagtgaggctgaaagtcccagccttctaatcctgccttggtctttcaagtgaccagctccatcctgaaggtgcctagaggctgccagccatcagtcaattattagcacacaaaacaggcatcacctgggagatgccaaggatttctggagttgcatgacagaaaatggggatgaagccaaatatatatttcacaatgttatagtaatgctttggggaaaagcggaccaccacaaccataatacaggcatgaatccagtcaagatacaaaacatttcgatcaccacatgggcctctcattgagaccttttataccacacccactttgctcccaccttcacaccctctttaactctctgcaacccctaatctgctctccatttcaggaatcctgtatcagtggaatcatataaaatggaacttttggatttggcttttttttccctttttttcactcagcataatcttctggagatttgtccaagttattgagtgtacaataatttggcttatcccaaggctcagaatacagtctatttgatgtgcacataccaagaatgtgtactctgctgacattgggtagagtgttctataaatgcaaattagctcaagttgattgctagtgttgttcaaatcttttgtgttctcasttatttcctgtctgcatgttcaagcatttattgagagagaagtactgaaatcactaagcataattgtagattcatctatttctccttgcaattctgtccatttttatttcatgaatttggaagctctattattaggtgcatgaatgtttagggtgattttttatcttgtggcactgaccctttttcattaggaaatgaatttctttatctgttgtggtgttctttgctttaaaatctacttccagattaatataggctcttgagcttcctttgattattattaccacagtaaaacttttatttaatccttttacttttaatctattattgtctttattattaaactttttttcttataggtaacctgtagttgggtcttgcttatatatccaaattgaaaaactatgacttaatttgggtatttgcacaatttaaatttgatgtaattattgacacttttggttttaatctgtgatcctccttttttgttctatttctcctctttttctcatcttttgttctttttctcctctacttctcgtctattttttgttcacatttttcctcttcttctaccttctttcatattgattgaacatattttatgatgccattttatcttcgtagttaccttttgagataaaactttttgacttgttattttagcagtttattttagagcttattgtatacatcttgaacttaccacagggtacccttaaatattttgccactttatgtatgatgtaagaattttacaagagtacacttatatttctccattcccaaactttgtgctattgtgattatacattttacttttgcatatgttaaatatcatattacatagttactatttttgttaaagagatttaaataggatgaaaataaactttatttccctatgtagttaccatttccgggactgacatttcattggtgtggatccagatttccatttggtgtctttttttttcttcccccaccaccgccccaacaaagatttcctctaacatttattgtagtgtgggtttgctagtgatcaattcagctttcatgtctaggaaagtctttattttgccttcattctttgaacatatatttgctgagtataagcttacaagttaacaggtttttaaaaatttctcctttgaaataatttttgatttacaagagaatttatttacattttgctcactttcccttcatgttaatattttactttgccatagcgaggttatcaaaactaaaaaattaacatagccacaatactcttagctaaactacagtctctattcagacttgaccagtttttccactaacgtattttttctgttctaggatccaattattgataccacgttgcttttagttttcacatctctttagtctcttcaaatctatgataatttgttttttttatgaccttgacacttttggtcactactggtgaaatattttgtagaatgtcctcaacttggtcttgtctgttttctcatgttagacacttctcattgtatcacatagggattacatgatgccaatataacttattactggtgatgttaaccttgatcacttggttaaagtgctgtctgccagatttccccactgtaaagttacaatattttctttgcaattttctacttgttagtactgagccactaagtytagcctgtaatcaattaaggagataatattagctgtagtatttctgtagatgttctttattggttaatgatgttcctttctattcccagtttgctagaagcttttaattataaatggatgtttcaatttatcaaaaaatttgtttacattttctgaataattgtgtttcctctttagtgtgttaatatgttgagttacattgattgatttttgaatgtcaccagccttgtattcctgtcatgtggtgtgtgtgtgtttagttagattcaatttgctattattctgttggtgatttttgtgtctacattaattaagtatattagcctgtggttttcagaaaatacctgtgtctggttttgctattaaggcctaatagagtaagttgggtatagttcccttttattcaattttctgagaaaaaagattacatagaattggtgctatttctttcttagatccttggtataatttgctagtgaagccttctgtgatttgaatggtatttttagaaagattaaaatgtaacttaatagatataggtttattcaggttatttatttcttcttgagtgagtcttaatagtttgtgtttttcaggggatatgttcatttcacctaagctgtagaattattggcatagtgttatgcattcagcattgttcccttaccwtcccgtaatgttgccccactaccttcattcctgatattggtaatttgtgtcttatctctttctcttgctcggactgtctagaggtttatcagttgcaatggggagaattctaaaatggcctccaggatttcccacctgctacataatctttcacactgtgaacttgatggatttgactcccatgactaagttatttatatgagacagttgaatttaagacatggaaattatctgggtgggctttaattgattatacaagccctttacaaatggagtcttctgtgactggttccagaaggggaactcagagagttgaggcaccagaagaattggatatggtcttgctggcttaaawaagaacgctgccatatggaaaggaaagggggagctgagtgcaaccactggccaacagacagtggagaaacaagggactcaatcttgtagccacagggagctgaattctgccaaaacctgaatgatattagaaggagatttttccctagagcccccagaaaagaatgcagccctgctggtatatggatttcacccttttgtgaccctaaggagagaatgcagtaatatcatgcctggatgactgacccatggaattgtgacataataatgagtgttttcttaaaacactacatctgcaatcaattgttaatgtagcagtagaaaaactaatacattaattttatttactttttgaaaaagcaacttttgggtttttttttcttttaaatttcactaacttcttttataatcttaatttttttcatttctctggttttttttcactaaagtgactattttttttctagtttcttaaggtggtagcttagattactgattcaagggtcttttattctttgcaatattgcaatataagcatttaatgctataaatgtgcatctatgcagtttttacttgtgttacacaattttcataaattgtattttaattttcagttcaaaatatttttaatttcccctgagattttcttcctgacccataaaatcctacaaatgtgttgtttaattgtaaaatatttggaaaacttctagttatctttctgttacttatttttagtttatttgtactatagtctaaggacttactttgtatgatttatattcttttaaatatgttaagttttggcccagcacgatggctcacacctgtaatcccagtatttttcaggctgaggcaggtgaaccacctgaggtcaggagttcaagaccagcctggccaaaatggtgaaaccccatatctactaaaaatacaaaaattagccaggcgtggtggtgtgagcctgtagtctcagctactcaggaggctgaggtaggagaatggcttgaacccagcaagcagaggctgcagtgagccaagatcctaccactgcactacagcttgggtgacwgagtgagacttcatcttaaaaaataaaaataataaataaataaataaataaacaaataaatatgttaagcttcggtttgtggcccagaatatgttctattttgccgaacattytatatgtatttcagaagaatatgtattctgctgttttgttgcctggagtattatataattataaataatgtcaaactggttgatacgattgttcaagtcttccatatccttacatattttctgtttgtttgtcctttcaatcacttagaaaagattattaaattttccaactatatttatttctttgtgtctgtctcttctttcagatctgtcagtttttgcatcatatattttgaatctctgttgataagtacatacacattaaaaattatgttctgttagagaatccatccttttatcattatgtaacattcctttttattcctaaaaataacctttgttctgaagtctactctgttcaaaattcatgtaactactccagctttcttttgcttaatgttgcatggtattcctttctctattttttaacttttaacctaaatatgcctttatacttaaagtggcttttatgcagcatatagtttagtcttgatttttatccaagctgacaacctgtgtgtttcatctgggatgtttagatcattaacatataaagtgattattgataaggtcagattaaaatatacgatctcrytctcatttgtaaaaacatattccagctgttgtttcctttccctcttgctactttgattacatttaattaacaatgctccaattttgttttctgtttagacttattgtgtataacaatcttttaaaactttttagttttaaataatctgagttgacctccaaatagtattatgctgatatatatgtagtataaaaaccttttaacagtatattccctattactttcttccatctcttgtataattgctattatacatttcattttttcttatgctataaacataaaatatattgtatatttttgctttaaacagttaacttttaaagtcaatattatcaaagcataaatacactcatttattacatttccaacactcktcatttctttgcatgtatgcaagtttctgaatatattatattccatatctctgaagaacttcctttccatttctcgttgattagatcttctgccaatgaattccctcagttttttttgttttgttttgtttttgttgttgttgctgttgttgttgttgttgagatggagtctcgctccatcacccaggctggagtacagtggcgtgatctcggctcactgcaaactctgcctcccaggttcacgccattctctcaccccagcctcccgagtagctgggaccacaggcacccaccaccacacccagctaattttgtttctttgtatttttagtagagatggggtttcaccgtgttagccgggatgctttcaatctcctgacctcctgatccgcccgccttggcctcctaaagtgctgggattataggcttgagccaccgtgcccggctgaattccctcagtttttgtttttctgagaaactgtttatgtctatttcacttttggaaagtgtttttactgagtttcactgtgggtttactttttctttcagaaacttaaagattttattccattgtcttctttcttgcatgatttctgaagagaagtctgctgtgaatcttatcctttttgctcctctggtgagggaaaaagcaaaaagcaaaaatgtatctttttttcccttggctgcttccaaaatgttccctttgtatctggttttcagcacttttaatatgatatatgtagttggggggtttgttatttgtttgttttcttttgattctggctgatatttgagcctcttggatttgtactttggtgtctgtcattattttgcaaaattctcagccattatttcttcaaatatattgttttctcttcttcttttggaattcaaataatatgtatattagacagtttgttattttttcacagctcttggtttctctgtcctgattttttaactcatatttctctttttgttttagattggctaatttctactcacctatagtaaagctcactgggtctttctttggctatgataagtttactaatgtgcctatcaaaagcatgcttaacctytcttactacatttttgatttcttgtacttccattagattctttcttataatttccattgatctgctaatttccattatgctratttccattgattgaccaaatcacctctttggtcttgcatgttgcctatttctccattagagccattaacatattaaataattatttaaataccctctttcctatctggttctgttcttagtaattattttgccttttcaggctgctatttttggtttttgtatgtcccataattttatctggaagctagacatgttttatagaatagtagatactcagatacattttatgtatgcttagaaataagcatgcctttcattttgccctgcttttagtgtgagggttcttgcttatgtagttagaagttaagccaggtttgaagttgactatctgcttgactccaggtcctgtggctcagttttgactcttccccttgcacttttcccagggaacatctgtctcttgcagtcaccacctggactacactgctgttttcattctatgcttgttgcgtgtgggtggttggatcaagggatggtgagatgttatctatgtttggagtaaggctcagtcttaggcatgatttgtaaacctagttcttagagtgtgaccttcccaagtgttcctgtgccttctgcagatgtaatgatgttgggcccaacggtactgccatctctcccccaggggtagtgcttgcttgcttttctactcacatacacacagctgcagtagatttccaccattcccctgttgcaccagtttttgttgcccttccccctgtgtactgagacatttgcttcacaggggacacaatgatgtggacgtgggtggagttctcacaatgagttctgtcatcctctcccaggcggccccatggggaggctttctcaggattctcctttatcctccatttaaaaagatggtggtgttcagactcagcatttagtgatcagatagaaatttctagctgaataaagttactgaattatattatatttggtggtgcctgtaattatcctaaagtttcctccagcacctcatatgtagacaatcatattaactgattaactttttacattatatttatacctcaatttggccaagaattacttgttctaaaaactatccgttactttacrgttaaacaggattacgggcatgaagttaaaaactgattgtaataaaaattagcactttttgtttcaaaatatgtaatactttaaatatttttttcttgcagtggtcataaaagtgaatggtaaggatgtgggtataaactcaactctttatatatataaaaacacttgtgtgattcttcttttaaaaatgatgtagtgtgcgatagagaagatttttaccacacattcctctctggaaacaatagaatgccagaacacaagtgaaaagaaaaggaagaaaaaacaattatcattgactgtaggaagtaaccacaaatctgccaatacaaggaataaaaggagcaaggtaaattagtgactaaattaaaagaagcaccaaaagcgcatggaattatctacaattcttttgtaaggtgcagagttttgtaaacaatagatgggcccttcaagaaacttctgacctacctaacaccgtgtatatgtgtgtgagagctggctggggcaaggaggatgcagtctagaggagcatccctgagccgtgtcccctctgatagcgaaagggaggtgttggtgatgctgaagaagggacaggcccattccatgaattaggcaattaatacatgarttacaaaagagattagctatactgctactaaccatggaaaaggaaacactacatcactatacctacccctgtagcttataaagatctttttaaatccacactgatatactgctcaaygcaaaatcccaggaggtatgatgatgagaagattaaaagatcattgaacaaacattcacagaaggcctacaagagctcaggaagcaaagaaaacggacgaagtgtcatcacggaacttgtattctatggggtagagggaatagatgataaacaagtaaatatgyatctcatatatttcaagaggataagtgctacagagagaaacagagcagggaaaggggtaacagattcccactgttcatagatccattgtgtctccaatggcaaaccgttcttactttacacaggtagtcaataatctaatagggtcacatttggacaactgagtcagtgaggaagtaagcaacgctggagatttgtgggaggaacgttctagcaactagaaatgcaagagcaagggagcaagatcaagtgtgtgggggacagcagaagggacagtggggcaagagctgtttccttgactgggagggagcccaaaccatgaaggagtttgtagtccaagccacgctcttagtattaatctcaatgagatagaaagtccctggagtgagcttggaaaggcttgatttgacccctattttaaaaggattatgttggctgttagatagaaaataatctgcagaaggacaaattaagcaacgattacaattattattatattgcaataatattatattgtattattattattacmataatcaagtgcgatgtcattggtgcattagagtagtaaatgtggttggaatctgagcatgtttaatgcatttttatggagtaaatatataatatgaggataagagaagaagaaaggctgactgtgaggttgaaggtcagagcaactaggacagagtgaatgtttgttgagcacagtrcactgcaggtggagctgcttgttacagagcaggaggcacgagaagcaggactcacgtggcctgttgattttgaaatgcctgttatacctgtatggacacattgagatgatgcaagggtagatgagtctaaagttcccgaaagtagtcaacactatgcaaagcactgatagtatttaaactcctgcaactagttgagatcctctagaaaattaaagaatagaagggagaaggtctccaggctgagccactggcacactcacatatggaggttgtggagaagaaaagaactcacaaacagggctcagatacactgctcaagggcaaagcccaggggagtagatggccaggggctccagaaacctgctgaggcaacccatttgtgctgagttgacccctgcaggcactattcataccctagggctgacctccaaaaagtgccccctgtcaactttagttagaaatgcaaatgggacccatgcagagattccaaagaaagacaaaacgtaaaacactacaaatgctgatggaggacatgtatattaagaacattccaaacaaatacttccctatgatcttggaccaagtgaagaaaattttagctcaaaactgaagtcactcaaaagaggataaaagaaacatagacagagatgaaaagatgagaggagatatcaagcaggccaggagatatttgggggagggaaggagaagaaataaaatcataaaaaatgaaagccacggacaggcgcagtagctcatgcctgtaatcccatcactttgggaggccgaggcaagcagatcacgaggtcaggagatcgagaccatcctggctaacacggtgaaaccctgtctctactaaaaaaatacaaaaacattagccaggcgtggtggtgggcgcctgtagtcccagctactcgggaggctgaggcaggagaatggcgtgaacctgggaggcrgagcttgcagtgagccaagatggcgccagtgcactccagcctgggagacagagtaagactccgtctcaaaaaaaaagaaaaaaaaaatgaaagccacattacaagtagctgttacagaatctaacctgctgataatattgtcaggaatatgaagaacaggtttagtaataccgaggaatgcactcagtgaatagtaagaaaaaaatgatagatgtgtaaatcaaacagagtactcacaaacacataattaatgtttgtgagacgaggaaaagaataaaacaaatagracaaactgtttaaaggctgtattggaaaaaaaatcctgaaatgaaggaagacgtgaatctgccaaccaggtcccaggaaaacaggacaygagacacatgttaataaagttataacaaatcaggaagaaagaaaaaaattaaaacacgaacttaaatataaatgtaatktaatttaatttaaatacatcatccatagcaacagaaatatacatgtatcaagaactaaatctaacaaaagacttgccaaagctttatggaagtaattcaatatttcattgaaggatatgcaaattgaaatagctaaaacttcatgatgacaaaaactttttcttaactgctgtactttcaggcagctacactgattatctaaataaatgaggatgcataatttattccaatcaaaataccaacagtgtttatgaaaaatttttaaactgattctacaattttataagcacaaagaccgaagaagagccaaggcatccatggagaagaatacaaagattggcagcttctgtacttgtgaccaatgctattgtattagttttccatttcagtttaacaaattgccacaaacttagtagtttaaaacaaaacacatttatgaccttataatttctgtgaattaggtgtggcttagcggggaactttgtttaggctcttagggctgcaattaaggagttggctgagcttcagtctcatctggagacttgactgcagaagaatcaatttccaaactcaagttgtggacagaattattattcgcagctgtagagaccagaggacagtctctctcttcatgaaaggctcagtctttcttttaacatctttcacctgattaagtcagggccacccaagataatctttctttgattaacttgaaatcaacagattttgggtcttaattacatttgcaaaatttattcatctttgccgtataaagaaattcaatcaagggagttgatccattaagtgaaaccaaatcaggttttgcccacactcacgaggaaggaacaatacaactatatgactaactggggtcactttagggtgtgtctgccacagttatgctgattaagacagtgtggttatgtggcagaatcaaaatgcacacacagattcatacagatacgaacacacaaataaaagagaggtgggcctgcagatgactggaagtggcaataaatgatggtgtagccactaatcacagaattcagaaaacttgaattggagaagaagtaattgcatagaaggaaaactaggagaaaagcaaaacttgtgtaagggaacttaatggtcctgggttattaaggaacaaattctcaagaatgacacaaatggtatgaatggtaaaataaaaggttgataaatttaatttccctaaaattaggaacttcttttttaatgtttcttaatttttttgttttttttgagacggagttttgctctcgttgcccaggctggaatgcagtggcattccgagatagttctcggctcactgcaacctctgcctcccaggttcaagagattctcctgcctcagcctcctaagtagctgggattacaggcatccaccaccacacccaactaactttttgtatttttagtagagacggggtttcaccatgttggccaggtggattttgaactcctgacctcgggttatccacctaacccggcttcccaaattgctgggattacaggttgagccaccgcgaccggctggaacttctttttataaacaaatgtaataaagagaagaaaaagacaagtcacctcagggcaaacttgaagaataagatggagaacattaggctttttggctgagcattgcttgctaatctccaggcctcaggtggcttttcagagagtattaagcttaggcaattttgaaaggaaaccaggctggatgtatctgtaagttggtggggttgggaggatgggcaagagatggccatgagaaagagaggagatggagggaaataacaacgtttaaaggagactcaaaggatgtttttggtgccagagatgcaataaagaaatgtggtatctatggcatgagtaaataatggttttgaaatagtatactctgggaataatgcaattacaaaagattcacctagtccgtagaggagttggagtattgaaaatatctatatgaacttccaaacttaccaattaaatgggatgataaattcaggtgggaacatctttagagctcatacattagaaatacattctgtgaagggttttccttttttaaattttctgtgaagatctctttctgaaactcgactggacttttaaagcataagatgctatgttgctgtcaaatttcaaaacagaaacctagaatttaaaaattgtaaatttgcttatatattkggtattttattaatgtggcccacaagatgttatctagcagccggttagcattttcagaaaaaaaaaaaaacacccctaccaacttcctttttcaataataatttattatctacctactgattcattaaaataataattttgcaaacataaagtttagtaaaatgaagaaaaaggtctttaaatgtaccatgtccttgtattttacaataaactaattgtatgaagtgtgaataaagaataattttatgttctctgagaaacatggaaatatacttcaatatagagtcattaaatgatacgacaaagaaaatttgtacacttacttcctttggtgtttccaagccagattacctctgttattcctacccgtcaacctatctttcttctggggataaagccccatcttctgggaactgctcctccttccacagccagcctgggagctgccatgttcttacctgaacctgcctcagttgaagttgatttgtccaagatgggcagcaatctaatctaagccaatacaatcttctacaccactggttttatttatctgattctgacctgtctgaaattgacygtgtcagaggctttctgagaatgtgaacatggaatcactgagagcaaataaatgcatgtcagtctctctctggtggtgggaactaccagatatggaacttactaactctaaaataaatgaataartaagtaaatagaaaagccccwactagtccactgtgacgtttcaaaacatcatcctggggcaaattttatttctatgtttaatgctaaaaagcaattattgagaatggattgctatctaatgaaataaataaaacaagtatttgggattggaaataacaagtttcaggtcctgactttcctctgaatatgagctgaggaagaagtcatcttcatgggtcattctgctgcctcctccatcactgacagcatcgtgcacacctccagtcatgcgcctagcactaggactttggtgccactgcctcctccatcactgacaacatcgtgcccacctccatgcatgcgcccagcactgggactttgactagtgccgcctctatcattgccagtatcatgcactcctccacgcatgtgcccaacactgggactttgtctgaggctgcctcctccgtcattgccagtatcatgcacacctccatattgtgcccagcactgggactttgtctgatgctgcctcctccgtcattgccagtatcatgcacacctccatattgtgcatacctccagtcatgcacccaacactgggactttcactgatgctactgcctccctcctgcaaagcacccatgtctgggaaaggcagagcctcagtaggatgaccatggaagctaataaccatggatgcccgggtagacttctgaattaggcaagggagtatactgagcayaggcatggggagctcctctcaccccaggcagggagaaagcaggtggatttgctgtaataaattgtgcgtcttgtctggagttgtctttctgtttatcttgtcagtaacctgcagtggtgataaatgaaattactctttggatgttccatttggactctgcataactcctagggtgatttattgtcctttgtttttctgtatgttagcttgttkgtttattcctctagggttttgattgcaattttatgccaaaaattaatagacattaagaatcacacataattcaaatcacatttccttaggaaatgatgtaattttagcattcacattacwttaaaatatatacttgtgctcttttattgcttcaggctaatcatcctaattcctttgtactgaaatactaatttgtttaaatttttaaatgtttcttggtaaatgatatcaaagttgatgtttctatcaacaactctaaatattgctacaacagaatatttcatcctgcaaaaaattctaatttattgggagcatagttttcatctgagaccaataccatctccctgtcaatcttttaagtaaaaatgggactttgggctgggcgtggtggctcatgcctgtaatcccagcactttgggaggccaacgcaggtggatcacctgaggtcaggagttagagaccagcatgatcaacatgtgaaaccccaactctactaaaaatacaaaaaaaaaaaaaaaaaaaagaattagccagacgtggtggcacatgcctgtaatcccagctacttgaaaggctggggcaagagaattgcttgaacctggaaggcggaggttgcagtgagccaagattgtgccattgcactctagcctgggtgacaagagtgaaactctgtctcaaaaaaaaaaaaaaaaaagggacatcagtgatagtctttttcattcagcaaatattaattaatttattatggttagccaacrttggtaaacaagagagacatattctataaaccaaccagtttattggttttaagatagatattgtaccagtaattatagaaacaaatccatccaatttatgggaaggtgtcagggaagatttcctggggaagtaagtgatttttaagctaagtgagtgaataggaactatctagatgctggggaaataaaaagaagagcatgctatgcagatgggaaggaattcagaggagtgtgggaagggttttggcaagtctgaggccctgggtagacaagatgccaagagtgtagagagcacagggcaaggagtgtttaatgcagaatgatgtggaccacataaaagtgtcacagctgtgcaagggcagctaataaggagaaggctaaaatgatactagtgttttacaaagttccttttgatggcagtaggtagaatgatttagagcaaaaaggactggtcattaggagataagcttggatctatggcagaaggtggtagcttggactagatggggaaaggatttgagagcaatggatcatatagaaccattgagaagagaaaaggaggagtcagaggtggctttttggtttcctctttgaacaagtgagagatggacctgaaagaagaggaggtattggcacggggaaggtgatagttcagttctggacatggtggatttcgggcactggatgactgaatccagcaggctaaaggggtggaggattcaaatggggaggatgaggatgaggagataatctcagcaagaggtggcctagacaagaaatsaatggagatgctttggggagaaaatgtrcaatgtattaagcatgcaccctctttcaagcccccgggggatcttatggaatctctagtcacatctgcattgctcccaacttctttatggtgtggttctgctttggtagaagagagtggaatgtcaggaaatgattactcctttttgtttctgggttggcacagcttaagtcctggsttacaaaaggatcagataaayatacatacattaattaaaacaaagtgcraagttgataagcaaaacttaawgatataaataaataaaaatataaaatggttacacaagtttatgtaagatatgatagctttgttatcattggaaaagcatcccttaaaatgaccctgggtctgtttgagggttgagtttacctgttactcttgaatttaattgtacaacctatggaaggactcaagcgataatagctcatcaactcatggcctgtcgtggaagagatctgcatgtgttctcactctatccgtgaatatgttcgttttgtgccctttacactgaccgattaaatgcctggtacagccatggwtactatgaaaattaagtttaagaaaacmagcattttgatccatttcctgatttgatattgttgtagttgtgcatttttatccaagtcattcacttaacaaaataaattgtaaattattttcctgaattatttttgacccatcaaagttgtcttaattttgacaatattttattacaggtgattatgttgtcatgactatatattttgaattgagyagaagaatgggatacttcaccattcagacatacattccctgtatactgactgtggttttatcctgggtgtcattttggatcaaaaaagatgctacgccagcaagaacagcattaggtgagtttcaaaaaatctcttccacaaatttgcgtaattgtaatatagaagcattcataaaaaataccttcaatgtaaaagactatttaaatgtgaatgatctcatttgagggtgacttgaaccatgcttagaattttctctkaagaagccaagcaaggctgttctttctcacaatgggattctatgtatgccacttaaatcaagacggcgtaggagattcacagtaaatccattgtgatagtatcctgtatcacaggctgatatgatcacaaaaacacaggcacatcccagaacctgtcaactcaaaagtccccrtacgttaatgtcaggaaacagaatttgccacacacctctgaggactgaagacatagtattggtaaaaaatagttgatcaataattgaagctctgcttgtatatagcaactttatcagcaaacgagaaaatgatcattcttttcagctgtgagcacacactaaaactcagtcttttcatgaatttttctctggttcccaaaatcttcttaataaaacactaactttcagtagttttagaactgtgcaacgtgtattatgtcaggtttcctttctgacaggaattttgcttaactttcaatgttttgattttttgaaggcaggtaatatataagactgaatatagagattgttttcccctaaaaaaaatcctatagaaaagaggaagctgtctcaatttcaaatttctgcaacatctctcatatttgcattgttatttctctgtgttttttttttatttgtttgttcaagaacaaagcactgggcctgggtagaccagatgccaagagattaattagcctgtaatatcctctacctatactagatttgcatgcttatagaaaatacgtggtagaattgtaggcaaatcaacacagatttcgtgactaacccttggggttatggcttcatagttacatatattagatgtcactgtacacaagacatctaaagataagcttcaaagtgatataatatataactatgtttgtacaaattgagactatgaaaatcctacagagaatagttgttctgggctcaagacacagaagctagaatttcacggtgcagtcagataataaatttatagccagaagaattgaggaactttattaacaataagatgtttagtttagacaccaaaaagtctgtgcctagaaataaagggggtaccctagacgtcctttaatgaagcttgaaccaagcaataacaagatcaaggagaaccatcagtaaattaactgtttgtcagaagaattcaaagagcttcttaaaaagataatatagtgcagactctttacattgtaaggagttataataagaacttattagacattctaagatgtagaaaaatgttacccatgattacaaagaaagaaggattaataaaaagcaaagagaagtctattgctgactcagtaggcatggactttaacaacagctattataacaatgaagacttaaaggataatatgattttaattaatgaatagatgggttatctcatcacagaaagtatataaaaagaaattctagagtgaaatgtataatatcttgattgaaaaattcactaackagacttaagagcagattgaagatggcagaaataaaagtttatataaaattgaagaccaccagatgaaatttatctaatctgaagatcaaaggaataaaagattaaaaagaaagaagtcccagtgacctgtgatacaatatgaatatgcataacataactataactgactataactgaggtgatagttaaaagcagaataagaagagaaaaagaatgaggacaaatatttttgaaaacaagtggttaagaaattccaatgtttggtgaaaaacatcagcctacaaattcaaatagcttagtgagatacaagtaagataaatacgaagaaaaccatcatagtccaaatgatgacaatcaaaaataaagagaatacttgaaagtagataaataaaaatgtcctgtcatgtggatgagcaaaaatatgactgactgattcttcatgtgcaataacggagaccagaagatagtcagttgccatctttaaagtactgaaattctatatccagagaaaatatacttcaaaaatttcatcagaatgaagatttttttagataaayaaaatctgtgctaatttatcacagaaaatctaaaaccatagtgaaaattctaaagcaagctaattaggttaatagaaataatcaatagaaaaatggatttacaagaagtaatgaaaaacatcagaaatggtaagtrtgcggtgaagtttaaaaaaaactagttttctatttttattctttcaattaaagtgaaaataataatattgcaagatgggacttatgacatcagaaaaaataaaatgtaagccataaatagcaatgaggttgggggacatatggaactatgttcctatgtggtataaaaatgggtgaartaattctaaaaaaattctaagtagatatattaagaaatcttattgtaatctgttaaaaatgtatgaaaatatartaaaaagcatagctaagaattcaatgtagaaataaataggagcatataataataataaaagggtaaattcaacagaaagacaaaacattcataaatgtgcctgtgcctagtattagagcttcatattaaaagcaacaaaaacygagaagaggataaatttttaaaatcaatcacagtttgatatttaaatatacttctatcagcagtgtacacaaacaagcacatttgtccacttatttaagtgattaaaccagtcaacaaccaaaaagccagtaaaggaatggaggatctgaacaccaatatcaatgtcyttgagctattggatattacagaactctgcacctaataattacatcatgaaagtgaatttcaatatccacctcctgccatacacaaaaaattacttaaaatggattatactcaaatggtaaaactagaaatgttaaatttctagaaaaatgttaggattatattagattagataaagatttctcagaccagaaagkgaatcttaggtgaggaaaactttaaaacatttctgacatgaaaacacacttgaatagatatttcatgttattagataaaaagaaacatcatgaagatttgtggttttgtatttatataaaataaatacatttttacaatgaatagcatctttctcctctttttatgcatttgatatrcagaaattttaatttaatttattagtctttatattaatatttttgttctaaatatgttgtaaatatgactactttaaagattttctatataatattttagtctgataaaattataccagaaatgtccaggatacaataaaatatcactcatcatatcaaaaagaaaatgccaaaatcaagatgacacagttgttagaattatctgactaggattttaaaataatcagtcataaatgtgcttcaatgagcgaatgcacacatgcttcaactaaatgaaaaaayagaaaagctccacaaagaaatagaggatataaagaagaactcaatgaaatttttagaactgaaaaatacaatgccaaaatgaaaaactcactggatgtgcttaacaaaagaagataagacagaggaaagaatcagtgaaccatgagatagaacaacaaaaatttaccaatctgagcaacagagagggaatatattgaaaaaaataataatcaactgagtttagggatatcttcaaatgttgacacaaatattggagagggaaatgatccaacatttgtgtcaytgragttccagaaaaagagaaatagaatggggctaaaaaaaatattcaaagaaacaatggataaaaaatactcaaatttgccaaaaggcataaatctagagatccaagaagctgaattaatcccaaataggttaaatccaaagaatgttaggtaaagacacatcataatcaaactcttaaaaactgaagaaaaattattaagagtagcaaagmaaygtcrccttgcctatatagaaaaaacaaattgaatgacaatggatttctcatccaaaccatggaggcaaggaggaagtagcacagcattttttaatgctgaatggaaataatagtcaacccagaattctatacccaatgagagtatcatttaagaataaaggagaaatccattctcggacaaagaagaacaaagagaatttgtcactagcagatgtcccctaaaatgatggctaatggaatttcttgaaatagaaaatgatgagaagaaatttttaacaaaagaaataaagaaaaaatacaaaaagtgaaaatatgggcaagtaaaatggactttcctttgccttttgagttttctaaattacttataatggttgaagcaaaaaatcataatgctacttgatgtaattactaaactaattaaaggaaatatttaagacaattatattaaaatcaaggaagagtaaggggaaataaagtttctacatttcagtcacattggtaaaatgttaaatatgmtaaattatgtatttataatactggaggaaccactaaaaaggctacaaagagtgacaygcctcaaaaacactgtaggtaaagcaaaatcaagttctaaaatatgttgagataacccatgggaaggcaggaaaaagaaaacaatatattataaaggaacaaacaaacaggaaacacaatataaaatgggatagttacatcttaaatattaataactacattcaatgtaaattgctggaacgtaccagtaaaaaagcagaaattagcagagaggattaaaaaaataaagcatgatycaactacaatgtgtctccaagaaagtcacttgaaataggatgacattrttacactgacatgaatgttcatgtaatcaccaggaactggaaagaaccaaaatatcccgcaacaagtgaaaggctaacgaaactatggaacacccaaaccatgaaatactactcagcagtaggaaagaacaaactatcratgaagcagcagtttaaatgtgtcaagggcattgtgctgaatgaaaaaaaaacaaagccaatatcaaaatgtgttattttagtttgtgtttaaattaggaggtttacttctgactgcagtaagatgccaggatttatattcactcatccctccaaagtcaagaagaaagttgttctaggattctgtgagaccagaatcatccccaaagcatcctatatgtactagactcagctgagataaccttcctgaastcctttgtgctttccccaaagaggaagtcatgccaacaggtgtttttgcagagcactcttctttactaggtagcttagatccctgaactaaatagaaatgcctaaggtttattwttcttcagcagggtgaagtttcagggtgggggtggaagtggggaggataaagcrcacggccattgyctacatctggaatacaggccactcatgacaactgatggacaaggtctatggaaattacagacacaaacagtttgtatttctattgaaatagaagctaagattttgaacttcttcttagacatgatgtggtcacatttttaaaagctgaattggatgtttattaaaagaggataatggcttccagcttcatccatgtccctgcaaaggacatgatctcattctttttttggctgcatagtattccctgggrgagaacattagggaaaagagctaatgcatgctgggcttaatacctaggtgatgggttgataggtgcagcaaaccaccatggcacatgtttatgtaataaacatgyacattctgcacatgttccatagaacttaaaaaagtaaataaaataaaataatttttttctaaagagctttttccataaaactacatctgacataagtatagacttttccagtttacatagcgtttttacatgaaattttaccacctatattaaagagtgcctggcattctattttcactgcacaagttaaggaaactgattcaaagatggtaagtgactcctcatggccaaatgctgagaaggcccagagcaaggtggagggcttggattttcaggtgatactctttacacctctacaagctgtccaccccatgctttgagacccattctccacctggccctggcagaactgccttgagyagatgcagggaggaattaaacagaggccgtgatgctgcagcaaaggtggaaagtaatgtgtcctcatctgtcctgtgtacctactctctgactagtactgcratgcagatattttactgtagtcccattgagctacagaggtggtgactsttaaaattcagattcctgtgattctggggcccatgaatctggggtcactaaccttccctgtctagtagtcctgacaggtcctgatttcttgggaagactcgggagagtcagtcttagcctgtttcacatgataatcactcttcttcattttattcttatgttcaatagtctccatgtcttttttcatgttttcccttctaagctatccatctcgtgtgtgtctgtgtctcttttctgaatgttttccacaatatttgcttaaacatccagtgttgacycatgcatataaaatagtckaagtcaaaccaacattgagtattaccaattaattgattcattcgatgcaaatcattcatttaaatgcctcaaatgtgctagcgtctgtgctgggggacargcaaacaaagacaagtaagggactgtttttgtcttaaagaccacacaatctatctaggagacaggtatgtaaagacatatgcgattccctgtgataatgaaaacaaaaaaagctgagatagtagaaggtacagggatactgcagatgtgcatgttgtcagctctgcgtggaaggcaagagtggtgctggagccgggtcttcaagaatagtgagggttttcaaactggggaggtgaggagaagtcagaaataaaaggatttagctgggcagaaatgtgaggtgtggaacagcacggaacatataggactgccaaaaagagcgtctacgttaaaaattaccaacaatgagcgaattactgaatgaattgaaaggtgttgatttgattcaggcactttaatgttattgtgaagactataataagaaatttcattgaaacattgcttataaaattgtatggacattaaaattcaaagtaacattacatgaggtatgcagcatcagggattcctgtaaggcagccgtgctggggtggagkgatgtgggtgaccgtctgggattcctgttgcgtgttgcacccttttacaacatgctacccgtcccctgttcaggcatcaccacggtgctgaccatgaccaccctgagcaccatcgccaggaagtccttgccacgcgtgtcctacgtgaccgccatggacctttttgtgacygtgtgcttcctgtttgtcttcgccgcgctgatggagtatgccaccctcaactactattccagctgtagaaaaccaaccaccacgaagaagrcaacatcggtgagctgcagtagcaaaggttctccgggaggtaatgggggcgctgtttgagatgagtgtgtacttaaatgcagttgtattcctaaggatcgtacaaagcatgatacaaatacccarttcaacaagacttttcaaaaccagacagggattctgaagatgtgaatgtgactctaagacatctctggtgtcacctaccggtgacgtggcttggtttagtcataccctaaagattgctcttaagagtgatcttggatgcaaatgttcatgacagtttcctagttattttttcttcttttcttgtagttactacatccagattcctcaagatggattcctgagcgaataagcctacaagccccttccgtacgtatagcattgcaggtgccaatatttctgagaactttcactaaactaagattgcatttgaaagatagattgctgttgatgcatgcatgtattgaagaccaatgagtgatgcacatgctgacttcaaaaatgtgtttagtattaggttaaaaatccaactttgacaatttggaaattagaggagaaaagtaatcataatccttctacatggggattagtgtatggcatatatagttctgactcttttagccattcaaataatataggttcatgcattttagcaaaactgaattatgatctttatattgttttatagcctcttttataactcaaaaatatgtacttatatgtacttaagttttgtgccacaaatattattttataggatcattttaatgaccatatcatatgctcatgattgatgcacaagcaatcttggcaggacactgggcttatccacatttttcacttgcatttacattcttttcactaccaatttgtatatacctgtgactatttatttggttataaattcctaggagcagaatgtttgggcagaggcgttgcatggtctttgccaaatagcactccaccagctccatcagcaatgccagacacctcatcccgaactttccctgcattcagtttgrtagtcacgcaggaaaatgagctctgcaaacttttcccattggcatttctttgactattgactattgtcactcgtttatttttgatttgcatttccatttttgggaattgcttttaaatattttttaactttcattagtattttaaggtagcaatctgacagtggtgtatatgttacatattatataaattgtattttataaaatatataatttatatagtcacatataggatatattcatgatattaatgtttgtcatgtggtttttattccaacttgaattggcaacattgccactatcctattttgtgcctttctctatgtgtattattttgtttcatgtggtcaaatctgttagtgttttcttttgtagtttctgcttcttgtgttctgctttggaaggtccttcctaccctcaaaatgacatgaccaccctcactttcttttgagcactatgcttgacattatgttctctgtgttttcatgtatcaactcactttattctcacaacaaacctttctacaaatgaggaaattaaagtgtggataaattaagccctataaatattgaccaaggtttgacaatttaaaaacaaatttgttacatttaactattaacaagtccgaatttcttttggctagagggtagagtgtagctttactgaaaaatcgagaaacatatttttaaattaatgatgtgaacaacttttatcatataacaacttttatttacaataatgacttttattcctttatacatatgtatactaattacaatttactaattaaatcgaatgtttcaagccccccataagccgcaggtggtttcctacttgctaatcaggacctcatatgcagtgccaggtggtttgctacttgttaatcgggacctcatatgcagcgcacttccagcccattgtcaggagactacatagttatctgcactctgcaagtgtggatcgtgatagttcttccagaacgttagtgggcaaatcactgttacagctgcggggagctacagagaacataacagattttgccaacaaatgcttccaagtggcgtgggaccaaaacagaggggagaggggaagggtgcacatcatcacacatagccagcacctgggtgttgaaagaaggagagaaacattgacctctttagtacagaaatgatgctgccaaaagaagaaaaaaatcctttaacacagacagaaaaagatattatcacaaaatgagcagaaaattaaaaaaaaaaaaaaaagagaaagtgggaaagtttaatgaccttaaaggaagtacaaagaaaaataattcacagacagaaagggtgccaggcctggtgagaagacacaaccagagagacctgtagcaagaataatgctaagccaaagaaaaaggaagtctgtcctccggtctgcagccttatgctagtgaaggagccaccgttaccaatagaaagaagcagaaattggcagcctctgagtaatgagggacaggggccagactccgtgaactgtcacatgtgtggcctggggcaagctgttccaattgctctgtgcccctttcctaacatgtcaaatgcaaggctgaggaacttcacatgtgcccaggaagcacggtgctctgggacactcacggggctgcgctatacacacacacaaaagaggagggagtcagggacccarctgggccaaagaggactttgggaatcgttaattaaaatctctatcttgggtacagtttgaaattttcatgacaaatgaaaaggaggcaagtaaagaagttcttaagctgtttagggctcttaacatcttacgttttgcttcagtcttataaaatggaatttgtttcatttcgaagcagtgaactatgaagacataataagagctattttcaatattgtaaatatgatatccaggtgttttttggctccctaaatgaagtgaaatggaggtttctcttgctccagaagccatcctgctgccctgcctgtggcctccaagggttgccctttagatctctggtgagccatccccgcatcagcagagccttctgcctccccgtctaagtcagaatcttcctgtgtggctgccttaccttgcaaatggccagacttctcctctgtgtctccggtagctcccagttccatccacatagcaagggactacacagaggcatgaagcaacgagtggatgaatgtctggctgatcactgtcaaagcacacgtgtaggaaacctttattgcaattgttygttaataaaggcagatctttcaaccggaggttgtcaaaaggaggcagatcccttcaatgcagtggggtagaggaagggaactgctatgttttagcaaatgcttggcgatgtttacacccactcgggacaaagaacattaacctagaagagatgtgtccacattaggcccatagacacagcgggacttttatttctgcctactcatcaggattgtggaggaggaggagggtgggcagccgcaccgtgaggccccaatggtagcagagggagatggccacacgtgtgaggagcaagcaacaccctgtgaacatgtggtccaggccatcctgctaatttaggtctgtcctcacacacagatgcttcgcatttacaagaacgcaccaaaggctgcaagtcctgaatctgagtgcctgatcaacacttccacccctccccgatttatgaccccatgactatgagcatgtccaatcaaattgaggcccaaaagtaggagggaaagcagtgccatgtcttcttggaatcgtatttttggatgaaagtataagaggttgttacgatgctttctaatgaattctgaatggcctctgtcccagcagtgtgccacacccaggcaaaggcccttgccaggaagcccactgagaagggttccctctccacctcctccttggtgtcaccctccatggctgccattggcatcccatctcagatcaaccagcacagatgaaaccaaagcagaaaggcaaacatgctttttagttcccttccattattcagtccaatttagaaacgtatccccttaacagaattcaatgtagtgcacacttcatagttttttagaagagctcagcctctgtctgaagaattgacaagtctatttgcagccatgtctcagggttaggaatgattcttctcatttaggagtgaatagtatgttgttctctctcctttatctgccccacttggacttttccactgcaggaggagggcttgggaggtagaaaagcaagcattgtaggtgggcacatttttggttatgcttcttgagatggtaagcggtgtccagccacctcacactgaaagctcactgtcaccagaatcacatgggacatgaggatcctctcatcattcctgcaagtcatagcttttactcttcactaattagaaaaaagtaacatatttgtctctccccacttcaatatacatactgtttcacatttaagggataaatatatgtccatacttactacaaaaccacagaaaagtaggcagaatagggacttcaaatgactaatacacatttgaaaatatgcttaaccttcttcattaataatccgggaaatacaagatttgaaactgcaatgcaattttccttgcattagaattgcaaggattgaaaagaccaggggtctcctctctcagctttggagtccccctccctctgcctctatacagggaagcttcctcctttcttccttctttcttctcttcttccttccttcttgcctattaaactctctgctccttaaaaccaaaaaaaaaaaaaaaaaaaagaccaactctctccagcatggggggawgggcacacccacgcatcctctttatctayaggagacagatgtaatatggacctactgcttcatacacctcagggtgtttttattgcattttacaatggttgttgtgtcatttttgttgcttgcagaactaytccctcctggacatgaggccaccaccaactgcgatgatcactttaaacaattccgtttactggcaggaatttgaagatacctgtgtctatgagtgtctggatggsaaagactgtcagagcttcttctgctgctatgaagaatgtaaatcaggatcctggaggaaagggcgtattcacatagacatcttggagctggactcgtactcccgggtctttttccccacrtccttcctgctctttaacctggtctactgggttggatacctgtatctctaagtgttgctcagagtgaagagtgaagagcatttggtacacacttgaccttctgtcgtccccagaccagtagtgaccaatcgggagtagcaaggaaggacactgcccagtgtatcttgttataaatgacctttcagcaacacaggaagtacccagcaaaggtttctattatgtattttacacacacacatacatacacacacacagctaattgagttttaaagtaatattcttgctaatccctactgaattgtagcttggtgttgtttctgaatggtttttggatattggaagcagccgctgattacccttgcaaagaaatctgtaaaatgtgcacgtgaatgtctgagatgctctctcaggcctctagtccttctgtatctttcctttgcagccctgggtgtagtagcactcaggagtgttgaatcacccctggccgagacccactcctgctggctcagcctgggcatgtgtgtgctccagtgtgaacagcagtgggttccaaccccagtctcctttctctgtggcctctctggctccagcaccatcatcgttagctggcactcctttacctaataacctcgttctaggcctggggagagtacactcgcattgtctacggtttccattggaggagaaaataagattttcaaaatgctcatgttgttggggtcaaagatgattatctctgaacatcagaaggttattactttattccaacttactgagagtcaacaatatttgaactttgggttcttggactagttcaacagcatttcaccttaagagctgtttttcactagaccaacgctcaaccctcgagtatgtgtccagcttatgttatattattatgggttcggtaattgtcattttgcaaagaaaggtatacagtgaacacaacctgttatcttgaagacatacaccggaatgtgaaagacatgtagataaaattttatttttattttatttttttgagacagagtcatgctctgtcacctggccaggctggagtgcagtggcacaatcttagctcactgcaacctctgcctcccatgttcaagcgattttcctgcctcagtttcccaagtggctgggactacaggtgtgcgctaccacacccggctaatttttgtatttttgttttttgttttttgggtttttttagtagagacggggtttcaccatgttggcctggctggtctcgaactcctgacctcaggtgatctgcccgcctcagcctcccaaagtgctaggattacaggcatgagccaccatgcccggccaaaattaaaaaaaaaaaattagtgaatattaattttcaactcaaaccaactttagatgcaaaaaaatgggcaatggtgatcatcaagtacatattttgatgaacaagattattttatactttgaaatatggatacatagcaaaatcccaaagaaaaaatatccccccaaatcaatactcttttgatatttttataatacaaaaccaacttgctgcttgctgttagttctttgttataactggatgccaatgtgaactgcagaagactgttttgaaacttctcctcaccaataggcaaaacacaagtcctaccagttagttaataatgctttggcattgttaaaatttgaaaccagaatctctgtgcttctcatctttctcacatagaaaactgaattaatttgacctagaaaccgtaatttttaaaattatctattgtgcataccataattacccagaaacgtaaaatattttgcagagaaagtatagaaaagtatcaatttcacacaatgtcctggatgtataccagacacagaagaggatgggagcagaagaggccagaaaaagtgaaattagattcatctgcttattcctattaagattgttgcatattaaacggatgcaaagatatagatatgtctgaatttccaaagatggagtctatacagcgtgagacattcaaacccattgtttctctccctgtcaactctctgtcttttggtttggtagttgctacataatccacaagccaattggcttcagtttagcaaattcagttttaaaaataaaagagtatttgtggagaaacaggttgaaaatattgtcttagatgcaatgtctcctctattggagaatttcacactctggtactctagttctgtctctcatgcataagcaacccccgccttggcagaagtattctgcaaggaccctgaccaaaggaatccaagtcacaccacagcactgagcgccaagggaaggtggcccaagggcagtcttaagacacaatgtcaaacgttatgaatgggtaatttctaacaagctgaagaactgcaacctgctacattgtaaacgaagttctggagagaactgaattttctagaaaaattcttattgggaggaaaataacctaaaacaactttttataacatggatttgtttgattttaccttaaaagaattttactgatgccttgtgtttcaaaaccactcaacatttggatattgttagcaaccctcctgaaattttacatgtaggataaatacaccaataacctcagttttctgaatccagccattctcttcttcccaacctcagcagccctcctgatcaaaacagatgagttcagcgctccttttctaggaaggagaaccttcatctcaagaaagtccaatggatttcactaactgagcatcatagtgtggattcctgcatatacagcaggctccccactagggggtctcaataaaaagagctaaagcaccccctaagagcatgtccatgccgggttctccgcaggcttgcataattcaagttctccatatcagtctcaactcctgagatgagccttttcagtccacaatgaggaagagatgggtgtgccttggtgaggtgcagagctcaggggatttttaatcatgtacatgtttactttctagaggaaggagaggagcagtgtggggagagtgggaaggaagtacgctttctttcactaaagactctctttgccaggatgcctgatcaggagggacgtgtgtgggcacgaggtgcaaggctgttccacacagctaagccccagcttgctttgcatgcagaattgggaaatatttggggtggaagttgtctgagtgatctgcattccaaaggtgctactgtgttcctcactttcagaaatactctaagttgaggagatgacagttctgtattttgacatggaatccaaatttctgaccactgtggatcacacttaaaactgtgactgtctgtcttttaagctgcatactgggtggggggaaagcaaagaaaaggcatttcacattaatggaattggagaaaaatgtctcttcagagcctagaaagcttcagcttctgcaaagtcccaacaccacctaccagaacagagactccctacataccagacagagaaggacaaagttagtataatttactctggacccagccaatactgcccccaatttacccaaaacatgccttaaaatgaaacagaaagctcaaataatacacatcttttaagattttccatttcctgcagttagctatatttcatgccaagttttatttatcttttatgaatggatggaaataggatttcatttctttatatgccaaacagtcttacccttaattttacatcaaaccaattaagtacaaagattttgcaggctctttgactgagaaaatgcgtgttctcaagagcaaagcattttcactctacataagggaaattggggccaatctaaaatgtcagcaacacagtcctgatggggatgagtgtctctaatagaaactccgcaccaaatcattttacctggtgatagcttgctgcagtaagtttgcaggcatgttgcttcgttgttctgcaatataaccacactcgaagcaacaggagaggggccggtaacccattctgcattgactccagctccctatgactaggaagcaatgagccactctatctaaagggctagaacacaaaacagacaaaacctcttcttccttgatcatttttatctcagctgccaaaatggaaattttctgtgatttcctttgagacttgaagaattacacctggtctccaaccattattcttatcaccgtatcggttcagtgctctcaaggcacaaagcacttggaattcactccatgatcttgcaactctttttgagtgcttttcctgagcgattttaaactctacccgtaagaaatttcatctgcaatttctgtaaaaaaaaaaaaaaaaaaaaagaatggcttaagctccacataatctgatgtaaatatacattgaaacgttaagttctatttgtactgaaacactgtccaccttagactttagaacactatcatttaacagatattcagaaaggttccggaaatacgggggaaagaaccagactacgaatacattggaaatgttaaatttacaatattctcctgagcccccttccaatttcccaaaattgagaaagtgtgtaatctgtacctattttttttctcaaattggcctggaggaaacattcaggttcagagagtttagcagtgcctctatgtttgtgttctctgtgtaatcacatgaaagaaccaacaaataactcttcaggataaatgacacctgcatcgctgatcccttgttgacttatgttttattataaaaatagatctctatcattatagggataaaacgtgtatgttttgagatgatttggtaagaactcagccattcagtatttctggaagaattaaaaacttggctttctttttcttaatgtctaatagttttgaagactagatattagggcattttctttcctccttttaaaatttctactgattacaagctagcaatttcaggatatcagcttgatctagttgtattaaggccaaaaggcagactttctttatatttatttttattatttatttatttatttatttatttatttatttatttattttgagatgaagttttactcttgttgcccaggctggagtgcagtggcgccatctcggctcactgcaacctccacctcccgggttcaagcaattctcttgcctcagcttcccgagtagctgggattacaggcacccaccaccatgtctggctaattttttatatttttagtagagatgggctttcaccatgttggccaggctggtctcgaactcctgaccttcaggtgatccacccgccttggcctcccaaagtactgggattacaggcgtgagccaccgcgcccaacctgtatttacttttttaatgccacctagctgaataatgctttgggttttactgttgtcaataaaaccccttataccttttattgtcctgcttacttataaaagccaaattttaggcgaacttaaataaatcagtgctgaaaaactagttgaacaatcagtcactgacaagttttcaatgttttgagttaaccaagtgggcttttcagattaggttattcaagagcatgagctagaaaataattaggcagacaaaacatatgttctcacacacacaccacttccaaaacagacatgatttgaatgtagcattcaggttattgaggtgaacgtaaattgctttgcttgaacaattgagataatcacctactttcgccacttcacttttcacatttgtaaacacacacagggtttttccagcccagtgagcaggctacacaatgtgaggatgataatggttcctgcagggaagccagagcctctatgtctgccgaacagtttaaattgaacaggttggaaagaacattgattgccaataattaaatgccccagactgagcaggtagctgctacattttctcttctcttttctagttattcagggttccttctttgattttcatgagaaaggaacatttacacttcctgtgaggggcttagactccgatttctcccagttgcctcacttactgaagttcgatcccagtgaatgatgtgtatgtacccaacacatccaatttgtattttcttaaatatgtgtttcttaggtatctaaggatacatgagcgagcccacagcacaattattgcagtccccaagatgtcagtcttctcaaaatgacaacm

SEQ ID NO: 96705 - DNA, 12717 bp, Homo sapiens
tatatttttagtagagacggagtttagccatgttggccaggctgatgtcgaacttctgaactcaggtgatccacccgccttggcttcccaaagtgcttggattacaggtgtgagccaccgggctcagcctgttttttgtcttcaaggtgtcagttcaaatatttcgtccatttatttagctgttttcttactgctgagttttaatagttctttatatatttattcaggccaattgttaatgcttttcaaatgcatgtgtatgtccataatgtatatgtggtgatatattacttttacaatggtaaacaaacaaaaataacaacagcaacaaaaacccaaacatcatttccatgtacaatacaattttggcctatggtatctttatcatgcagtgaagttgataccacattgctcctttgtgtatgttgtgttttcctgaggtttttctgcaaatgtcattctagtgtcttttgctttgagaacatacagtgaataaatgactatactataagctccttaagagtagaaactgtctgtttctcattttatctccagtgcctcacacataatagacatacaatgtatttaatgctaataaacaacttcttaggcaaaatgtttgtgaaagccacactgaagcatttatcatttattgaattgaaacatttcatttcatttattcatttattgagacagggtcttgctctgtcacccaggctgaagttcagtggtgtgatcttggctcactacagccatgacctcctgggcctaggtgatcctcccacctcagccccatgagtaactgggactacaggcatgcaccaccacacccgcctaattgtgtttattttttgtggtggcggtctctctgggttgcccagtttgtcctcaaaactcctgggctcaagcaatcttcccatctcagcctcccagagtaatgggattacacgcataagccaccacacctatccaataaaattatttttttaaaaactgttatggttggaaaatgcagctgaggcacaatacaaacttcacgcttgatagtcgtagcaagctcaaaggagccaaagataactttgtcctaaatgcaaatgttgatgccaatggataccaccacttagataaatgtaacgaacaattgcttttttgcactctcaaggtatcagtgagatccagggagaggctaatagagggccggtatggtacagaaaacacaaaacttatttatgagactctgagtggctctgcactgacctgggaataaggttttagttttggctttgccaccaggatggacatgtctgtcactcaacctgtctgggtttgcttctatattcctagaatggcaggggcagactagattatctctaagattctttctcaccctaatgttctgtgagttttaattcttgctagtcctaatcttttgccaatttagtgcacagggtgactttacttttttttttttttttttttttttttttttagcagatacggtgtctcactatggtgcccaggctggtcttaaactcctggcctccagtgatcctccagggtaacttttcattagaaaataaaccagccgggcacagtggctcatgcctgtaagcccaacactttgggaggccaaggcgggaagattgcttgagcccaggagtttgagaccagcctaagcagcatagtgagaccctgtctctaaaaacaaaaaaaacaaataaataaagaaaaattaaataaagaaaccccagcctggccaacctggtgaaaccctgtctctactaaaaatacaaaaattagctgggcctggtggtgcatacctgtaatctcagctcttcaggaggctgaggcatgagaatcgcttgaacctgggagacagaggttgcagtgaaccaagattgcgccactgcactccagcctgggtaacaaagaaagaccctgtctcaaaaaaaaaaacacaaaaaacaaacaacaacaacaacaaaacctgagaactctaaatcagcctttcttattgtataatctagttgacagtcatatggcctttagatgttagttgttgttgttgctgttattattgttttgagacagaatccagctctcttgcccaggctggagtgcagtggcatgacctcaacttgctgcaaattccacctccaaggttcgagcgattcttatgcctcagcctcccgagtagctgggattacaggcacacatcatcaagcctggctaatttttttttttttttcatttttagtagagatggggtttcaccatattgaccaggctggtctcgaactcctgacctcaagcgatctgcccaccttggcctcccaaaatgctgggattacaggtgtgagccactgcacccagccatgaagttttgaacaattatttacggcagcaattgtctgcaaactgccagagcaaattttctaaatcatattatccagaggcaactgggggccaaccttttttgcaggcaacagcatgaatctgagtataaatactgggaaagagcctagagatgaacaacaggcttcctgtccccaccaccatgtttatttgtttattttttctatttttctttttattgtagagacagggttttgctgttggccaggctggtgttgaacttctggcctcaagtgatccatccgccacggcctcccaaagtgctgggaggcataagcctcagcacccagcccccacaccatgtttttgagatggtgtctcactctgtcaccaaggctggaatgcagtggcatgatcatagctcactgcagcctcgaccttctgggctcaagcgatcctcctacttcagccttcccagtagctgggactataggcttgtgccaccacaccctcctaatttaaaaactgcttttatagaggggggtcgcactatgttgcccaggctggtctcaaattcctgggctcaagcaatcctcctgcctcagcctcccaaagtgctaggactataggtgtgagtcaccacgcctggcctgtactctacttagtgtggcttatagtacgggctgagtattatctgaaatgcttgggaccagaggtgttttggatttgggattttttcagcatttggaaatctgaaatacttttggaacaaccttatatacgtactcattgagcatccctaatccgaaatacaaaatgctccaatgagcatttcctttgagtgccatgtcagtgctcaaaaagttttagattttgaagcatttcagattttcggagtggggatcatcaacctgtagtatacttctttagcttggtgaaataaacatgggtagttaaaggtctgagtagcaagagtggaatgacagaactgggtacttctgtaacgatcagccagacaataagctccctattttttcctgcttctgaaatccactttaaccatgttggccaggatggtctcgatctcttgacctcgtgatccgcccgccttggcctcccaaagtgctgggattacaggcgtgagccacagcgcccggcccaagcttaatttttaaagacagactgaaaactgctttattatcaagggacttgcaatctatgcctaatagctcatgggttcaaacctcttacttttcagcttttcagtaaataagtgaattaaaccaaattatagggtaaaaaacatttcaaagtatacaggcatgaagaggttcccttgaaggtgcctatgaatggcttagaggaaaatttaaaatttagctcattttccactcaagattttttttttttaagacaaggtcgcactctgttgcccgggatggagtgcagtggtgcaatcccagctcactgcagcttccacctcctaggcgaattgcttgagcaatcctacttcagcatcctgagtagctgggactacaggtgcatgccaccatgcccagttaatttttgtatttttagtggagataggggtcttgccacattgcccaggttggtctcgaactctgtctcaaaaaaaaaggtagattaaaaaaattataattaaaaaaattatgatgagttggctggacataaaaagaaaaaaagagctgccgggcgcggtggcttacacctgtaatcccagcactttgggaggctgaggcaggcagatcacgaggtcaggagatcaagaccatcctggctaatacagtgaaaccccgtctctactaaaaatacaaaaaattggccgggcgtggcggcgtgtgcctgtagtcccagctacttggaaggctgaggcaggagaatcacttgaacccgggaggcggaggttgcagtgagccgcaattgtgccacagcactccagcctggcagcagagcaaggctctgtctcaaaaaaaaaaaaaaaaaagctaactaaaaaaatagaaaaattaaaaaaaaaaaataaagacgggtctcattatgttgctgaggcttgtgctgacctcctaggctcaagctgtcctcccacctcagcctcctgagtaactgggattacaggcgcacaccaccacacctagcagtatggtactattaagggcactaactcgtttagagcatattattttaataacaataaattaagatttttttttttttgagatggagttttgctcttgttgcccagtctggagtgcagtggtgcgatcttggctcactgcaaactctgcctcctgtgttcaagtgattctcctacctcagccccttaagcagctgggattacaggcaggcaccaccatgcctggctaatttttcttgtatttttagtagagatgggttttcaccatgttggtcaggctggtatcaaactcctgacctcaagtgatccacctgcctcagcctcccaaaatgctgggattacaggcatgagccactgtgcccagccaattaatatctagaagccaataaaaaacgtactgagcattttcacatgtaatgtcataaaaagaagagctttttctgcctagtataccatcacttttgccactattactatatcatgctggtccttgcatatagcaggaactcaatgctttttttttaagcacctgtctgctattaaatccatgtgtcttttaaactgacggcaccagataacctaaaacttgaactttagaactacttctttttttttgagacagtctcgctttgtcgcccagcaggctggagtgcggtggcgtgatctcggctcactgcaatctctgcaggttcaagcaattctcttacctcagcctcctgagtggctgggattacaggtgcctgcgaccatacccagctaatttttgtatttttagtagagaccgggtttcgccatgttggccaggctggtcttgaactcctgacctcaagtgatccacccagccaaagtgatgggattacaggcatgagccactgcacctggccaaagatgttcgtttctattctaggatgcacatgctaaatcagagataaatccatatcaagatcaaatccagagctgaagcacagtgtcagcatggtaggattgggaggaactgagaagaggaaaagggcaatactaaatgaaaaagtcaagtccaggagaactttcagggggaaatttggcttgaggtagacttttttttttttttgagatggagtctcactctgtcgcccaggctggagtgcagtggcgcgatctcagctcactgcaagctccgcctcccgggttcaggccattctcctgcctcagcctcccgagtagctgggactacaggtgcccaccaccactcccagctaattttttttgtatctttttttagtagagctggggtttcaccgtgttagccaggatggtctcgatctcctgaccttgtgatccacccgcctcagcctcccaaagtgctgggattacaggcctgagccactgaacccggctatctgcttttcaaagagtagacacttagcttgtgccttataaaactaataatcttccttggattgtggctaaattgtgtgaatgctggtatttcaaaagactgtaagcatcatgtctgattcaakgctgtatgttttattggagtttaacatgcctacatagtaaatacttggtaaatgtgctgaaygaccaaatgattcccargatgagctagtcagctgaaagtccaaacatggggacttgggctggtaagccayctaggctttgaatcaaacagctacatctgaaagttttatgttagaataataacrccatgtattacatttctgtgcaataagtgarcccatctctagctcctctccccaccataatcacagcagtcagataaaaagttgaggagtttattagggaaatatgagaggcatagacactccaagtgacagaaagaaaagtctgaaaatgtcccttcaagccaagtgggggcctggccttgacctctccaaatcaacaagaaactggtgggttagcaacaacattctctggcagccacattgccagggcatgagtgtcttgaccaggactgccccgcacttcccaccaaaggtggggaggagacaaagactgttcacagaagcagtgcaaaggcaatgagaactttaaggaaagtttgagagagagagaaagaaagatagaggtgrggaggaccttcacaaagagtcccaggcttttggctgtgaatgtctcaaatacattgacaagtagatgtataaaatgttactgaaaaggtaaaatgcctaacgtcgtttccaacggttcctctgaacttcttcccacataccacaccacaccccagatggcagagcccaaaggccacacttttgaaaaaagaaaaacaagaataagccctgttgctctttaaggagaaaggaaggagctgaaggctgctggggcctttcccatgtggcctgtgttgtgtaaagcaacttcccagcagcagcacggcactgttctaggtgagtgtctcaccttttgtcacctgtgaaaggaaaggaaaactgacatttagataaattaaaaaagattagaggggtctaaaaaaaaatctttagatcctaggcagtgagaaatagcagaaaagaagatagctgtgaagtcacagaaacatggttcaaatccaggcaacatgcttaacttttctcttcttttgtttttttgagatggagtctcactctgccacccaggctggagtgcagtggtgtgatctcggctcactgcaacctccacctcccaggttcaagtaattctcctgcctcagcctcccgagtagctgggacaacaggtgtgagccaccatgcctggctaatttttgtatttttagtagagatggggtttcaccatgttggccaggctggactcgaactcctgacctcaagtgatccacctgtcttggcctcccaaagtgctgggattacaggcgtgagccaccatgtccggccagtgcttaagtttcctaagactgtttctgctttcaggtttttttcagcaataagtggaaatgtgcattctctctggaatgcccttgcccatcaaactcacccgagcttcaatgtactctattctccgttcaagggctgtcaatttctcgtttagtgttgcaagtcttgaacgacaagacatatctgagaaaaagagactggtgttcaggattaatgtcactccaaacacagacacagacacacacaacacctacaatgaaaaagaggaataatacacagaatacaaatggaaatggatacagtgctaagatccactcatagcacagttgcttagagtggatctgctgaacttcctatcaagtgttgcaagtagagaataacggccccacaaaaacgtcctttcctgcagggcacggtggctcatgcctgtaatcctagcactttgggaggactaggcgggtggatcacctgaggtcaagagttcgggaccagcctggccaacatcatgaaaccctgtctcttactaaaaatacaaaaattagccaggcatgatggcacatgcctgtaatcccagctacttaagaggctgaggcaggaaaatcacttgaaccggggggggcaaaggttgcagtgagccaagatctcgccacttcactccagcctgggtcaaacagcaaaactctgtctcaaaaaaaagtcctttctctaatccctggatcctgtgaatatggattatacatgaggaaacagggctttgcaggtatgattaaggttaagaaccttgagatcctagagtttgtcttggattgtccatttgggcccaatctaatcatagtccacaaatgtaggtgagaaaggcataggaagggggtcagagatgaaatggaagaagaaaaagagattccaagtgtgaaggggatgcaatctgccattgttggctttgaaagtggaagaagggagccatgaaccaagggatgtaagtgacctttagaagctgggaacaactctcagctcacagccagcaacaaaacagagatctcagtcctacaaccacgagaaactgaattctgccaacaacccaatattcgaggaactagaccctctcctagagcctccagaaaggaaggcagtcctgctgaaaccctgattggagcccaggccaggagcagtgactcatgcctgtaatcctaatacttcagaaggccaaggtgtgaagactgctggccaaggtgtgaagattgctagcccagtgaccagtgtttgatttatgacctacacatggtaaataataaatgtatgtggtttaagccacaaaatgtgtggtaatttgtttttttggtttttttttttgagatggagtctcactctgtttccaggctggagtgcagtgacgcaatcttggctcactgccacctctgcctcccgggttcaagcgattctcctgcctcagcctcctaggtagctgggactacaggtgtgcgccaccatgcccagctaattttttttttttgtatttttagtagagacggggtttcaccatgttggccaggattgtctcaatctcttgtcctcgtgatccgcccgccttggcctcccaaagtgctgagattacaagtgtgagccactgtgcccagcctgtgtggtaatatgttatgccaggaatagcaaatgaatacaccaaggctgtacagccatttactaatggcctaactaagactttcaagagaggggacatggcaagaataagaaaataatctcaacaggaaagaaacgaggctgggcgtgatggctcacgcctgtaatcccagcactttgggaagccaaggtgggcagatcaactgaggtcagaagtttgagaccagcctggctaacatggtgaaaccccatctctactaaaaatacaaaattagctgggtgtggtggcgggtgcctctagtcccagctactcgggaggctgaggcaggagaatcacttgaacctgggaggcggaggttgcagtgagctgggattgcaccactgcactgcagcctgggtgacagagtgagactccatctcaaaaaaaaaaaaaaaaaaaaaggccaggcacggtggctcaggcctgtaatcccagcactttgtgaggccaaggcagtggatcacgaggtcaggagttcaggaccagcctggccaagacggtgaaaccccgtctctactaaaaatacaaaaattagccgggtgtggtggcgggcgcctgtaattccagctattcgggaggctgaggcagagaactgcttgaacccaggagatggaggtagcagtgagccgagattgcaccactgcactccagcctgggaaacagagtgagactccgtctcaaaaaaaaaaaaaaaggaaagaaagtagaggccaagaaagcagcagaaattatggggagggaaggtgtgagagttctgagctcattaaagccatgtcactactgttgctcctagaggcaaaggcctttcagaactagagaaaagttggagagcatcaaatacccgataaagcccacattccatctgtgaaaacagccaaaattattcttcttcctctagcttttccaatcttcttttaccatctcattcaaaatgaaaccagatttaatttaaaacaactttttctctgcaaacttctgtaacaggaactattctttttccaactattctcaacatatgagagaaaaggtatcttagcatggtcattatcttctactctctcctccaacattgttgttcagtcatctctcaataaacttcagttttcaagtctgaaatattcgctgagactctcccacgcaatgatttaacacttagctaacaagtttccttttcatctattccctggctgttttgcaaaagcgcttcagcatccattttgacaaatcttcctacaccctgatcttgcctcaactttcatcttattatgtccaaatcttactcatcttgcctgcctatctccttcaaggctaagttcaaattctatctctgagaggtcttgccagatggacataataattcttcctcttctgtatttatctaaacatttacggatgaatttttttttttaaaagagacatggtcttgctctgtcacccaggctagagttcagtgttgcaatcatagcttactgcaccctccaactcctaggttcaagtgatccttccacctcagcctcccgagtagctgcaattactactcagtaggtggatgccactgtgcctggctaatttttttgttttttgttttggtagatatgggggtctcactttgttgcccaggctgatctcaaactcctgaactcaagcaatccacctgccttggcctctcaaagtcctaggattacaggcgtgaggcaccgtgccagcctctgaatttctaatttgtaagttattcatgtacttggtctttggttatgacttccctctttggataaagattttacaaataagaatgtgcatcactactatttaagatggtgaaaaagcaacaaaaccaaatgcccatgattggaatggtttgatatagcgtattaatgagactattaaaatagccattgaaagttacaagtggccaggcgcggtggctcatgcctgtaattccagcactttgggaggccgaggcgggcggatcacctgaggtcggagttcaagacaaacctgaccaacatggagaaaccccatacctactaaaaatacaaaaaaaaaagaaatcctgtctctactaaaaatacaaaattagctaagcatggtggcgcacacctgtaatcccagctactctggaggctgaggcaggagaatggtttaaacccaggaggcggaggttgcagagagtcaagactgcaccactgcactccagcctgggcaacagagcgagactccatctcaaaaaaaaaaaaaaaaaaaaaaaaagtggccgggtgcagaggctcacgcctgtaatcccagcactttgggaagccgaggtgggtggatcacctgaggcagtgagccgagattgcaccattgcactccagcctggacaacaagagtgaaactctgtcttaaaaaaaaaaaaagtttgaggaatatttaatgaaataggaaaatattcatgttacgaaaccaaatgatatttatgtacttgtaatttacaatttatttacatgtctgtttcaccgttagaacaagttaatcaaaagaagtacatattgcctcttgtaaccttagcatcttgcctggtacatagatgttgactgaaaaaaaaaagatggattctggtatattagtggaacaaaagattgactctagtgtaactctattcaccttacaagtgggaaaactgaggtctaggtaagctgagggcccatgttgggtcactggtattctttcccatactgtgtgcatcccaatgcacactactatcatctttctgtgcctccggggctataatttataccccaggtctccagcccaactctgccactttccattctttcacctgcttaaagtatacaattcagtggtttttagtatacttacagagttgtgcaataattataatctacttttagaatattttcatcatccccaaaagataccttatacctcttagtcctgtcactccccattctgtcacccctcagtccctgggaaccactaatctttgtctctatggatttgccatttctggacattcttcattctttttacgcttgtgctgcttgaattcccaggtctagcttaagtatgatcacttcagcatcccccttttcctggatgtactgccactttctgtcggaactgcccaacaggaccaagcctcttttcagtctggtttttggaagtctgaaagcacgttatgtatgctactgagtaagagcatgaatattatctctgacaacctgccatttcccatgaagacatacgaaaattattgggggaggtaggagagagggaagtttccttcctgggtggctattctgttctagctgtcaatctggtaatgaattagaattcaagaacaatactatgctcctggcctacatggataaacactgttgagaaatagaaaatgttcaactgcagaaaccttggtcatatttcaaatcctaataagtatacgctggttcaaataaaaaacactgagaaagcattcagcagctggataaatctgaaaccagagcacaagtatgtgtacattatcaccagcctttaactgaaaataccagttctcgttaggaaacaaatgctgttatcagacagctccttctctgaacttaatgcatataacttcagcattacaaaaatcaatactgtcaggccgggcacggtggttcaca

SEQ ID NO: 96706 - DNA, 39639 bp, Homo sapiens
  misc_feature (1)...(39639): n = A,T,C or G
cttcatcaaggccatggtcagctacggcatgaaccctgtggacctgttcgaggccaacgacctgtttgagagtgggaacatgacgcaggtgcaggtgtctcttctcgccctggcggggaaggtgaggcccagagaggggcagccacctgcccagagtcacacagcgaggtggatgtagctgctgcattcactcgtttgcaaatttctgtttgtttatttttgagtcggagtctcactctgtcactcaggctggagtgcaatggcgtgatctcagctcactgcaacctccaactcccaggttcaagcgattcttctgcctcagtctcccgagtagctgggattacaggcacctgccaccacgcctggctaatttttgtatttttagtggagactgggtttcaccatgctggccaggctggtcttgaactcttgacttcaggtgatccgcccgcctcggcctccccaagtgctgggattacaggcatgagcccctgtgcccggcctcgtttacaaatatttctgagcatccgtgaggtgccaggtacttcagattccttggtgaacaggaaggacatggtctaccccttatgcagttcagtctgatggcggaggcatgcaaaagtgaacacagcattgtattatgcattatatgtaagctctggccgggcgcagtggctcacacctgtaatcccagcactttgggaggccgaggttggagaattgcttgacaccaggagttcgagaccagcctggccaacatggtgaaaccccatctctactaagaaaacaaaaattacctgggcgtggtggtgcatgcctgtaatcccagctactcgggaggctgagcccaggagttaagaggttgcagtgagctatgaccacaccactgctctccagcctgggcaacagagcaagactctctcaaaaaataatcataacaaaagtaataaataagctctgaactgggagaaatgccttgaaggagaagaatcagacgaatgttgagtgtgctagtgatcttcaaacccagaccgggagcgtgggtgggacagtggtgtagaccgggagcgtgggtgggacagtgtactggtgtagaccgggagcgtgggtgggacacggtgtctggtgtagaccgggagcgtgggtgggacacggtgtctggtgtagaatggaatgggagtgtgtgtttgtgacatggtgtctcacgtagaaggaacagcaaggtcttgacattggaattggctgggctgttagaggaagcgggagctggttttctcctggggtaactgctccaaatggtgttttcagatgccccctgtggctcccagtaacctcacgtggggaatggtggtcagggaggagccgggcgcagacatcccagtgaggggcagagccaatggcctggccatggtgcccggggattgggtcagaggaggtggtggaaggtgagagagaggaagcgaaaaccacgtccccatccccagaattcttggcctgagccctggaaagctgagctgttgcctaagacaaggcacgctgggatgaagcagccccatgggctgggcgcggtggctcacgcctgtaatcccagcacttttggaggttgaggcgggtggataacttgaggccaggagttcaagaccagcctggcaacatggtgaaaccccgtctctactaaaaatacaaaaattagcctggcgtggtggcacacgcctgtaatcctagctacttgggaggctgaggcaggagaattgcttgaacctgggaggagggggttgcagtgagcggagatcacaccactgcactccagcctgggtgacagagccagactccatctcaaaaataaaaataaaaaactgaaacagctgtatgatgggtgtgtggagtgtgtggagtcccagacacccgagagatgtgcctgtgggggctctgcgcggcaggcagaggtgacaggccgcggcctggtctctgtcccgcccccagggcctagatctagggtccctggctgccctctgctggtactcccggcccctttccctcacccaggccaagactaaggggctgcagagcggggtggacattggcgtcaagtactcggagaagcaggagcggaatttcgacgatgccaccatgaaggctggccagtgcgtcatcgggctgcaggtgggcgacagctcccccagccccagggaccacggcattgggggaccacggtgttgggggacagcagcattgggggacagcggcatggagccctgtggtccctcaatttcagggagggaccggaagcttgttgggtgcagtctgacctctcccacgaacctccctgcagatgggcaccaacaaatgcgccagccagtcgggcatgactgcctacggcacgagaaggcatctctatgaccccaagaaccatatcctgccccccatggaccactcgaccatcagcctccagatgggcacgaacaagtgtgccagccaggtggggctcgcccgggtgcccccgactcctctccctgcccctctacaccctgtggtctcggcccctccctggggccacctccagcttctctccccactctcagtctcagccccttccctagaccacctccggcttccctccccgctctctgtctccgccttggatttcagcctctgtcatttccacctggctgtgggtctctagggaagttactacctcaccctgtgtcattttcccttaaggactgcccaaaggtccacccaattctttttttttaatctttatttattttatttatgtatttattttgagataggatctcactctgttgtccaggctggagtgcagtggcacgatctcggctcactgcaacctctgcctcccgggttcaagagattctccttcctgcctcagcctcccgagtagctgggactacaggtgcatgctgccacacccggccaatttttgtatttttagtagacatggggtttcaccatgttgcccaggctggtctcgaactcctgagctcaggcaatccacccgcctcgacctcccaaactgctagggttacaggtgtgagccaccgcacccggccacacccagctaatttttgtatttttagtagagacggggtttcactgtgttggtcaggctagtcttgaactcctgacctcaggtgatcctcccacctcagcctcccgagtagctgagactacaggcgcccgccaccacgcccggctaatttttgtatttttagtagatatggggtttcaccgtgttggccaggctggtcttgaacttctgacctcaggtgatcctcccacctcagcctcccgagtagctgggattacaggcatgtgccaccacgcccagctaattttgtatttttgggagagacagggtttcaccgtgttggccaggctggactggaactcctgacctcaggtgatcctcccaccttggcctcccaaagtgctgggattacaggcgtgagccagtgcacccagtgaaggtcccctcttctctccaccatgacctgctccacccctccttcctctccaggtgggcatgacggctcccgggacccggcggcacatctatgataccaagctgggaaccgacaagtgtgacaactcctccatgtccctgcagatgggctacacgcagggcgccaaccagagcggccaggtcttcggcctgggccggcagatatatgaccccaagtactgcccgcaaggcacagtggccgatggggctccctcgggcaccggcgactgcccggacccgggggaggtccctgaatatcccccttactaccaggaggaggccggctactgaggctcccagcacgctctctccccacatcgtctccccatctgggtttttgggtttttctgtgttttcatctttttttttttttttcttgacccgttcagtgctgccagtcaaccaagggtctgtgagtgtcagcgtgggatcaggcagcagagcttttttcccctttgccttgatccttcgcaaggctgagccactgggctgtgggggaaggggtcaaggccatatcccaatacgtgtagggcgagggtccctgctggcacattcaggctgtgctgggaagaagagacctgggcttggaaggaaccggtccccgacggtttctggttgcctcgcctcttcccccttttgtcagctgagcagtttgtggtttctatgcccgcaagtttcaggaagtattcacaaaagaaaaatacattttttcccccaggggtggggcaaggacagtggagagagtgctaggaaatgagtcccctgggaaaggggaccgggccgtgatgttaaatatctccggctcccaagtgactggatttgcctaggaccttcagaccaacagacttcagaccctcagacctgccccggggccaggtggagaaagtgagggccgtacaaggaagtgaaattctgagttgttggggctaagcctgaccccctctccatgctccccgccccaacccactctggcctcagtagatttttttttcagttgtggttgttgcccaggctggagtgcagtggcgccatcttggctcactgcacctccaccttccgggctcaagcgattctccagcctcagcctcctgagtagctaggactgcaggtgctccaccacgcccggctaatttttgtatttttagtagagatggggtttccccatgttggccaggctggtctcgaactcctggcctcaggtgtgatccgcccgcctccgcctccccaagcgctgagattacaggtgtgagccaccgtgcccaggccctcagtaggttttaaggagtccccagccctcctcccttctgggcccgaccagcttatactgctccatcttccccggccacatgccccgccaagtactgcacagggaccccccacccaggggccctgctccgtgagataatgtgaaatacgactgtggaccaaacgcaataaaacctctgtttgtacgaagagaaggtggccaagagagttggcgtcgatgagggcgtgctttgctttgatgcttttgtggggagagaggaggtcttgggggatggggggatcaaggggaaaatgtccacctcaccattgggaagaggagcaaaagctgaagccacaggtgagtctgggtggaatgaatgatttgaagggccgggacttggggtagagggagaggctgggcttcctggccatttggagaagaggcagttccctcaaatgccccccatgcgctttggctgcactctaccttacagcgcaagtctcgtggcctcagcctggatgtctccccgttggcgaactcctatttatcctcaaagccccaacggcaatgccacctcctgccgcgggagctgtccccacgcctctcactctccccagcgccttcaaagctgtggacccacacgctcccatttcagcttcacctccagcctgaagagtttatttcaactcttcttccagagtgggaaacgggttttcctcaaaatcagggtagccactataatcggagactctagaatgttggccccctcccctttctgccatcctctgcagaagccgaggagcgttcgtggaatgaatgaatgaacgaatgatctagtggaacccctactttacagacggacgagtgtagtcccagagtctggactaaactagagggagcctggccagccccggggacagcggggacagagggaactcctgcaattcggagctgcggtattgcagccggttatacaacgtggggaggcagcctggctccccaaagacagcgcagcctcgttcccggagggcggcctgcctgggacctgccgggcactccgccaccctacggtgatgcagcaagagccgcgcggtccctttaagaaacccggctaggcgaggcccttctgtgatcccgcctcctcccttggcccgcgcagctccgacggagcaggccagtgagtgacgggcagatcgcccaatagcagcgtgcagaggcaggggcgtgccccggcgctgctacctgcgcgggcaagctcagcgcacttggcttaaggggcggcgcgctccctgcctgctgctgggcggagggaaggcggcaagagctgcggagcccctggaaggtgagaaggactcggagagggaagaaggcccgagactcgagaatgcggggttggggccgggagggatgcaagttccctgggaattagggggtccagcctctgacctccttccggtgaatgttgacgacggctgaattgatcactgattctcaaggggggcatcggacatctgggacccttaagaggrcctttgccgatcacacacctgcagccccctgcccgttagaactcctgcactcccccttgccccgtcttacaaatggagaaactgagcccactcccccagatcctaagtcccgcttgatgtaaaggaaagaaccctggcgtaagggtctgggtctgaggtcccagttccggcctggtcacctttagcaacttcctgcccctctgtcagcgtcagattctccatctgtgtcagaggtggaccggcccaaggaaaatagatcaggaatcgctgactccaggagtctctatcccagccccttcgcctgactctttctctggctcccgcggtccctctgagcgattaatgctacataaggtgtgggcagagctggggtcgtgcctccrgctgggcaactgcctgtctctctgggtgcctgggtttgctttcttgggcctcggtttccacttctgtagagtggggtgatagtccagcacttcccctgggcgtgtgaaatgtccagcactgccaatattcgttgctgttatcttcggagaacagtgaggggaaaggaatccttgcctgggctgggccaggcaggaggctgggggtcaggacctggaagaggcttccaggtgaggcttggggtggagcctggtgacgaaagcgttaagcccaaactcggtccctggaggattagaggatgatctttaagtccccagctgtcrgccctgctcagagcgacagtcctggcagccaatcagatgcgaggacggctgcgggttgcgctcccattggtttactcyacccctggggtagcggagcctctttatcgagtgactactgtttgcctcgctctaatcagagcttccaggaaccctgcgctgtgggataaaggaatgaggttcagaaaggggcagggagttgcccgcagccgcaccgcacgtcttcagcccgaccgttgtcctgacctctctgtcccgtcccctgcccrgtctcaccatggccttctggacacagctgatgctgctgctctggaagaatttcatgtatcgccggagacagccggtaacgccccagtgtgagaccagggccgggtgggcaggcagcccccactgtcccccaccgtctcccacctattctcccccaggtccagctcctggtcgaattgctgtggcctctcttcctcttcttcatcctggtggctgttcgccactcccacccgcccctggagcaccatgaatgtgagcccccccagggaccaggcactttgtgtgtgtaggggaaggcagatggctcacccgtgcacaggaatcccccgtgcatgtcagggagccttcaccaggccgccaatacatggcatgggagtgagctctccatcgctggaggcatgcaagcggtgccgggcgacccgatgggggtggagtcaggcagagtccacagggcctcagcaccaggcgtctccccgcaggccacttcccaaacaagccactkccatcggcgggcaccgtgccctggctccagggtctcatctgtaatgtgaacaacacctgctttccgcagctgacaccgggcgaggagcccgggcgcctgagcaacttcaacgactccctgtgagccagaggcagtgggtgcggccggcctgcaaactcggggctgcagtgccggccggaaccccgcctcctgccctctctctgtccccagggtctcccggctgctagccgatgcccgcactgtgctgggaggggccagtgcccacaggacgctggctggcctagggaagctgatcgccacgctgagggctgcacgcagcacgggtgaggaggccggggggcctctggcagggctgagctctgagcctcaacttgccgggccgtgaaatgggcacagggtgggggtgggtgcctcagaccaacgtccccccagccccatgctcccgtgcgctcctcccccagcccagcctcaaccaaccaagcagtctccactggaaccacccatgctggatgtcgcggagctgctgacgtcactgctgcgcacggtagggtgtcggggcgggaccgcgctgacttcctgggacactgcactggggatgtcctggcactgccccaccccgggccaaggacctcccgttccaggcatccaggctgtccctggtctctgcggtgatgctgcttgtccgtctgggcccccagacakagtgtgtctgacccagtgaggaagactcgtctgtgagatctccaatgagtccctttgcctctcagagcctcagtttccctatttgtaaagtgggggctatgatagtatggtctgcctgggaactggccagagcgctggacccctagtgagtgttcaaaatcattgtcccccttgtggtctttctccccaggaatccctggggttggcactgggccaagcccaggagcccttgcacagcttgttggaggccgctgrggacctggcccaggaggtacgaggccccactcatcctcaayccccatggaggcaacgttggcaggcagcctgcgccgggagggtctggggcagcccgggcacttcccttgggtgggttttcaggaggattagacagcragagggagaggctgcccctggcccagtgccctgccctggttagggcttggaggtgggatcattgccagctccgtctggtaacctctctctagctcctggcgctgcgcagcctggtggagcttcgggcactgctgcagagaccccgagggaccagcrgccccctggagttgctgtcagaggccctctgcagtgtcaggggacctagcagcacagtgggcccctccctcaactggtacgaggctagtgacctgatggagctggtggggcaggagccagaatccgccctgccagacagcagcctgagtgagtgackgacctcggtttcccctcttgggaagtggaactctgggcaggggggcagggcctcatggcacccscatcccaggccccgcctgctcggagytgattggagccctggacagccacccgctgtcccgcctgctctggagacgcctgaagcctctgatcctcgggaagctactctttgcaccagatacaccttttacccggaagctcatggcccaggtgggggcagcctggatgctggggtgggagggtggtggccagagcccatccagtaccctcagtccaggtgggccagggccaggccggagggtcacggaaactrtttgaagaagtaggagttagccgatggagggggatcagcttgtgcggaggatcagaggcacaygcaggagcaaggcagagggggcagggggtgggcaggggtcctcagaggaggagagggtcatcagtggagggggtgctgtccacaggtgaaccggaccttcgaggagctcrccctgctgagggatgtccgggaggtgtgggagatgctgggaccccggatcttcaccttcatgaacgacagttccaatgtggccatgctgcaggtgtgcgggggtgctggggaggtsggatgtggctccccggtgaggagggtagacaggcccggtggatgggaaggtgggctccgtgcagacccccacttttttttttttttttttgagatggagtctcgctctgtcgcccaagctggaatgcagtggcgtgatctcgactcactgcaacctccacctcccgggttcaagcgattctcctgtctcaccctctgagtagctgggactacaggcgcccaccaccacgcccggatgattttttttttttatttttagtagagacggggtttaaccatgttagccaggatggtctcgatctcctgacctcgtgatccacccgcctcggcctcccaaagtgctgggattacaggcgtgaactaccacgtcctgcttttttttttttttttttttttttaagagatggagtctcactctgttgcccaggctggactgcagtggcgagatcttggctcactgcaacctccgcctcctggattcaagcaattctcctgcttcagcctcacaagtaactgggattacaggcatgcgccaccactcccggctactttttgtatttttagtagagatgggctttcaccatgttggccaggctggtctcgaactcctgacctcaggtgatccacccgcctcgcctcccaaagtgctgggattacaggcatgagccactgtgcccgacccagactctcactttcacctgcgccccccagcggctcctgcagatgcaggatgaaggaagaaggcagcccagacctggaggccgggaccacatggaggccctgcgatcctttctggaccctgggagcggtggctacagctggcaggacgcacacgctgatgtggggcrcctggtgggcacgctgggccgagtgacggaggtgagggccygtccacctgcggggtctgtttcagtggggagggcaggtcccatcctagtgttcccaccctggtgttcccagggggaggcgggcccrgccctagtaagagcctgggatttgtagagatctcaggagggagccggccgtgggcctacgaggggaaaacatggcccagccccgaggtccagggggaggagcggagtggtctaggaggcaggcggaccccagcgcstaggactcacccccgcatcccacagtgcctgtccttggacaagctggaggsggcaccctcagaggcagccctggtgtcgcgggccctgcaactgctcgcggaacatcgattctgggccggcgtcgtcttcttgggacctgaggactcttcagaccccacagagcacccaaccccagacctgggccccggccacgtgcrcatcaaaatccgcatggacattgacgtggtcacgaggaccaataagatcagggacaggtcaggcgagggagggggcggggggatgagggactgggcggggccaagagcgtggtgggtggggccaggcagcattcagcctattggagaccatgatagacaggatctgggctgtatcaacagtggtatggtagccagagcccggggctccttagaccaataggggcccgtgatgggcggggcctaggtgcatgaggggcgtggccatgggcctgagataagatgagagcaggtataggttgagggcaatggtgggcggagccaggtgtattattaggtccctggaataagggtggagctaaaattgcaccgggtgctgagcgcagtagatcttgcctgttatctcagaactttgggaggccaaagtgggagaatctcttgaggacaggtattcgagactagcctgggcaacatagtgagaccgcctcccccccgcccccctcccccaccaacctcacgaaaatatctttaaaaattagccaggtgaggccgggcacagtggctcacgcctgtaatcccagcactttgggaggctgaggcgggcggatcacgaggtcaggagatcaagaccatcctgactaactcggtgaaaccctgcctctactaaaaaaaaaaagtacaaaaaattagccgggcgtggtagcacgcgcctgtaggcccagctacccaggaggctgaggcaggagaatcgcttgaacccaggaggcggaggttgcagtgagccgagatggcgccactgcactccagcctgggcgatagagcgagactccgtctcaaacaaatgaataaatgaataaaattagccaggcgacttgggaggccgagctggggggatcgtttgatcccgggaggtcaaggctgcagtgagctatgattgcagctcttcactccagcctgggcgacagagcaagaccctgtctaagaaaaaggttattcagggtggggccccgggagtttctagcccttccctacaaccggccaccatgcccctctcgcaggttttgggaccctggcccagccgcggaccccctgaccgacctgcgctacgtgtggggcggcttcgtgtacctgcaagacctggtggagcgtgcagccgtccgcgtgctcagcggcgccaacccccgggccggcctctacctgcagcagatgccctatccgtgctatgtggacgacgtgtgagctctggcacccctccccgctcttccccgcggcgggaaggtcccgggtgtgggggtgggcccaggctctgttgggaaccttcctgcggtccaggctgcgaactttgcacckttacaccactccacgtgacctgctgcagcgggaggagcaggggactctgagggtctggtggggggggggactctgagggtctgggggcccccggcgcagggacagcctgggctgcactgatgcctgagagccaaaggctggctggatcaggttccaaggaacagggaggcaaatcttcccgccttgagatcccgggacacgaaccagtcgtgccagatggtgggcggagggggggtctgcggagggtctccagcctccaccccagccgtccccaccccaggttcctgcgtgtgctgagccggtcgctgccgctcttcctgacgctggcctggatctactccgtgacactgacagtgaaggccgtggtgcgggagaaggagacgcggctgcgggacaccatgcgcgccatggggctcagccgcgcggtgctctggctaggctggttcctcagctgcctcgggcccttcctgctcagcgccgcrctgctggttctggtgctcaaggtgggcgcgcctcggyctgcccggctgcagaatgggtgcgctggagggtgacagrcaggggcggccccacgtgggtgsgcgcccccaggccaatccaggagctgcaccctaagctcccgttgcctctcacagctgggrgacatcctcccctacagccacccgggcgtggtcttcctgttcttggcagccttcgcggtggccacggtgacccagagcttcctgctcagcgccttcttctcccgcgccaacctggctgcggcctgcggcggcctggcctacttctccctctacctrccctacgtgctgtgtgtgrcttggcgggaccggctgcccgcgggtggccgcgtggccgcggtgagagccgggtcgggcgtggatgggggacgccccccgcttcggccgctcactgaccgcccgcttttccgcagagcctgctgtcgcccgtggccttcggcttcggctgcgagagcctggctctgctggaggagcagggcgagggcgcgcagtggcacamcgtgggcacccggcctacggcagacgtcttcagcctggcccaggtctctggccttctgctgctggacgcggcgctctacggcctcgccacctggtacctggaagctgtgtgcccaggtgggccgtagggggcggggctccgggccgggtsgcacctgctttgcgggaggctgagctaggggtgtggcctccaggccgtttgggggtggggggtggcttattcccttggagagaaggcggggcttcttggcacacgcatgcaggtggctgcattggaggggcggggcctgaggcaggtgggcggggtttctgggccgcctcatacctggacgccctgattccaggtgtatggccagaagctggcacagtcgccgggcgctgtggctcacgcttgtaatcccagcactttgggaggccaaggcaggagaatcgcttgagcccaggagtttgagaccaggctgggcaatatagtgagacctcatcaatacaaaaagttagctgggcgtggtggcacgctgggcgtggtggcacgctcctgtagtcccagctactcgggaggatggggtgggaggatcactcgagcccaggaggttgaggctgctgtgagccgtgatcccaccagcctgggcaacagagtgagacctccatctctttaaaaaaaaaaaaaaaaaaaaagctggctgggtgcggtggctcacgcctgtaatcccagcactttgggaggccgaggcgggcgggtcatctgaggtcgggatttcgagaccagcctgaccaacatggagaaaccccgtctctactaaaaatacaaaattagctgggtgtggtggcgggtgcctgtttcctagctacttggaaggcagaggcaggagaaatgcttgaatcccggaggcggaggttgcggtgagtcgagatcgcgccactgcactccagcctgggcaacaagagtgaaactcagtctcaaaaaaaaaaaaaaaaaaaaaaaaaaacaaggccgggcacggtggctcacgcctgctttcccagcactttgggaggccgaggtgggcagatcacgaggtcaggagatggagaccatcctggctaacacggtgaaaccccgtctctcccaaaaatacaaaaaattagccaggcatggtggcgggcgcctgtagtcccagctactcaggaggctgaggcaggagaatgacgtgaactggggaggcggagcttgcagcgagtcaaaatcgtgccactgcactccagcctgggcaacagagcaagactccgtctcaaaaaaaaaaaaaaacaaaaccccaaaaaaagcctggtacactcctggggggtgggctaagcaataacccgcgcccctccccgcaggccagtacgggatccctgaaccatggaattttccttttcggaggagctactggtgcggacctcggccccccaagagtccagccccttgycccaccccgctggacccaaagggtgaggcmctacgaggcttaatagctggttgtccacatatgcccagttcccccccaaaacgagattccacagatgccaatgacaatgacctggacaccccaaccctcacacctgccctgaagacactgcggtccccaagctcccgcagcttttataggccycggcccagcaggtcccggattccacagcccagctctgagggacttgcaggccccaggacccccatgacctccatggctgagtccaccccatctctgcagtgctrgtagaagaggcaccgcccggcctgagtcctggcgtmtccgttcgcagcctggagaagcgctttcctggaagcccgcagccagccctgcgggggctcagcctggacttctaccagggccacatcaccgccttcctgggccacaacggggccggcaagaccaccaccctgtgagcccccaaccactccctccccgtgagcccccccactcccaccccgtgagcccccccaccactccctccccgtgagccccccaccactccctccccgtgaaccccccaccactccctccccgtgagcccccccaccactccctccccgtgaggccccccaccactccctccccgtgaaccccccaccactccctccccgtgagcccccccaccactccctccccgtgaaccccccaccactccctccccgtgagcccccccaccactccctccctgtgagccccccgaccgctccctccccgtgagcccccccaccactccctccctgtgagcccccccaccactccctccctgtgagttcccccaccactccctccctgtgagtcccccaccactccctccctgtgagccgcccaaaccactccctccctgtgagccccccaccacttcctccctgtgagctccctgtgaggcccccgaccagtccctccctgtgagcagtaatggcgccactgcactccagcttgggcaacggagtaagaccctgtctcaaaataaatagggcgggagtggtggctcacgcctgtaatcccagcacttgggcaagccgaggtgggaggattgcctgaggtcagagtttgagacacagcctggccaatatggcaaaaccatctctactaaaaatacaaaaattagccgggtgtgatggtggcgtgcacctgtaatcccagctactcaggaggctgaggcaggagaactgcttgaaccctggaggcggaggttgcagtgagccgagactgtgccgttgcactccagcctgggcaacagagtgagactctgtcacaaaaaaataaaaataaacaaataaataaaaataaggctatcacagggttttggatgtagcatttaataggtgctctgtggccaggcgtggtggctcaggcctgcaatcccagcactttggggggccgaggcgggtggatcacgaggtcaggagattgagatcatcctggctaacatggtgaaacagtgaaaccccgtctctactaaaaatgcaaaaaaattagccgcacatggtggcgggcgcctgtagtcccagctactcgggaggctgaggcaggagaatggcgtgaaccnnnnnnnnnnnnnnnnnnnnnnnnnnnnnnnnnnnnnnnnnnnnnnnnnnnnnnnnnnnnnnnnnnnnnnnnnnnnnnnnnnnnnnnnnnnnnnnnnnnnnnnnnnnnnnnnnnnnnnnnnnnnnnnnnnnnnnnnnnnnnnnnnnnnnnnnnnnnnnnnnnnnnnnnnnnnnnnnnnnnnnnnnnnnnnnnnnnnnnnnnnnnnnnnnnnnnnnnnnnnnnnnnnnnnnnnnnnnnnnnnnnnnnnnnnnnnnnnnnnnnnnnnnnnnnnnnnnnnnnnnnnnnnnnnnnnnnnnnnnnnnnnnnnnnnnnnnnnnnnnnnnnnnnnnnnnnnnnnnnnnnnnnnnnnnnnnnnnnnnnnnnnnnnnnnnnnnnnnnnnnnnnnnnnnnnnnnnnnnnnnnnnnnnnnnnnnnnnnnnnnnnnnnnnnnnnnnnnnnnnnnnnnnnnnnnnnnnnnnnnnnnnnnnnnnnnnnnnnnnnnnnnnnnnnnnnnnnnnnnnnnnnnnnnnnnnnnnnnnnnnnnnnnnnnnnnnnnnnnnnnnnnnnnnnnnnnnnnnnnnnnnnnnnnnnnnnnnnnnnnnnnnnnnnnnnnnnnnnnnnnnnnnnnnnnnnnnnnnnnnnnnnnnnnnnnnnnnnnnnnnnnnnnnnnnnnnnnnnnnnnnnnnnnnnnnnnnnnnnnnnnnnnnnnnnnnnnnnnnnnnnnnnnnnnnnnnnnnnnnnnnnnnnnnnnnnnnnnnnnnnnnnnnnnnnnnnnnnnnnnnnnnnnnnnnnnnnnnnnnnnnnnnnnnnnnnnnnnnnnnnnnnnnnnnnnnnnnnnnnnnnnnnnnnnnnnnnnnnnnnnnnnnnnnnnnnnnnnnnnnnnnnnnnnnnnnnnnnnnnnnnnnnnnnnnnnnnnnnnnnnnnnnnnnnnnnnnnnnnnnnnnnnnnnnnnnnnnnnnnnnnnnnnnnnnnnnnnnnnnnnnnnnnnnnnnnnnnnnnnnnnnnnnnnnnnnnnnnnnnnnnnnnnnnnnnnnnnnnnnnnnnnnnnnnnnnnnnnnnnnnnnnnnnnnnnnnnnnnnnnnnnnnnnnnnnnnnnnnnnnnnnnnnnnnnnnnnnnnnnnnnnnnnnnnnnnnnnnnnnnnnnnnnnnnnnnnnnnnnnnnnnnnnnnnnnnnnnnnnnnnnnnnnnnnnnnnnnnnnnnnnnnnnnnnnnnnnnnnnnnnnnnnnnnnnnnnnnnnnnnnnnnnnnnnnnnnnnnnnnnnnnnnnnnnnnnnnnnnnnnnnnnnnnnnnnnnnnnnnnnnnnnnnnnnnnnnnnnnnnnnnnnnnnnnnnnnnnnnnnnnnnnnnnnnnnnnnnnnnnnnnnnnnnnnnnnnnnnnnnnnnnnnnnnnnnnnnnnnnnnnnnnnnnnnnnnnnnnnnnnnnnnnnnnnnnnnnnnnnnnnnnnnnnnnnnnnnnnnnnnnnnnnnnnnnnnnnnnnnnnnnnnnnnnnnnnnnnnnnnnnnnnnnnnnnnnnnnnnnnnnnnnnnnnnnnnnnnnnnnnnnnnnnnnnnnnnnnnnnnnnnnnnnnnnnnnnnnnnnnnnnnnnnnnnnnnnnnnnnnnnnnnnnnnnnnnnnnnnnnnnnnnnnnnnnnnnnnnnnnnnnnnnnnnnnnnnnnnnnnnnnnnnnnnnnnnnnnnnnnnnnnnnnnnnnnnnnnnnnnnnnnnnnnnnnnnnnnnnnnnnnnnnnnnnnnnnnnnnnnnnnnnnnnnnnnnnnnnnnnnnnnnnnnnnnnnnnnnnnnnnnnnnnnnnnnnnnnnnnnnnnnnnnnnnnnnnnnnnnnnnnnnnnnnnnnnnnnnnnnnnnnnnnnnnnnnnnnnnnnnnnnnnnnnnnnnnnnnnnnnnnnnnnnnnnnnnnnnnnnnnnnnnnnnnnnnnnnnnnnnnnnnnnnnnnnnnnnnnnnnnnnnnnnnnnnnnnnnnnnnnnnnnnnnnnngggccacgacgtccgctccagcatggccgccatccggccccacctgggcgtctgtcctcagtacaacgtgctgtttgacatgtgcgtctcggcaggcccagagtgcagcggtgggaagggactggacgccctctgggactctgcctgccatgtgggtcactctgctctgtgcactggccgcaggctgaccgtggacgagcacgtctggttctatgggcggctgaagggtctgagtgccgctgtrgtgggccccgagcaggaccgtctgctgcaggatgtggggctggtctccaagcagagtgtgcagactcgccacctctctggtgagcccatccccaagggaggtcacctcacagggaggggcctggggattcatcctgaaggcagggggaagccgggtactgaggtccacgtgggtaggcaaccttgcccaaggctgggtgtgacacactgaggtcccttccccatctctaccaggtgggatgcaacggaagctgtccgtggccattgcctttgtgggcggctcccaagttgttatcctggacgagcctacggctggcgtggatcctgcttcccgccgcggtatttgggagctgctgctcaaataccgagaaggtaagagctggggattctgctcgaggggccagaaaaggcttctgacaaggaagtgctggggatggggttttgaggaatgagtaggagtttgctacatgtggaccccacttgttgctatggcatttaggggctactgctcaaataccgagacagtaagagttggggrtagacagaggttcccctggattctgcctgaagggccagaaaaggtttccaacaaggaggttctggggatgaggttttgagggatgaataggagtttgcttcatggggcagacaactcctggcagaggccccagctcgggcaaagacgcggcggcctgatggtagttgtgggttggtcccccgtgcctaggtcgcacgctgatcctctccacccaccacctggatgaggcagagctgctgggagaccgtgtggcygtggtggcaggtggccgcttgtgctgctgtggctccccactcttcctgcgccgtcacctgggctccggctactacctgacgctggtgaaggcccgcctgcccctgaccaccaatgagaaggtggggaccggccttctcctgacccctgacccccgggactctgttcagccctgaaggccaagccacttggtgcctctctgcccgcaggctgacactgacatggagggcagtgtggacaccaggcaggaaaagaagaatggcagccagggcagcagagtcggtgagggccggggtgggagacccaaggcgggtgggcagtggggtggctgtgccttaacttgaggaggaggagggnnnnnnnnnnnnnnnnnnnngcggcggcggtggaccgccgcgagagacggccgaagccggcggggcatcgcgaccgcctgccgcgagcgacagcgagcgccgtcggcaacgagcgcggccggcgacatcgacgaacacgcgcaaggacgacgacgtcgacgccgcgagcaacagccaccgcgggcacggtggcgaccaccacgtccgccgcggcacccggcgccggcgcgcgaccacggccgcgcggcgacggccaacgaggaacaacgcgagggggggcgaggagcccggcgcgaagaggcggcagcgagagaacggaccaggaccgaaggacgggcagccgggagacgacgtgtcagagagaagcgcgcggccacggtccgcgcgggggtcggcgggggcacagccgggcgccacgcgggcacgcccgcagcgcgggcgcacagcggagagggaacgcggccgcgcgcgcacacaccagcgacggccccgcgcacacaccacgcgcgcgcaaaagaaaagccgcgcaaccaggggacgcgtaccgcggggccgcaaacacggggacgaaaaagaacaaccgggaaggaagaggaagaaggggaggttaaagaaagagcaggaaggaggaataggaagggcagcaaaaagggaggaatagaagggggaggagaaaagggaaaaagaaggagggggaggaaaaagggagcagtaggaggcagagcaggaggagggggagggagaggaaggggaggagtaggagggagaggaggagaaagaggaggggaaggagaaggaggaggggaggagaaggagaagggggagaagaagggaaagaataaggggggagaagtaaggggaagggggaggagaagggggagaagtaggaggaagaggagggggaggagaagggggaggagtaggagggagaggaggaggagggagaggagggggaggagaaggagaggaggaggagagcacttgagaacctgagatgatgcccccatccctgggctgagccggaaccatgagactaacttgaacactgaccccacctttaacccaaccagggctgagcccagagacaaacctacccctgacctccaacactaggtccagcactgccctcaagatctctttttgtttgtttctgagtcttgctctgtcgcccaggctgtagtrcagtggtgtgatctcagctcactgcaacctctgcctcctgggttcaagcatttctcctccctcagcctctcgagtaactgggattacaggtgggttccaccatgcctggctaatttttgcatttttggtagaaatggggtttcaccatgttggtcaggctggtctcaaactcctgacctcaggtgatctgcctgcttcaaccctcaaagtgctgggattacaggcgtgagccactgcgcccggccgcacctggcctacgttcttaaccctgatctctgtctgccgggacagtcccctcacaggtcaccaatgcctcttccccagggagactggggtggggcgtgagccggggytccctgaagcacccctttgtccacacaggcactcctcagctgctggccctggtacagcactgggtgcccggggcacggctggtggaggagctgccacacgagctggtgctggtgctgccctacacgggtgcccatgacggcagcttcgccacactcttccgagagctagacacgcggctggcggagctgaggctcactggctacgggatctccgacaccagcctsgaggaggtgtgaggcctgggtggtggtgaggtggggccaggaggagggctkcctggaggaggtggtgttttgaaggatgaatagcgtgtttatgagcagcaaggacattcagggaggaggcatggcacatgaggagctctggtggctcagatrtcccttgggaaggcctgggggacccatggtgtaggaggggtggggggctcacaagcccccagttctccctgtcggtgtccagtctctgagcccctgcttgtctccccagatcttcctgaaggtggtggaggagtgtgctgcggacacagatatggagggtgcggccacagctccctgacccctgaccccagtccagagtgggaccagaggccaggtccccatccctggcttagtgtggcccaaggcatagcctttaccctatacctgattcctgatcccccaatccgtgaccctcaactttgaccctgacccctgatggccctgcagatggcagctgcgggcagcacctatgcacaggcattgctggcctagacgtaaccctrcggctcaagatgccgccacaggagacagcgctggagaacggggaaccaggtaagtccttcccagtggccctggggtcctcccagccacccccccacagcagcgtgagcactgaccctctcatccctcacagctgggtcagccccagagactgaccagggctctgggccagacgccgtgggccgggtacagggctgggcactgacccgccagcagctccaggccctgcttctcaagcgctttctgcttgcccgccgcagccgccgcggcctgttcgcccaggtgaggagggctagcaccagggagtcgcatgggagtccctgagttccctaccctggccgtccactcagtggcctaatccaaacccttacccccgtgtgtattcccaacccaaagcacatttattgagggcactggggagccatgggtggttgtagagcaggagcarggacaggtgcaagcaagcctggagggtggatggaagcagcagctgatgggctggtcccccagatcgtgctgcctgccctctttgtgggcctggccctcgtgttcagcctcatcgtgcctcctttcgggcactacccggctctgcggctcagtcccaccatgtacggtgctcaggtgtccttcttcaggtgggtgcagaaggaaggggctggtggcaggaagactagggacctgggggtacagccctgaccctacatctcccctcacacacagtgaggacgccccaggggaccctggacgtgcccggctgctcgaggcgctgctgcaggaggcaggactggaggagcccccagtgcagcatagctcccacaggtgaggcgtcttgttggcctggacctttcccctctctggcctcagttttcccatctggtccctggccagggagcctcagggggcacctggagcatcccctgtgcccacctgggagctgggagcctctgtggctccaggaacccccagaagctgggtgcccacagaccttcaccttgaccctgcagcgcccttgagtgtgcacagcccattgtctgcaggttctcggcaccagaagttcctgctgaagtggccaaggtcttggccagtggcaactggaccccagagtctccatccccagcctgccagtgtagccrgcccggtgcccggcgcctgctgcccgactgcccggctgcagctggtggtccccctccgccccaggcagtgaccggctctggggaagtggttcagaacctgacaggccggaacctgtctgacttcctggtcaagacctacccgcgcctggtgcgccaggggtgagccatgccctgggactcagtttccctggctatagcatgggtccttgggttgctggggctggtgtggtcctggaggaggaagtggaggggttggatgcccagcttggggctacgggctgggagtctcgcgtaccttcctttcctctttttttttttttttttttttgagatggagtctccctctgttgcccaggctggagtgcagaggtgtgatctcagctcattgcaacctccacctcccagtttcaagygattctcctccctcagcctcccgagtagctgggattacaggcacgcaccaccactcccgactaatttttgtatttttagtagagatggggtttcaccgtgttgccaggctggtctcgaactcctgacctcaggtgatccacccgccttggcctcccaaagtgttgggattacaggcaggagccaccgcgcccggctttctttcctgtttttgtccacccttgactctgtgctcccctctcaccatctctctctctgtcccacatccctgtctgcctgtgtctctgtccatctctcccacagcctgaagactaagaagtgggtgaatgaggtcaggtgaggaggggtctagcttggggtcccctgccccagttccactcccatgccctctgcctgccccctgggagctctcccggcccccccggccctcagctccccttccctgcctgcatggccccacagrtacggaggcttctcgctggggggccgagacccaggcctgccctcgggccaagagttgggccgctcagtggaggagttgtgggcgctgctgagtcccctgcctggcggggccctcgaccgtgtcctgaaaaacctcacagcctgggctcacagcctggatgctcaggacagtctcaaggtgggaactgggggggcaggtgggcgtcctgtcacagcaaggtccaaccccattgctctgaccctatgaccttgacccccacccagatctggttcaacaacaaaggctggcactccatggtggcctttgtcaaccgagccagcaacgcaatcctccgtgctcacctgcccccaggcccggcccgccacgcccacagcatcaccacactcaaccaccccttgaacctcaccaaggagcagctgtctgaggstgcactgtgagtccctccaccctgcatgtcctaccctgcacgtcctaccctgcctccatttctctgtcgtttggggtggtgggagctggatttgaaccctgacacactcttgctttataaatgggggatagaaactgttcctctgctccctaagccagggaaatgggacctcctcagactcagcgggccccagcctcccccacacatcctcatcccaccaacctttatcctgcctgagacctgtacaacctctgctgccaaatcccaggcaccctcatccctaaattgcccctgccatctctgccactgctgactgccccatagacctttgtcccatcaatggcgtgttcagctctgctctgagcaacccatgcaccctcaccctacaacagctctcatgtcttcacctccaggatggcctcctcggtggacgtcctcgtctccatctgtgtggtctttgccatgtcctttgtcccggccagcttcactcttgtcctcattgaggagcgagtcacccgagccaagcacctgcagctcatggggggcctgtcccccaccctctactggcttggcaactttctctgggacatggtgcgggggctgcttggacgggtgggggcccagccactrcttgccactgccctrtctggccccttgtaggcaggggcttgtccaagatggcctgggtaaagtcttgaggattgtgggagactttgtgccttcctactcaaaaagcaaggaggtcagggtgggaacagggctgagggtggcagtgcccacctctttaggctgataaaggtaactgccatctccaatgcagtgtaactacttggtgccagcatgcatcgtggtgctcatctttctggccttccagcagagggcatatgtggcccctgccaacctgcctgctctcctgctgttgctactactgtatgggtgaggcccccagtccctcagggcctattcttactgaccccttactgccttccacattaatgctgctgagatagaactctgcagtgactcccaaggagaggatatggaggtctgaggtgatgccgtgtgtgatccaattcagtggtgtgccaaggtggccttaaaagctcatcttatcctgactcatattagtagagttctaaggcagcccatgcctgtaattccagtactttgggaggccgaggcaggaggactgcttgtggccaggagtttgagaccagcctgggaaacatagagagacccacctctaaaaaagaaagaaagagasagaaagagaaagagagaaagaaaaaaaaaaaaacagaaatgtgctttgggtgaaaatgtcaaggtctaaggcagagaagatgggaatggagatttttattcctctcwgggcttctcagtctgagtggttactccagtgactcctattgtcccttcagctggtygatcacaccgctcatgtacccagcctccttcttcttctccgtgcccagcacagcctatgtggtgctcacctgcataaacctctttattggcatcaatggaagcatggccacctttgtgcttgagctcttctctgatcaggtggggcaccacgaggctggggcttgggctgggttgggtcgttggactcagcccctgaccaacatccgtctcccacccttgagcagaagctgcaggaggtgagccggatcttgaaacrggtcttccttatcttcccccacttctgcttgggccgggggctcattgacatggtgcggaaccaggccatggctgatgcctttgagcgcttgggtgagaacttcctgtcaggtggggccatggctacagatagctagcacccttggagacctagagttaattatacagagtggagaaaaacagccccccagggagacagccagggttcttaggtggccctaaggttgggccaagttggaggtacaagaaagcagccataaaaagctaattcttagattacatcacaagaggcctcttctgttttctatgccaattagactccagctgagtggcctatccaatttgtgttcctttcccttaagaatccagagtgacatggatggagaaagggccagaaaccaagactctcatggacccagtccctcctttctatatccacaggagacaggcagttccagtyacccctgcgctgggaggtggtcggcaagaacctcttggccatggtgatacaggggcccctcttccttctcttcacactactgctgcagcaccgaagccaactcctgccacagttagtgaggtctatggagagggtggcaggggccaaggacctactttaagcccacagatattctgtccccaggcccagggtgaggtctctgccactcctgggagaggaggacgaggatgtagcccgtgaacgggagcgggtggtccaaggagccacccagggggatgtgttggtgctgaggaacttgaccaaggtaggtgtggtcaggtcgactgctgggtggggggtgctcccactggcccactcacctttctgaargacctgcactctcccaggtataccgtgggcagaggatgccagctgttgaccrcttgtgcctggggattccccctggtgaggtgagtccaggggtggaggccaggtgcagggacagtgagtggctgccctactgcatgccctgcccatcatcctttactgaamacctactgtgtatccaccaccttttattgggcacctactgtatgccaatatttgtgctcctatttttattttattatattattatttatttatttatttatttatttatttatttgagatggagtctcactctgtctcccaggctggagtgcagtggtgggatctcagctcactgcaagctccacctcccgggttcatgccattctcctgcctcagcctcccgagtagctgggactgcaggcgcccaccaccacgcccggctaatttttttgtatttttagcagagacggggtttcaccgtgttagccaggatggtctccatctcctgacctcgtgatccacccgcctcagcctcccagagtgctgggattacaagcgtgagccaccayacctgccctattttatctttttttagagacggagtctcactctgtcgcccaggctggagtgcagtggtgagatctcggctcactacaagctccacctcccgggttcacaccattttcctgcctcagcctcccaggtagctgggactgcaggcgcctgccatcacgcctggctaatttttgtatttttagtagagacagggcttcaccatattagccaggatggtctcgatctcctgacctcatgatccacccgcctcagcctcccaaagtgctgggattacaggcgtgagccactgcgtctggcctgtgcatttatcttgagccaacaaaacctcattaagcacctactgcatgcttacctctgttaaacacacactgtgctcactaaagaggtgtactgaatacttttgtgtccatcaacgtttatcaaataccaatagaatttattggacccctattgtatacacatctacatcaagcacttgctcacagccagcatttatcaggcacctgctttgtaccagttcacattcaagcacctactatatacaaatgtatttgctgtgtgccacttattggccacctactagggctggtacacatctgcaaacaagtgctgtttgttagcacacattgcagtatatatatatatawtttttttctttttttttcttttgagatggagtctcactgtcacccagcttggtgtgcaatggtgtaatcttggctcacggtaacctccgcctcccaggttcaagcgattctccagcctcagcctcccgagtagctgggaccacaggcacatgccgccatgcccagctgattttgtatttttagtagagacggggtttcaccatgttggccaggctggtcttgcactcctgacctcaaatgatccacccaccttggcctccgaaagttctgggatcacatgtgtgagccaccatgcccggcctttgtttttttctttttttttttttttgagacaaagtctcgctctgccacccaggctggagtgcagtgtcacgatctcggctcactgcaacctctgcctcccaggttcaggcgattctcctgcctcagcctcctgagtagctgggattacaggcgcccgccaccacaaccggctaatttttgtatttttagtagagatggggtttcacaatgttggtcaggctgatcttgaactcttgacctcaggtgatctgcccacctcggcttcccaaagtgctggggttacaggtgtgagccactgggcctggcccacagtatatctttactaagcacctactgtgtgctggccaacctctctaccttgggctgactgtgcacctagcctaagtacacacagtgtgccaggaaacatatggagagctcatgccctgatatttgttgagcactgctgcacacgacctttatagggtacccactgtgtgccaaaagccattccctgctaagtgacagctttatgcctcgctacataccccaatatctgcctagctcccccggggccccacccacggccttccatgtggacactcagaaatcagaggtgctgaggccaggcgtggtggctcacagctgtaaccccagcactttgggaggccaaggcrggaggatcacttgaggtcaggagttcgagaccagcctggccaacatgccaaaaccccgtctctactaaaaatacaaaaattagccgggcttggtggcacacgcctgtagtcccagctactccggagcctgagacaggagaattgcttgaacccaggaggtggaggttgcagtgggccaagatcgtgccattgcgccggggtgacacagcaagsctccgtctcaaaaaaaaaaaaaaaaaaaaaagaggctgggtgccgtggctcacgcctgtaatcccagcactttaggagttcaaggcaggcggatcacaaggtcaagagatcgagaccatcctggccaacacggtgaaaccccatctctactaaaaaaaaatacaaaaattagctgggcatggtggcaggcgtctgtagccccagctacttgggaggctaaggcaggagaattgcttgaacccgggaggcagaggttgcagtgagccaagatcgcaccactgcagtccagcctgggaaacaagagcaaaacttggtctcaaaaaaaaaaaaaaaagaaatcagagatgccggaaccagggcctggggcctcactgagcaccatctgtgggcatccctgtagtgttttgggctgctgggtgtgaayggagcagggaagacgtccacgtttcgcatggtgacgggggacacattggccagcaggggcgaggctgtgctggcaggccacaggtgaggggtgccaggtagggtcagggtggggcrgggttggccctgacgtccttgtgcttccccacccctccacctccagtgaatggactgggctcactgccccacacctgcatggtctctgagacccctgcacctctacctcccacacgcggaccaggccctgagacacccctgtcccttatcagcgtggccctggatgggtgggccctgagacccctgtgttagccaccagtatggtcagggactagccagctctctgagcccccggcgcccccayccccagcgtggcccgggaacccagtgcygcgcacctcagcatgggatactgccctcaatccgatgccatctttgagctgctgacgggccgcgagcacctggagctgcttgcgcgcctgcgcggtgtcccggaggcccaggttgcccaggtgagcccactttgtccccaccgctctcacctcccagggcccacccgacccaggccgygcctctaaagcctggcccaatcccgcactctctcgccttggctccatccctgtccctgcccccagaccgtgcttccttcccctatacctctgtcccccatcctggtccaatagggatgtggctagcccgcctctttgccccgcaacaccaagttccaccattctcattggtccacccacccttccttccgctgcacgttgcccctctctccttgactctgccttctgyggccctgcccacttgctcctcttctgcctaccccctagggcttcgcgcctttctcgctggggtcacggtcacattctcactctggccgttcccagtttgcagccgtttcactgcctcttccatctgcttgggggtcttgtctttgccctggcccgccccaccctcacactgtcccaccccatgccctttctggccctgcctcatacccatgttggctccacccacaccatggccctgctccatacccatcccagctccacccataccaaggccccaccccatactcatgctggctccacccacaccatggccccgccccatactcatgctggctccacccacaccatggccccgccscatactcatgctggctccacccacaccatggccccgccccatactcatgytgsctccacccacaccatggccccaccccatactcatgctgtctccacccacaccatggccctgccccatactsatgctggctctacccacaccatggccccgccgcatactcatgctggctccaccagtgtggccccgccccatactcatgctggctccacccacaccatggccccgccccatactcatgctggctccaccagtgtggccccgccccatactcatgctgtctccacccacaccatggccccgccccatactcatgctggctccacccacactatggccctgccccayacccatcccagctccacccacaccatggccccgccccatactcatgctggctccacccayaccatggccccgccccatactcatgctgcccccaccacactatgtcccattctcacatttgccctgccccatgcccattrtgcccctgctccacactcaatgctggccccgccacactgtggccctgccccatactcatcaatatgagtccccatgcctactctggccccaccccacagaccgctggctcgggcctggcgcgtctgggactctcatggtacgcagaccggcctgcaggcacctacagcggagggaacaaacgcaagctggcgacggccctggcgctggttggggacccagccgtggtgtttctggtgcgtgggagcggtgcctgggtggggtggggcctgcgacggaggcggggccttgcttatgggatcttccgtgctccccaggacgagccgaccacaggcatggaccccagcgcgcggcgcttcctttggaacagccttttggccgtggtgcgggagggccgttcagtgatgctcacctcccataggtgggccgggctctgatgccctgggctgtggttaaggtgatccaggcctggagagagagccccaaagyacaaggccacaggggatggggggtcctggccctagtggggcgagggcgccaggccccggggtgtaaggacacacagaggtgggacgcggcgccgggatcagaacggtctggggaagagtggggrgatgtccacaccagaagggtggcccaggccgggggaagcaggcagtgtggcgccaggcacaggtggccccggcctcacggagctcgtggtgccgggtcccgacagcatggaggagtgtgaagcgctctgctcgcgcctrgccatcatggtgaatgggcggttccgctgcctgggcagcccgcaacatctcaagggcaggtgagccggcgcggcctccaggcaggtgtggggtgagggtgggcacgtaggtaggctcaggggagaggccagacgtagagccgggtgaggaaagtttggctccaactggagagatggccaaggctttagattgtcctgcaggggtgactgagggggcgagacaggctggggtgtgctgggggcgcaggaccaggaggcgtsagccgggggctctgggtggatttagaagacayaatcaggtgtgcgttggagtaggtgcagcctggagaggtgagggtggattgatgggtggagttaggggagggcctggttagtgggcggggccataggaaagtgsggcgggggtatttattgtgtgggcgggggtagagtgcaagggcgaaagaggagtgtccgaaaaaggagtcaagtggggtgatagcttcgagagcaacctgggcaacctagggagaccccatctctataaaaaatttaaaaattagctggacatggtggtgtgtgcctgtggtctcagctacgcgggcggggggtggcgggggactgasacgggaggaccacttgatcgctagggtagtrcaagtatggggcggggccagagagtattaggggctggagggtgagctgaggtgggacctgggaaaggcccsatccggtagccctggccccactcactgcagattcgcggcgggtcacacactgaccctgcgggtgcccgccgcaaggtcccagccggcagcggccttcgtggcggccgagttccctggggcggagctgcgcgaggcacatggaggycgcctgcgcttccagctgccgccgggagggcgctgcgccctggcgcgcgtctttggagagctggcggtgcacggcgcagagcacggcgtggaggacttttccgtgagccagacgatgctggaggaggtgatcacggcgccggggtcgggctgcgggaggcaggctgggggccaggcccgtgggctgaccgtccctcttgtcccctctgggctgcccaccgctaggtattcttgtacttctccaaggaccaggggaaggacgaggacaccgaagagcagaaggaggcaggagtgggagtggaccccgcgccaggcctgcagcaccccaaacgcgtcagccagttcctcgatgaccctagcactgccgagactgtgctytgagcctccctcccctgcggggccgcggggaggccctgggaatggcaagggcaaggtagagtgcctaggagccctggactcaggctggcagaggggctggtgccctggagaaaataaagagaaggctggagagaagccgtgstggtgaaaccgtgtgcatgtgtgtccttgagccaggctgcacacatgtccacacagctgcctgcacatgcgtctggatatggctggccccttgcaagctgagtgtgcacatacgggccaagtggcgattcataggacacaggtgtgagcgtgcctacagctgaccggatcccagctgtaaatgcctctgtggccagcccaggagttggggatgtgagtgcgggcctcataagggcctggtcacaccgtccctgtccccacgtccctgcgtgcctatgtggggctggcgcctaagggcggtacctgtaagtgcctggccataaagtggggatgaggtcaggactcaggaatgtcctgggaagcttacaggagcccggtgtcccggagcacaggccagggccgggccagaagcccatccgacatccagctgaccctcaccctctgaccccagccctcagcgccatgagtcgggggcaaagagttctcaagggtctgctgggctgggtttgcacttggacctgggcctggagagccagacttggagcaaggggctgtggccttcatgtcctgtgccccagagatctgcccctcccacccgaggtaggtgggaatggggtttgggaaaggaaagaggttggggttttgggattgggggtggggttctggaaggggacagcagggagacttggggaggggggagagagttcacactgcggggtgggggttgggggaaggtaggaggctgggatctgtatgcctgcagatgccccagctcttggccaatgccgcctcaggctgttatcagcaacgggtgcctgcgtcctgctgcccagcacgtccggtggtccagagtcactggaatgcagcttgggaggcggggctggggaccttagctaagggcaggtctggggcaacatgatatggcccacagggctgctgagaggtaaccaggtgtcctcagcatattctgccgatggtggggtccacaccacactttggggacccctgtgcaggcagcccaggaccaggtggacgtggggacccagacggacgtggggacccagacggacagggcccggtaacctggattgttctgacttcctggacgtctttgcccccagggtttcggttctgggcctcagtttccccacctgtcctcgacctgacccacttcacggggctgcagggcgggtgatgggggggaccctactctgcccggccctgctggggcccggccacaccctagggtctgcaggagaggcggtggagcgggcttgccttcagggaaaagggggctgcaggggcgcagcttcggcctgtgcgtgtgtctggggtctgagggcgaggctccaggagcttggtggcgtctgagcgcgtgtggaggtccgggtctctgcgtgtcatcgtgcacgtgtctgtgcacgcccactcgcgtccgggagtgagagtcagcgccctgcagtcggccgccccgtgcccgccagcgtcaggcaggggctcccggtcccaccccgcgagcggcgcggctccgagctcccgaaggcggaagcggggggcgcggcccggggctgggggcggggcctgcgacctcaccttcgcgcccactccgcagagccgcaggctgaggccgggaagggtcgggggcgaggccgcgtcgccgcctccccgaagccttttcctgttggggggagggcccgccagtgacggccgggcctgtcacgtgggcctgacagctggggagggggtggccggcgacaatgtggtcccgaagcggccagcgccgggagctgcagcgctgagacccccagcccgccccctcgggctcccggccggggccccatcatgttctccaggaagaaacgagagctcatgaaaaccccttccatctcgaaaaagaaccgcgcgggaagccccagcccgcagccctcgggggtgagtggagcccgggtgagacccggagctgacgccgggccgcagggggacagggacccgccctgtgctcggggctcatgctggggcggcggctgggggctcgtgccagctacagcccctaccgggcgggacggcaggggccacagcagagaggccgggaccccggcattcagctcacggtagggaccctgggagtggtggccgcctccctccactccatccagggctggccgcggggcccagggagcaggaagggagggtgccgggttgggacgatgttgtgtttgggccgctgcaggttgggggcttaggcaatctgggggctctgggggccgttgagatgggagggctgtggcctggccattgggctgaaggttgaccgggcagcagatcctctaatgggatccaccaggttcagaggttggggagtgtccccaggcctggggtgtctacaaagctggggggggggtctacagagcttgggggtccgggatgtctacaaggcctggggctgcccataggctctggggttccatggacctttaggggacagacagagtcagaagtgtgttcacttaaagcacctgcgttgtaggagcctgaggggggcttgaagggctgaggaccctccccacccccaccaggaagtggggacccccctcccgcgcctccccgcaggccccgccccggctgtggtttgggcaaggaccgttgtttgtgaaagctctagggaagaggatgttgggtaacaggtgggggggtacactaccaaatctcggccctgtgacctctggcctttgacccctgtggggtcagggtgatggtggccctccacagccccacttcatttctggggaaactgaggccgtgtccaggccggaaaatccctttaacgagctcccctcggacctgcccaaggagctgcccaggaaggatggggctgacgcggtgttccccggaccaagcctggagccgcccgctgggtcctccggcgtcaaggccacagggaccctcaagcggcccaccagcctgagccgccacgccagcgcggctggcttccccctgtcgggtgctgcctcctggacactgggccggagccaccggagcccactgacagccgccagcccgggcgagctgcccaccgagggtgccggcccggacgtcgtcgaggacatctcccatctgctggcggacgtggcccgcttcgctgagggccttgagaaacttaaggagtgtgtgttgcgtgacggtgagagccacggggacaccgaggcctgggtggaagacagagccagacccaagggaggatggagggagggacttggggaggctcagaagggagggaggctcagatggcagggagggctgtgtggaagaggccatgacagctaaggctctgagggatgtgtaggagtttggtgggggagtccctgagcgtacactggctcaagagggtgcccactttattttttttaaaggatctgatggcaattaggagggaaaggcagaggaaatgtcccatgcacaggctcagaaacacggaaacagagaatgcatttgggggccaaggtgtggggtgccgctggtgtaggatgaaggcatgacaacgccaggcagaagggcaatggggagccatagaaggtgttagagcacaggacagatgggggcagatctgtgtcttggaatgaagcaaactgggggttggctgaggtctgggtggagagagattcaggaggcatggcgaggggcaggatggggtcatcaggcggcggaggtgctgggacccagcggcctgcaggccggcagttccgttttctcctccacgcggccgctgacagccctgcttcctgccgagttattttcatctgcttcctgtttgtccctggcagcccaggcgggcacctcatgtgctgccttcagcccccggctcctcccagaaaccacagtgccagggtcatgccaggcgctctgatctgctcccagcagccgcccattttacagatgacgaaactaagtctctagtgaggccctgacccctggctcacccagccagggcagggcagagccaggactggacctcaagtggtggagtggcctctgcaccttcagggcactagttggggaaggcccggtccccactgggaggagtgggagcccccgggttatctggtcccaggggcgggggctaggctgctttcctggggaaaccctaatctcggttcctttccgatcctggcgcttccttggaggcctggcctgggcggggctcagctcccaggctcctgcaggaggtctgaactgggccagccagggtggggcactttttttttttttttttttgatacagggtcttgctctgttgcccaggctggagtccagtggtgtgattgaggctcactgttaccttgaactcctgggctcaagccatcctcctacctctgcctcccgagtacctgagactacaggcatgagccactgcacctgatttattttattttatttattttatttgagatggtgagatggagtctcactctgtcgcccaggctggagtgcagtggcgcgatctcggctcattgcaaccttcctctctcgggttcaagtgattcttctgcctcaggctcccgagtagctaggactacaggtgcgtgccaccacacctggctaatttttgtatttttagtagagatggggtttcaccatattggccaggttggtctcaaacccctaacctcgtgatccgcatgcctcagcctcccaaagtgctgggattacagcaggcatgagccaccgtgcccgggcttttctttttttctttctttttcttttcttttctttttttttttttttttttgagacagagtctcactctgtcacccaggctggagtgcaggggcgagatctcagctcactgcaacctccacctcctgggttcaagtggttcttctgcctcagcctcccgagtggctgggattgcaggggcgcgccaccgtgcccggctaattttttttctttcttttttttttttttttagtagagatggggtttcaccattttggccaggctggtcttgaactcctgatctcaagtgatccacccacctcggcctcccaaagcgccaggattacaggcgtgagccatcgcgcccggccagtttttgtattttttgtagagaccggggtctccccatattgcgcaggctggtctagaactcccgagctaaaaaccgttctcccggctccgcctcccaaagtgctgggataacaggcctgatccaccgcgcccggctgggggcgccttctgtgcgtctcggggccgccccaggccagagaagaccctggcggctaggatgtgggctctagtcccgatgtttctcagctgctgagaccctggcaagccccttccctctctaggtgtcaggtgacttatctataaaatggggccacctgcatgcagcgatggttgtggggtccaccccacagcttggggacccgcgttcaggcagctaggaggggacccacatggacggtgccaccccgacacttcccgggcttcctcgttcccgggcttcaggtctgggcctcagtttccctgcccgtcctcgaccctccccacctcgaagctctgcggttaaggaaggacccaggctggggcgaacgggaccccagggcggggtttccctcgcgggggcggggcctcctgaccggccggagccggtttggccaccggagacccccatcggtcagctgccaggccccacgcgctcgcggtctccgcgccccgacggctgcgccatgtgtatctgcgggacggcgcacccggtgctggacgagggccccgtgcgctgccgggcgggcccccgaggtgaggggacaggtgccgggcgctgggtcccgccgcgtccgggagcacgtggcgctcgggccgtttgccgcccgcggtgggggagcagcggctgccgcgcgcctggcctggccgtgcgcacctgggcatccctgcgctgcgcaggggtcgcgccggccgccggcttcccgggtagggggtgtgcggggacagccgggggtccgtgcgccggc

SEQ ID NO: 96707 - DNA, 53885 bp, Homo sapiens
cttgtaatcccagcactctgggaggccaaggtaggtggatcacttaagatcaggggtttgagatcagcctggccaacctggtgaaacactgtctctactaaaaatacaaaaattagctgggcctggtgggtcacgcctataaccccagctactcgggaggctgaggcatgagaatcactccaacccagggaggtggaggttgcagtgagccaagatcgcaccactgcactccagcctgagcgacagagcaagactctgtctcaaaagaaaaaaaaattcttaatagccccaaatataaaacaactcaaatgctcagcaacgtaagaatggctaaagtctggtctgttcatacaatgaaatggaatacagcaatgaggatgaacaaactactcatgtatgtgacgatgttgatcagtctcacaaacgttgtacagaatgaaagaaactggacacaaaaccagaccaaagtaacctaacattgttagaagtcaggagagtggctacctttggtggggaagagggaagacctgaagggagcttctggggtttgccatgttgtgatttttgtttgtctttttgtttttgagacagggtctcgctctgtggcccaggctggagtgtagtggcacggtgcgatctcggctcactgcaacctctgcctcctaggctcaagcgatcctcccacctcagcacccttactagctgggaccatcatgcctcgctaatttttgtattttttgtagagacgaggtttcaccatgttgcccaggctagtctcaaactcccaagcttgagacaccagtctgcctctgcctctcaaagtatgtttcttgacctgagtgctggttatatgggtgtgcccaatttataaaaagtaaatgagctttgtgagcttttctgcatgtgtattttaattcaatgatttataaagagtcagtcagtgtggctgggccatgatgagggaggggaaggtagtattgtcagaatggggccagggctcggattttaggattaagtctaagtgcagccttctgtttgaccagaatggaggcttctggagagccctggagcttgatgaggcagagcagaagggaatgagaagtgttcatcctcaggggggtaagccagaaggcaaggatgggtatgggatgtcacctacacaggaggtatcaataccaaatgtttatcaagcacataccatgccagtcactgctctaagtgaacagaacatatgtgaatacctgcccttctggaatttacatcctggtgggtggtgagtggagagaatgtgctctctaggcaccaggctgaggcttattataggggttattgcaccaatatacccaggtacttggtggctggggtaacatgcccctttcacttccatagtcccactaactgcagggggagggtagagagtgctccctttatacattagtactctctgctttggggtacactcgagttgggagactggccccacaaagcagcactggggcaggggaagccctcagggtcttcctcacttgcaggaaggctcatgcagatatggctcccgcctcagccacatgtaagtggatttgggttctcctgagacccagtagctagaagtagggcattgcctctagtggtgaatttggcaagccagattttcttcctgtagccagtggctggaggctcccacaccctccaaagccccaggcagggacaagcacagagatggtagcaatgaatatatgaggtggtgatttgaatgtgggagctgtggaaggaagagatgccaagagggtgaagggaagcccacacttaacagagatgcttttgaaagaaacaaactcagccagggccagaacaagtcccctactccatctgccagactgagagacagcaaccctggtgcaaggagacagcctatttccacagaggaagaaagtaagggagaaaagacttcttgatttcgagacacagaaagacaaagagaggaaagggggtgaggagagaaacagacacacgtgcacacacatacacacacacagatgcatatcttgagttagaggtcatccagatttggggcagaagggaatacaggcatccagactcaccaacacacaggacaggggcaaaccctaaagcccagagagaagcagagaggacagggaggggagacaaaacacccacccttagaaagagaaagccctgcactcaccctccaccttaatccctggtctccctggcttctcttcaaacgtaggaggtcccagtgaggtggtctggctctaaagatagctgccaacaatttcttcccatgtgccacgctgtcatccagaggagccccaagccgtcatgtaagaagctgaggttaggctgggcacagtggctcatgcctgtaatcccagcactttgggagaccgaggcaggtggatgacctacggtcaggagttctaaaccagcctggccaacatggtgaaaccccatctctactaaaaatagaaaaattagctgggcatggggcgggcgcctgtaatcccagctactcgggaggctgaggcaggagaattgcttgaacctcggaggcagaggttgcagtgagccgagatggtgccactgcattccagcctgggtgataagagtgaaactccttcttaaaaaaaaaaaaaaaaaggctgggtacggtggctcacaccgctaatcccagcactttgggaggccgaggcgggcggatcacgaggtcaggagattgagaccatcctggccaacatggtgaaaccctgtctccactaaaaatacaaaaattagccaggtatggtggcgggcacctgtagtcccagctactctggaggctgaggcaggagaatcgcttgaacccgggaggtggagattgcagtgagcagagattgtgccactgcactctagcctgggtgacagagcaaggctccatctcaaaaaaaaaaaaaaaaaaaaagtcaaggctgttctgctggagagaggccatatggaagaggactgaagtgccagacatgtgagtgaagaagccatcttagatacccagcccagttgagccttcagatgactccagtcccagccaccatctaactacaactacctgagacccctagaagagccaccttactgagcccagtcaacccacagggccatgaaagagaagactgaattgtggttttaagccactaagtttttaggtgtttgctacacagcaatatacagccagaacacccagggaaggttgcagcagcccttttaaagcttttgacacccccatcccatatccccttcacaacacaatcaacactagcgagtcagactttcagcccctttaattaggtgctctgagaagaggtcagaatggcaggcagggggtggggaaggcggtgcttcttgagccccacttagcaactggtcactcatcctctggcagctggatcttgctggggtcgaagcagttggattccatgatgggaaggccattggcctctcggtatttcacaagcctctcagcttcgcggcgggaccactctttcatcctggtagtgcaaatagcaggggtagacgtgagggagcctcaactgataccaatccctcatctcagctccccattcccaatggtgcaggaacaaaactcctggcagaatccccttcaacctccatccctgcctctgcctcttacccatcccacgctcttggacaccctgtgcacctgtagtcaggcagataggccacaaaggtgctgccaaggaccaggatgatggagacgccaaagaagaagacaagtcgcatgttccagacgtccaaaacggggtccttgtcataaccatgggagtctgggttctgtggagaaatagaggtcaatgagggcttcctgctgctccacaaagccttattctggccctgcataacttggtctccatgtgcccctctcactaaattcctctgtttccattcttgggatatgtcaagctccttcccactgcagggccactgcacttgctgctctctctgcctggaaagcctttcttccagctctagtcatggctggatctgtctcctcattcaaggttttagattcatcaccacttccttcaggaggcactccctagttaccttgtctttcaaagttgaagcataggaaactgctatttttataggtcacaaatggttgaatactggcaatttcttatagctcaagctaatgaaatagccccctacacccaagtcattctctatccacttatcttgcttaactttgtcttcacatcctctcttccttctgtctctttctagtctatgtttacctaagtagcatactttccccattctctgtatatcatacattctcatgttatattatctattatactactttgtattattgttttctaatattttactgtttattttctgtcttccccactatcatgtaagctctatgagagcatgggctttgtctgatttccacactgctgtatccccagggccctgaactgagcctggcgtacagcaggccctcaatacatatttacagaatgaacaagcatcctatatatccaagccccttaaccagaggttagtattgatgaagtacttattatgtgccagtcttttcacatagaaacacctcacaatatctcagtgaggtgaaacatggcaataataaacacattctagtgctgagtacatacttacgaagtgccagctgctgttctgaccatttttactcatttaattacatgaggcaggtggggtgtcctattttttagaaggtgtcctattactgttcccatcttacagacaaagaaactgaggcaccaagggtttatgctaccaagatcacacgggtgggtaaccgtcagtgctgcctgatttcacagcgtctgctattaatacagcacagcagacctggtagccctaaattcaaataccagttccacctccaccatgtattcagttatgtgagctagggcaatccacttaacatctctgtgcctcagtttcctcatctgtaggatgagtataataatagagcccacctcgaaatggggtttgtttcgagtataagatgagctaatgcatgtcaagtgtttagaacacagacggggcccggagcggtggctcatgcctgtaatcccagcaccttgggaggccgaggcgagaggatcgcttgagccaggagttcgagaccagcctgggcaacatagcgagatctcgtccctataaaaaaaaaaaaaagaatgcagacggcaacgagcaagtgccatatcggtgtttagtattatcgttgtactatactgcttctaacgtgttttgagcgctgtccacttgaggtgtgatttctgtctgcaaaataaaaccaatcctgcctctggccctggaacgaagataccgagagacaaaggaggaacacaaggtaggcaaaattcccaagtcttctaggctttcgccggccgcgcagtcctctactgcctaagaacgtcctctacagcgccccatctgccgatcccggactgaccccttcggggttccgtccccactaccccccccccccccccgcctctcaccttctcatacaagttttcgtcctcgggttctgggtcctcttgccacggtgtggtcggttctgggggccgctttcccgccacagcggacggggcgaccacagtcctggagaagctagattcccagcggacgcgggcggccgggagccctcgcgtcgccgctgccgccaaaagacggcgagcgctcaaaccaaacagcccagccgccatgacagatggtgctgcagggtctcaggggcggggaaagaaatgcgactgtgcgcagctgcagtgggtgcgagcgcgacaatcatcgccccgcctccgccacgctatataggtcccagatctgatttggttttccaatgaggcggggcgttgagcaaccctctttgcctccagttgtcgtggcttcgtggggccaaccattttcggccaggctgagaaatttcttattgatgggtctgctcatttcctgcataggaagaaatcggtgacatttgggtggatacagttcccagccaatcgccccgagttccctcgcccactggggaaagaggcagagcttccgctagtctttcatcttcaaaggaaatcaagcttctaaaaagcgggccctgccgaattggctaatagctactccttttctccactaggggagcgttcgcaaggggtgtggggaggtggccagcgcttgccaatcagaggaggccagggctgtcccctagcgggcggtgaccaatcgccggggccggccagagcgcgcttccttagtaggtggatggtggtcggagcgccgactcccttctcgtcgtcgccattttgagctggtgactgtggccggctgggagtaggcggcagtgagtttccctgggagggcagcgcgcttggcgcttctcccctccccccgatctgcctccagtctcggacttggttgttgcgcgctccggctccggctgagctgggagagttggaggaggtggcggcgggcagaggtgatgtctgggagccctyccttgacagcccgggccgagaaggtgagcgtcgacgctggtcgtgggggcggaggtaaggggcccggggcggggacgtagaggaggcgcgagggcggacttcgggtcgggggagatgcgcggaacggaggggttggtgcaatgtctcaacccgggagggtttttttttttttggttttttttttttttttttttttttttggtgtgagcaaaggcgcgtgcgcgactgggacatgggatgggtgcatgcgggttgggggaagggagggacggatgggagtgggctactgtggatcactgtgtcggctacatcgaagtttatcagtggggaagcggttgtctgcgactttgagtttgtgcataggagaggggatgctgctctgtgttactctggtgtttatcggtccatggggaaatattctgtggttctggtctctattcctgggggatcggaggggggatgtgactctggtctttaccctttgagggggggcggtctgtgactctgatccttatccatggggcggggcttgggggacgactgtcttttgattgaccctaacccacttattgggtgggaaggggcatgcagggaatgtgtgtgtgactcattgccccttcttttggggagtttgtatctgtgacactgacgctcatccatggaaaggggacccactgtgtaattgtggtccttactgtgtgttccttctgtgatgtgggcccgtagttatttggggctcgtgtctgtgactggcccttggctgtggtggatgttactgtgtgactctggcccctttgccagagtctcttgaaggtttttgtgctctcagacgccagtgcctctgtgtgattctaactcttgcccacctgggagcaggtaactcgggttccctgtggcttgaggaggaagagaaaattggagtgtgtttgtctgtgtatgtgtgtgcacgagcatagagcaaaggtgtggcagcaacctagtgttgagcaggtgctattattgcctggctttacctgcttcttattcagagggtggggcctgaagatctgggattcatcctgacctctggctgggtcacagggttctcaggactccctgagttctcaccacagccctgagggttggatgaagtggctgctgctccatcccaatagaagagcacagtggttcagaacagcctccaaaagggccccttttgcctctggaaaacgggcttgagccctggggagggaaccaccttaggaccgggctgcacataagagacagggctcagggctgagccagttgctgtgtgagggccaaggctgtgttggccaggagcccagggaggtggcagctgtctcgtcgccaagttcgccccttcacacacccccccaagagcctttcatggtcttttgctgccttataggggacagccagcagcttgttgggaggatgagatggtcccttggggcctgtggaaggagcctggggcccccattgttgtgaagtcttgtctgatgtgctgaatctcaggcaagactttcagccctgagagtcccctacccccaccctgggatgcagccccaggcttgaatttgtctacctgtcttaggtggcaaagccctgatcacactgtgggtggccccgccaggtctctctgcaagatgccccctgtctgctgaagtccttgctgttttctagggcagtgggctctagccttatgtttgcggggaaagggaggagcaggccaagtaggggctaccttcatactgtgatgcacaggagtgctgggagctggaagacaatgtccctgggctaaggggcagcggagagccttgacaataagagtttctcaaggaggccctctcagtcccaacagttttgacccctttcttccctccactctccccagagtccctgcaggaagcatcacccaggctggcagatcatggtagcagcagcgggggtggctgggaagtgaaacggagccagcggctgaggaggggccccagcagcccccgaaggccctatcaggacatggagtatgaaagacggtgagttatctgttctcagcttcccagacagcctaggcttgcgtctatgtgagaattgatccaagaaggtgctaggatggggcttctgggtagaggaaacagcatagcagatgatgggtttcttttcagcagacaggtgtttggcacctgttgtgagccaggacctgtgctaggctctgatagtgcagtgatgaatgagacatgagattgcatccttctcagtactcagggtgtcacagggacgctatgcagttaacgggtgggaggttgaggttggggctatagcctggggtatgagggatgggtgggaatggcaccatcagagtcaggatttgcccgggaccactaggggacaagccaggtcagatagtggaagactccagggacagtatgggctacagttggcatgatacttgctgggaatggatactctcagacagttatttcttcagctctgctatgaacaaggaatagctggaacactgggtaaaatacagaaatcctgagtaaaattcagtgatccctcgccatccaggtgattccgaggcaggtgacccagccatgacacttgaagattgcctagaaaagcagacctaactctctcagaaagcctctattaagactcaagagtcaatagctttataaaaagagaaaataatttttaaaatgttttacgaagtgtttcttctaccaccactccttttaaaaatgtagaattgtaatattttgttttctgaaaagtgagcccaaatttgagataaggtcatcacctagtgttattcagtcttggctttcattagaaatgttttttgaaagacatttgattttggacggtattcactagaagtgctctgtggccatttctgaatttgagtagctgacatacatactttgttcaaactttattaccaagtaaaaccattgacttttaaaagccctcaagtgcagaggtttgagttcatcatactttccagttcaaggtaggtttctgtcataggtcagcaaaaggcttcctcttgtcatgtttattttttcatttttattcccaattcccacctctgtgggcagctgctctgtcgtgtttgatatgtatccttctatgatacatatcatagaaaatgtatccttctatgatacatatcatagaaaatgtatccttctatgatacatatcatagaaaatgtatccttctatgatacatatcatagaaaatgtatccttctatgatacatatcatagaaaatgtatccttctatgatacatatcatagaaaatgtatccttctatgatacatatcatagaaaatgtatccttctatgatacatatcatagaaaatgtatccttctatgatacatatcatagaaaatgtatccttctatgatacatatcatagaaaatgtatccttctatgatacatatcatagaaaatgtatcatagatttatcatatagatcattttcatataaatgtatcatatagatacatgtatcatataaatacatacataaatgtatcatatagatacattttcatagaaaatgaaaatatgaagtgttgttttgagtgactgtgttttcagttgacacacatggcatggtgccacagtcttcgttttgtttcctgaactttgtattactcagagtgggaggttttttttgttttttgttttttgttttgagacagggtgtctctatgttgcccaggctggtctcaaactcctgggctcaggcaattctcctcccttggcctcccaaagtgctgggattaaaggcatgagccgctgtaactggccaacagtgctgtttttttttgtttgtttgttttgttttgttttgtttctttgttttgagaaagagtttcactcttgttgcccaggctggagtgcaatggcgcagtcttggctgaccacaacctctgcctcccggtttcaagcgattctcctgccttagcctcccacatagctgggatttcaggcatgtgccaccacgcctggctaattttgtatttttagtagagatggggtttctccatgctggtcaggctggtctcgaactctcgacttcaggtgatcctcccatcttggcctcccaaagtgctgggattatgggcatgagccaccacacccggcacagtgctgtatttttaacatctgtctgtattgccatgtatatgttactactttgtttctaattgctggcaagggcatcatggggcatgtctactgagttttacttaatacttcccccaagagtagatgcctgttgttaattttgatgtgctagcatcattttttttttttttttttttgagacggagtttcgctcttgttgcccaggctggagtacaatggcgcgatctcggctcaccacaacctccacctcccaggttcaagcaattctcctgcctcagcctcccaagtagctgggattacaggcatgcgccaccacgcccagctaattttttgtatttttagyagagatggggtttctccatgttggtcaggctggtctcgaactcctgacctcaggtgatccgcccgcctcggcctcccaaagtgttgggattacaggcgtgagccaccgtgcccagcccaacgtcaccttttttgctttatctgttaatgtatagtgttttttgtttgtttgtttgtttgttttgagatgagtctcgctctgtcacccatgctggagtgcagtggcacgatctcggctcactgcaaacttcgcctcccgggttcacaccattctcctgcctcagcctcccgagtagctggtgctacaggcgcccgccaccacacctggctaattttttgtatttttagtagagatggggtttcactgtgttagccaggatggtctcgatctcctgacctggtgatccacccgccttggcctcccaaaatgctaggattacaggtgtgagccactgcgcccagcctaatgtagtttttaccttttgcattcagatctttaatccatctagattccactcttgaatatggcatacggtaggctccggttttattttcttccatatagtaggcagtttttccagtaccacctcctaaatagtccattctttctttattgatctgtggtacctcatctgatttcaggttccctcatgtacatggatccgtcttgagtgatgtgatttgttccattggtctatttgcacattcttgtgccagcaccttactgtttttattattatggctttatagaatgtcttagtagctcctttgcacttatttttcaaagctggtttaatcatttatggggctttattatatatcaaaagttatcaaagtccctcaaaaacaacaagaattttgatcgatgttacactgaacttctctattaatttggggaaaattatctttgtaagtagtcatctcatctaagacctttgtagagaatattttgaaatttatgtaaagagcataaaaagctttcattttcataaatggaaatacaggtcttatgtattctttgttaaagtaatccctaggtacttcagtcactttcattatcttttttttttttctcgagacttggtcttgctctgtcacccaggctggagtgcagtggcgacctccacaggctcaagtgatcttcctacctcagccttccaagtagctaggactacaggcacgcaccaccacgcccagctaattttttgtagagacggagtttcaccatgttgtccaggctgatcttgaactcctgagctccagcaatccacccaccttggcctcccaaagttctgggattacaggccattatcttattttttaaaaaatatttttcatgctggtatttgctggggtagaggaaagctgttgatttctgtaagttacccctgctgtatgcccttattatttctaatacttcattgttgattctgatgttctttctaagtagttggtcatattgtatgcaaatctatcctgtcacttatttatttttcttcatttatagtattgtccaggacttttagtaccatattaaatagtataagtgatactgggtacacaaattaagatttactttggctggttgtggcagaaagtccaaaggataatggcttagacaagatagtttacttttctttcccataaaggcagtctgcagaagagcaattaatctagggctgacaggcagccccttctgtgtagccatcctcagcacatggcagttgagacagtaggaagaagggagaggaataaaagggaatgtgtctaaagtttctccattaagtatggtgcatgcagtaagtttttagaatgtatcctttaataaatcaagaaaattatctaatcttcgtttgctaagattgaccataaataagtattgaacttcaaaatcctgtgctttttttctccctttgtccattaatttcataaattgtggcctggcatggtggatcacagcaccttgggaggccaaggtggttggatcgcttgaggccaggagttcaagaccagcctggccaacatggtgaaacctcatttctactaaaaataaaaaaatcagccaggcgtggtgaagcatgtctgtaatcccagctactggggagactgagacatgagaatcgcttgaacctgggaggtggaggttgcaataagctgagatcgtgccactgcactccatcctgggcaacagagtgagactccatatcaaaaaaataaataaaaattttgtaaattgcattaaatgatatccttggcattcttgagctataccccacttgatcatggtatgtatgtatatgtttatgacttcttactttgaaaatatctcaaatttacagaaaggttgcaagaaaaagtataatgaattcccatatatcctctactcagaattacttgttttaagtattttgccacatttgctctatcactctatatctttttttttttttttttttttttttgagacggaatcactctgtcacccaggctggagtgcaatggcgtgatcttggctcactgcaacctccgcctcctgtgttcaagcaattctcctgcctcagccttccaagtagctgggattacacgcgcctgccagtacgcctggctaatttttgtatttttattagaaacgaggtttcaccatgttggtcaggttggtctcaaactcctgacctcaggtgatccacctgcctcagcttcccaaagtgctggaattacaggcgtgagctaccgcgcctggcccaccctatagctctatatctttacatagacacacacacacacacacacacacacacacacacacacacacgttttttttaatcgtttgagttggtggcagccatgacttttctttttgagtcagagtttcactcttgttgcccaggctggagtgcaatggtgcaatctcggcccactgcaacctcttcctcctgcattcaagcgattctcctgcctcagtctcccaagtagctgggattacaggcatgcgtcaccacacccagctaattttgtatttttagtagagacaggatttttccatgttgatcaggctggtttcaaactcccgacctcaggtgatccgcccatctcggcctcccaaagtgctgggattacaggcatgagccaccacatccagcctgacatgaccttttaagtctggcagcatgtacgtcttaagaacaaaggtgttctcttccataaccacaatatacttatcaatatcaggaaattaaacaattatatagtacttttattctatataaagcccatattcagatgttatcactcttctcaataatgtcctttataatggttttccccaatccaggatccagtccaagatcatgtattgcattgagctccttgtctcctttaatctgaaacagttattctatctttgtcttttatgaccttgtcatttttttttttcctgaacctatggattatattgaaagcatgttttaaagttagttgttttatagaatgtttctcagtttggatttttctgatgcttactcatgagtttttggcagaaatgttatttaagtgatttatgtatatttttaaaaccttgttagattttattagccattgtatcatctaggatatctacacctgtatttatcagtgaggtagtccaatatttttattttcagtatttatctggcattggaatcaaggtagcctcattacatgaattgggcagcctttgttattctctctttattggagaaacttgtataagaattatctgtacctcgaaaaacttggtaggactcacctttaaaagcatctggaggctgggcgcagtgggctgaggcagttggatcacttgaacccaggaattcgagacgatcctgggcaacatggcgaaactctgtctctacaaaaaatacaaaaattagctgggcgtggtggcaggtgcctatagttctaactactcaggaggctgaggcaggaggattacctgagtctgggaggttgagactgtggtaagccatgatcatgccactgcactccagcctcagtgacagagtgacaccctgtctcaaaaaataataaaataaaagcatctggagctggtttttgattaccatttcatctcttctgccaattttagcattttatattttctagaaatatactcattttgtgaagatcctcatatatgatgattcagtccagcatcctagaaatgctttataaaagggatatgcctttggaaggtgtttgttcagagtgctttggtggccaattaaaaatattcctttctatccaaatatgttcccttcctgagtttagatagcaagagttcaatacctgaatttatttggtttggatattggatgtcaagagagttcaggataatttcatctgaaaatttataaatttattcatatctgttcagttcttgattttttttcctttttttttttgtttgtttgtttgtttgtttttgtttgtggagatagtctcactctgtcttccaggctggagttcagtggtgcgatcttggctcaccgcaacctctgctttccaggctcaggggattcttgtgcctcagcttcctgagtagcaaggattacaggcccgtgccaccacacccggctaatttttgtattttagtagagacggggtttcaccatgtttgccagactggtctcgaactccgtacctcaggtgatccactcgcttcagcctccgaaagtgctgggattacaggtgtgagccaccatgatggcccagttcttgaattttgatgactacagttcaaattgattgtatcaagaaccttataactactcataccactgacagtgatttcttctctaggcatttacggtagggaaacaatttggggccaggtgtggtggctcacgcctgtaatcccagcactttgggaggccgaggcgggtgaatcacgaggtcaggagtttgggaccagcctggccaacatgatgaaaccccatctctactaaaaatacaaaaaattagctgggtgtggtggcaggcacctgtaatcccagctactcgggaggctgaggaaggacaatcgcttgaacccaggaggtggaagttgcagtgagccaagatcacgccactgcactccagcccggaggacagtgcgagactccctctcaaaaaaaaaaaaaaaaaaaaaagagtttgggttccaagctgagttcgtggggacagggactttattttgttcacagcagtatccccattacctagaacagtacttatcgtatagccaatgttaggttaatatttgttgaatgaatgcatgaacaaataattgtttaaaaaaatggaagtcaaccaaaatgtttgaaaacatgtttaatggatatttgccccatttgttacttatctttatggtgttttccatagtttagtgtgaaatttcaagcatgtagcaaagtttaaagaattttacaatgggcctggtgcggtggctcatgcctgtaatcccagcactttgggaggctgaggtgggcagatcacgaggtcaggagatcaagaccatcctggctaacacagtgaaaccccatctctactaaaaatacaaaaaaattagccggctgtggtggcgggcgcctgtagtcccagctacttgggaggctgaggcaggagaatgtcatgaacccgggtggcggagcttgcagtgagccgagatcgccactgcactccagcctgggcaacagagcgagactccatctcaaaaaaaaaaaaaaaaaaagaattttacaatgaacaccatatatacccatccactagattctttttttttcttctttctttcttttttttttttttgagatggagttttgttcttgttgcctaggctggagtgcaatgacacaatctcagctcaccgcaacctctgcctcctgggttcaagtgattctcctgcctcagcctcccgagtagctaggattacaggcacgcgccaccacacctggctaattttgtatttttagtagagacggcgtttctccatgttgctcaggctggtctcaaactcccgacctcaggtgatctgcctgcctcggcctcccaaagtgctcggattataggtgtgagccaccgtgcccagcccactagattctactattaacgttttaccatacttgctttattacatatttacttctaagtttctcgtattttttacactctatagagatttataatttttacaaagccagatttattcattttccttttatgactgctgggatttgtcttgctgaggaaggccttccccactcttaaggtgatacatttttttcttatgttttctaatatttgttttctttttttaaaagttcaacttttattatagattaaaggatacacatacagtttttttttttaactcagtgaagatgtctgcacagcaggaatcatgtgggatgggatggccctttttcctaacgctggaccacttgatgttctcttccatcttcccccaaccctcatttagatcatgacatcagaaaatcaggttaaagttaagaaaaagaagaatcagatcattggggattcttagtagtagcatcgccattgggagctgctagcccagcgggtattccccatgccacccctctggatcttggctccatgggtactgggaggaggccttgttggccagggaggccacgctgtgctgctagaagctgggcgacatactggtggtgcagcagagtctcgggtgcggcagcttggaggtactacccacataggcattggccttccagggtgcatcctggcccatcatgctgctgcagcagctgtggctggtgctgcatgtctgcttgcctgctaggctgctcgccggcttggccaggagcttgctgtgcctcagtggggccacatcccctgtggctgctgtggctgtgctctggtcttggaaaatggtggcgatgtggttccagaggtctgtgaagaacctgctcacaccctcgtaggctgggaaggcgttgatgtcgatgacggcatgctgccccatctggttgttgatgatgatgtcggtgccgaacagcaatactcccagtgcctgccgcagggcccgggggagttcccggatgacctctttgctcggctgctcttgaacagaccagaccccttgatcttgtccagctccatcaggaccaatgatgactctggctttgacacactgtggctattgaggaagatggattcgtggtcacattgtgtccgcggagaatttcttgagcaagggcctctggaccacggtgtaggacttgctgaccacgaacaccttgtacagaacggtgttgtggttgatgaaattctagaccacacagggtggctgtatgccattcaggccctcctgattgaatacagtagacatctcgtgagagttggtgccgtgagccactctagttttgcacatgaacaggaaagccaggctgttcttctccagcagccacatggtgtcatccccgcacaggcttgtgacctccatgaagggcagcaagcagatcctgccgccttccatgtagatctcaatcttccagatgagtttgcaggacttggagcggtcgagcagggttctgacggcagggaaggagtccaggacgatggtttcagggtgggcatcgatgtagtcctgaaacctgtgcaccagctccagggactggctgtcattctggtcggcttcaaggatgacatcagtcaacttgtgaatgatgacgtccaggggtccctgctcctcgattggccggctgaggttcagctgcatgacttttttttttttttttttgagatcagtctcactcagtcgcccaggctgaagtgcagtggtgtgatctcagctcgttgcaacctctgccccccaggttcaagcgattctcctccctcagcctcccgagtagctaggattacaggcacttgccactacggctagtttttgtatttttagtagagacagagtttcaccatgttggccaggctggtcttgaactctcgacctcaggtgatccacccgcctcggcctcccaaagtgctgggattacaggcgtgagccaccgcgcccggcctcagctgcaccacttctatccctcacttcctgcacacctccgctaaagccgggaaattgagcttcttgattttcttctcatgcagccagtagccaactctcttccctttcataaaggtctatatcttcctcctcgggcaaggagcctgggtcctgaggaaattgcccataggctgagtctgttggccagtgagcgctgggagcgtgcgggcaccccctggtggcaggggtgtggaaagggctcggggtgcggggttagggccgcgtggtgtcacggtctccacaacccccccacccctggccacccagctggagctcacggcccacatacaggttgttctttttttcatacgcagtttcactctgtcgcccaggctggagtacagtggtgcgatcggctcactgtaacctccgcctccctggttcaagcaattctcgtgcctcagcctgcccagtagctgggactgtaggtgtgcaccaccatgcccagctaattttggtattttttagtagagacgaggtttcaccatgttgcccaggctggtctcaaactcctgacctcagtgatctgcccccctcggcctcccaaagtgctaggattacaggcatgggccaccgcatctggcctgtacaggtttttttacatgggtaaattgcgtgacactgaagcttgaggccccgttgatcccatcacccaagcagtaagcttagttcccgacagatggtccttcagcccatgccccccttcccaccttcccggtctagtgatccccaatgtctgatattccaatatttacattcatgtacattcaacatttaactcccatttataagtgagaacatgcagtacttggttttctgttttcgtggcaggtggcttaggataacagcctccagctccatctatatggctgtgaaggacatgattttgtcttttttatggctgcatagtattccatggtgtatatgtaccacatttttctttatcctgtccactattgatgggcattcaggctgattccatgtccttgctattgtgaatagtgctgcagtggccaggcgccatggcccatgccagtaatcccatcactttgagaggccgaggtgggcagatcacctgaggtagggagttcgagaccagcctgaccaacatggagaaacgccatctctactaaaaataaaaaattagccaggcgtggtggcacgtgcctgtaatcacagctactcgggaggctgaggcaggagaatctcttgaaccaggaggtggaggttgcggtgagccgagattgcaccattgcactccagcctgggcaacaagagcgaaactccgtctcaaaaaaaaaaaaaaaaaaaaagtgccgctttgaacatgggtgcatgtgatagaataaattattttcctttgggtatatacccggtagcaggattactgggtcgaatagccaaagcaatcctaagcaaaaagaacaaagccagaggcatcacattgtccaacttcaaactatactgtaaggctacagtaatcaaaatagcatggtcctggtgcaaaaacagacacataaaccagtggaacagagtagagaacacagaaataaacccgcacacatagaaccatctgatctttgacaaaatcaacaaaagtaagcaagggggaaaggactccctgttcaataagtgctgggataggtggctagccatattcagaagaatgaaaccggacccttacctctcaccatatacaaaaattaagatgtaagacctcagactataaaaatcctagaaggccaggcgcggtggctcatgcctgtaatcccagcactttgggaggccgaggcaggcggatcacctgaggtcgagagttcgagacgagcctgaccaacatggagaaaccccatctctactaaaaatacagaattagccaggcgtggtggcgcatgcctataatcccagctacttgggaggctgaggcaggagaatcacttgaacctgagaggcggaggttgcagtgagccaagattgtgccattgcactccagcctgggcgacaagagtgaaactctgcctcaaaaaaaaagaaaaaaaatcctagaagaaaacctaggaaatgccctcctcgatacagggtttggcaaagaatttatggctaagtccccaaaagcaattgcaacaaaaccaaaaattgacaatttggacctaattaaacagcttctgcacagcaaaagaaactaccaacagagtaaatggacagcctacagaataggagaaaatcataagctacacatctgacaaaggtctaatatccagaatctacaaggaagttaaatcaataggcaaaaagcaaaatttccaattaaaaaatgggcaaaggacatgaacagatacttctcaaaagataacatacaagtggccaacaaacatgaaaaaatgctcatcatcactaatcatcagagaaatgcaaatcaaaaccacaaggagacaccgtctcatgccagtcagatggcaattattaaaaagtaaaaaaaaaaaaacatgttagtgaggctgcaaagaaaagaatgcttatatactgttggtgggaatgcaaactagtttggtcatgggagaaagcagtttcgagatttttttttggagagagagatttctttaatatttttatggtttctatttgggaatttaagttttcacccatccataatttatttggcgtaagaagtgaggtaaactttgttttcttagtgggcaacacttttctgtgaaggatcagatagtaaatatttttggcattgcattgcaggactgtctctgttgcaactaaactgaaagcagtcacggacaatttatgaatgaatgaatatagctgtgttccagtaaaactttatttaattaattttttttttgaaacaaggtcttgctgtgttgccctggctggctggagtgcagtggcgcgatcagagctcactgcagcctctgtctccctggctcaagggatcctcccacctcagcctcacacacagctaatttctttctttctttctttctttttttctttttccagtagagacgaggtctgactactgtgttacccaggctgggtctggaactcaagggttactcctgccttggccttccaaagtgttgggattacagatgtgagccactacatctggcctccactaaaactttatttaaggagactggatttggtccactggctatagtttgctgattcctaggccagatagttattgtaactattatttattgactaatttgttttccccttgttagtttgaaatataacctttggcttatactgaatttccaagtgtgtttttgtatgctgtagattctattctatttcactgatctgtctattcatgttttaattaatttacctttataatgttttaatatttgctagagttcctctcaactcattagttttttttttttttttttttagtgagagagagagagagagagagagagggtctggctttgtcgcccaggtgcagtggcgcgatcatggctcactgcatccttgacctcctggcctcaagtgattctcctgcctcagcctcccaagtagctggggatacaaacacgcaccaccacgcctaactactttttgtatttctttgtagagatgaggttttgccatgtcacccaggctggtcttgaactcccgggctcgagcgatccgcccacctcatcctcccaaagtgctgggattaggggcatgagccactgctcctggcttatcctttgttttttgtttttgtttgttttgagacagagtctcactctgttgccaggctgtagtgcagtggcgcaatctcggctcactgcaatctttgctccctgggttcatgagattctcctgcctcagcctcctgagtagctgggattacaggcacgcgttaccacacccagctaatttttgtatttttagtagagacggggtttcaccatgttggccaggctggtctccatctcctgatctcgtgatccgcctgccttggcctcccacagtgctgggattacaggcgtgagccactgcgcccagcctgtcctttgttttttaaaacaatgctacagtaacttttttgtacatgtgcaagtatgtgtatactttaaattcccagaagtagaactgtgggtcaaagggtatatagatttttagttttgtcagctattgccgaattctcctctataaggattattccatttttaactcctaccagcaatatgaaagtacctgttttccatacagtcttgctgtttgttttcaaacattggactgttgtaaatctgttagattaaaaatgttctatcaaatcttccttactagtgattattgtatagtacaatactatattatttaatagttatcataaataataattttaatataactccaaataatgtagatactccctcctctaggaggtagagcttaattaccctccttttgactgtgggctggtcttagagactcacctctaaagaatagagtatggaggccgggtgtggtggctcacgcctgtaatcccagcactttgggagggcgaggggggcggatcgtgaagtcaggagatcgagaccagcctggccaacatgatgaaaccccgtctctactaaaaatgcaaaaattagctgggggtggtggcaggtgcctgtaatcccagctacttgggaggctgaggcaggagaatcgcttgaacccgggtggaggttgcaatgagctgagatggcgccaccgcactccagcctggcaacaaagcgagactccatctcaaaaaaaaaaaatagagtatggagagagaaatagagaaattttacagggaagaaacctggcagacagcaccttaactaggtgatcatggttaacatcaccagagataagtcatgttgttatcatgtactcttctgtgatatgatcagaagggcatttcactatctcacttctgttgtatgcttctccaaaaaaaaaaaaaaatccataatcttaggtctaatcatgagaacacatcaaacaaaaccagttaaagggcattctacaaaatacctggccagtgctcttcaaaactgttaaggtcattaaaaacaaacaaggacagactgataaaccttcacaggccagaggagactgagggaacatgacaactacatgtaatgtaatatttaggattaaatcttggatcagaaaaaggatattaacgagaaaattggtggaatcctaatataatctgtagtttagttaattccttagttttgacaaatgtgccttagttttgttaatattaggggaagctgggtgaagggtatacagggattctttgaacttttctgcaaatgtaaaattatttcaaaataagaagtttgacttcatcaaaattagaaacttttgtttatttttgttggttttatagcgatgagttttcggtatgttgcccaggctggtctcaaactcttgggttcatgtgatccgcccgtcttggcctcccaaagtgctggaattacaggtgtgagcccaccacgcctggccacaattagaaacttttggaagtctctctgaacctattctggttcagggactgctggtaacaacaacaaaagattagaaacttttttttttgagacgtagtctcactctgctgcccaggctggagtgcagtggcgcgatctcggctcactgcaagctccgcctcccaggttcacgccattgtcctgcctcagcctcccaaatagctgggactacaggcgcctgccaccacgcctggctaattttttttttttttttttttttttttttgagacggagtctcactctgtcgcccaggctggagtgcagtggcgcgatctctgctcactgcaagctccacctcccggattcacgccattctcctgcctcagcctcctgagtagctgggactgcaggcgcccgccaccacgcccggctaattttttgtattttttagtagagacggggtttcaccgtgttagccaggattgtctcgatctcctgaccttgcgatctgcccacattggcctcccaaagtgctgggattacaggcgtgagtcactgtgcctggccgattagaaacttttatacttccaaagacactatcaagaaagtgaaaagacaacccacaatgggaaaacatatttgtaaataatatatctggtaagggattaacatccagaatatatgaactcttacaacaacaaaattatccaatttaaaaatgggcaaaggattcatgaccagcttgacttaacatggtgaaacccctgtctctactaaaaatacaaaacatcagccaggtgtggtggcaggcgcctgtaatcactgctactcgggaggctgaacctgggaggcagaggttgcagtgagctgagatcatgccactgccctccagcctgggtgacagagttgtactccatctcaaaaaaaaaaaaaaaaattggcaaaaggacttgaatagacatttctccaagaaagatatacaagtggccagtaagcacatgaaaagatgcaaaataacaagtgttggtgaggatgcggggaaattggaacccttgtgcaacactggtaggaatgtaaaatggtacagctgctgtggaaaacagtttggcggttccagaaaaagttaaacacaggattaccatatgatccagcaattccactcctagatatatacccaaaagaattgaaagcaataattcaaacagatacttggacaccaatattcatagcagcgttattcacaatgtccaaaataaccaaggggtggaaacaacccaagtgtgcacgaacagatgaatgaacaaaatatgcatactacaatagaagagtattattccaccataaaaaggaaggaaattctaacatactgccttgtggatgaaccttgaaaacatgccaggtgaaataagctagacacatagggacaaatatatgattccactactatgaagtacctagaataggcaaattcattgagacagaaagtagaatagaggctgtggggtggggtgagaattgtttaatgggtacaaaggttttgtttgggatgatgaaaaattcctggaaaaggtgatggttgcataacattgtcagtatacttaatgccactgaattagataattaagaatggttggctgggcgcggtggctcatacctgtaatcccagcactttgggaggccgagacgggcggatcacctgaggtagggagttcgagagcagcctgaccaacttggagaaaccctgtctctactaaaagtacaaaattagccgggagtggtggtgcatgtctgtaatcccagctactcgggaggctgaggcaggagaatcgcttgaacccgggaggcagaggttacagtgagccaagattgcgccattggactccagcctgggcaacaagagtgaaacttgtctcaaaagaaaaaaaaaaaaaaagaggctgggcgcggtggctcacacctgtaatcccagcactttgggaggcygaggcaggcggatcacctgaagtcagaagttcgagactggcctggccaacatggtgaaactccatctctactaaaaatacaaaaattagccaggcatggtggcacacacctgtagtcccagctactcgggaggttgaggcacaagaattgcttgaggcccggcccagtggctcacgcctgtaatcccagcattttgggagaccaaggtgggcagatcacgaggtcaggagttcgagaccagcctggccagcatagtgaaaccccgtctctactaaaaatacaaaaattatccgggcgtggctgcgtgcatctatagtcctaactactcgggagactgaggcaggagaatcgcttgaacccaggaggcggaggctgcagtgagccgagattgtgccactgcactccagcctgggtgacagagcgagactccatctcaaaatttaaaaaaaaaaggatggttaaatggtaaatgtatattttaccacaatacaaaatgatctagaaaaaatatacaaaaattaaaattttaagtttattttaggccatgtgcagtggctcccgtctgtaatctcagcactttgggaggctgaggcgacaggctcactttagtccaaaagttcaggatcaggctgggcaacatagtgaggtcctgtatctacaaaaaatttgaaaattagctggatgtggtggtgcattcctgtagtcccagctggttggggctgagatgggaagattgcttaagcccaggaggtggaggctacagtaagctatgattgcaccactgcactcagcctgggcaacagaccgagaccttgtctcaagtaaaataaaatttattttgaaacagtctatccaatgtagttttaattctcatctttctctctctcttttttttttttcttgagatggagtctcgctctgwcactcaggctggagcgcagtggtacaatcatagctcactgtaacctagaactcctaggctcaagcagtcctttcgcctcagcctcctgagtagctgggactatagatgtacaccaccatgcccaactaatatgttgtggtggtgatggtggttttgtaaagacgggatcttgctatgttgtccaggctggtcttggcctcgagcaatcctcccactttcaccccgcaaagtgctgggattacaggatgagccatctcacctagcaaaattttcttttttttttttttttgactgagtctcgctctgtcgcccaagctggagtgcagtggtgcgatctcggctcattgcaacctccgccttctgggttcaagcgattctcctgtctcgccctcccgagtagctgggactacaggtgcgtgtcaccacacccagctgattttttttatttttagtagagacggggtttcaccatgttagccaggatggtctctatctctggaccttgtgatccgcctacctcaccctcccaaagtgctgggattacaggtgtgagccaccgcgcccggcaaaattttcatctttcattatgagtgagatagagcatcttttcagatacacatcattgatatttttatctgtgaattctgtttacttcctttccccatattttttcctagtttattgtcttttgacttggttaatgatgttttttatttttctgtttttttctccaagcaaaagtattttatttttatgtagttgaatttagtaatcttttctgtggcttctggatttggattataggtttccccatttcaagattataaagaaattattcagttattctatattttcttttatgatttcatttcttttttttttttttttttaagacagagtcttactctgtcacccagactggcagtggctcaccgcagcctccgcctcccgggttcaagcgattctcctgcctcagcctcccaagtagctgagattacaggcgtatgccaccacacccagctaatttttgtatttttggtagagatggggtttcaccatgttggccaggctggtctcgaattcctgacctcaagtgatctgcccacctcggcctcccagggtgccacccacgcctggcctatggtttcatttcttatgtttaaatctttgatctatttcaaatatatcctggtatatatgtgaagtatagtcataatatcttgcacatgtctaggtatttaacctttttgatgaattgtacttgggacctttctattttctaaacagtggttacattaatttgtacccagcatccttactgatttattatttataacaagtttttcagttgattctcttaggctttgcaggtatactctcatatcatttacaaataatggtaattttaccttctcctttccagcttttaacctcttttcttccttccctgtttaattgctttagctagtgtctttagaataatgttaagaatgctgttgataacggacattctaatgttgttcccgaccagaattggaatcctgttagtatagtagcattcttctgtggcatctagttttttctattttaaataaacatatattggttgctcttagaatgcttttttagtcattatttgttcaaaataattgttgagcgcctactgagtgctagggaatatggcagtgagctaagggtcccctcatttcctggagcccatattctagtaattttttaactcaccaaagaaacacagattaggccatgcacagtggtggacgcctgtaatcccagcactttggaaggctgaggtgggtggatcacttaagcccaggaatttgagaccagcctggcaatgtggtgaaaccccatctctacaaaaaatacaaaaatgagctgggcgtggtggtgcgtgcctgtggtcccaactactcaggaggctgaggtgggaggatggcttgagcttgggaggttgaggctgcagtgagccctgataatgccactgccctccagcctgggcaacagtgccagatccattctcaaaaaaaaaagaaaagaaatgcagatgaaatcagctttgagatcattattttacagttattgcggtaggagaaattttaatgaaagagctgctagtgtcggcaaggtgacagtgaagcaggggcaggggacgtggtgcaagacagggaggaggagcctcacccccggggatcctgcaagccgaatgagaccttggtgagcattttggtatttgatcctgagactgagggggagccactaaagggagtgagatgggtttgagtggctttgccttagaaagcactcacatttgggatttgggatgtagagactgaactggggaggtccaggtagaagtgaggagaacagccaggccacaaccaaggtgccccatgagggaagccagtggcatggaccagagagtgacatagggatggagagaggcaggttgcacttcagagatgtggagcagggatttaggaatccctgtatgggggcgggcctgagggcttccaaagaatagagtagggggagggaaaaatagaaagtttacagggtgagaaacctggcagacactgccttaaccagatgaccatggttaacatcaccagagctaagtcatggtggtatcatgtacttctttctctgataggatcagaagggcacctcacttctgttgtatgctcctccaaaaaaaccaaaaccctacgagaacacatcacctgggcctcttgcaccttttagaaagggcaaccttctgatccctccccatccttcttcctccactagtggtggtcgtggtgacaggactggccgctatggagccactgaccgctcgcaggatgatggtggggagaaccgcagccgagaccacgactaccgggacatggactaccgttcatatcctcgcgagtatggcagccaggagggcaagcatgactatgacgactcatctgaggagcagagtgcggaggtgaggagggggcgcgctgcgccaggcctggctgggatgggctcccaagggccctctgtgtctggctgcagcaccgtgtgcaggcagctctccactcccgtgccttcagactgtgctcggtggctttgcctcacctggagggcctgttcccactcccctctctgagggctcctctcccaacctgggtctccctggcttccacatgcttggctctgtacttctgagggcccctggccaccactctttccctttctccctgttgttcagttcgggcccatggctcactgtgaaccctgtactgcccgctcccagccaacttgggcacttgaagagcctcttccatgggacccggcgtctggggttgggaggacaacaaggggactgcagaccaccaagctgaggagctctgggaggccagccatgggcattcccagtggtgatagagcccctagacagaagggaaggacccttctggagaagccagtgccatgttgggtagttcaccctagcctgcgggatgaggcgcgatgtttacaccatcagggagcccccacccgaggggaagaaacaggcttgccttaggggaatcccagttggaggggcagtcagggacctggtccatgcgagcaggcagctctcctgtccagcaggctgggaagggagttcttgcaagcccagccctggggggcagtctgtgagctgcccactgccctctggagggtccagggcaaaaacccctttggtggactgccaggcttctccagtggcagctgtcaagctgtgcccagacgtctccaggagcactgggccctggccagggtgggaatggagcaccaagttatctggtgcttccccactgtgggcgggagggctttggccccaggcctgctctgcttagtcctggaatggatggattgggcaacagcccagagcccaacagccataccgttttgagcgtggtgtgtggtggaggactggccaaggctgaggatcagggactgaggagggagtgtctgcagccctcacaccacctccaccagctcctgctgcctggctctggctgagatctgaagctgttcttatgcccccagcttggttgcagggtggaaccgtaggagacatgcagccttcggtggtacagtgaagcaattgagcacaccccctgagctggccagagaggagaggaaaatcaagggtggggtctggtgtgctgaccccaggccatcttgccccaaggaggtttaagctgtgtcttgtcagctacctttgggagttccccccacaccaatactgtcacctacctctccccacccactgaaggcagcccccaaaaggaccccatggagaatttacagtcccagaaagattgcaggccggggcctgcccaccctgcctgcctgagcctttagccggagcccgcacatccctggctttcagagcctgcctgcctcacagagccagcggccagctcctaggcctgcccagactgactgcccgtctggtgtcactcatctcattctgtcggccaggattcctacgaggcctccccgggctccgagactcagcgtaggcggcggcggcggcacaggcacagccccaccggcccgccaggcttcccccgagacggcgactatcgggaccaggactatcggaccgagcaaggggaggaggaggaggaggaggaggatgaggaggaggaggagaaggccagtaacatcgtcatgctgaggatgctgccacaggcagccactgaggatgacgtacgtgccccccatggccccgggcaggaggccaggctgggtctcctccagggccctcaacttctccccacccctccctcacctgcaacctcagcgcctttcatcccttctccccctccagctcctatcccccagcactgatccgtcctctgtgggcaggtcccatcggccccccggtctggagggaggagtgtcagagaggccggcttggccaagggacattggccatgggtgtctggtagtggtgggtatgggcgggagaagagcagtcctgcacattccactggtcatccagccattttgcatgtgtgcatcatgggccagacgctcaccgggccagtgctggctattgctggtagcagagatgacactggggccctgtaaccattgggggagggatgggattttctgaaatttccttctctttttcccccatccttttttgtcagcagcctggcctggcctcagagccttgggtggctgctaacagcctccacgcctgcctccctttcctcctgtttccttttcatacatacttctcatgacagccacactgaagccccacgaggcctaccagaataacctccaagaatagtgtcctgatcttggtccttcttagtctactccgccgcccctcaccccctacccccatgaattctctgatcagccctcctctgaaatctgctagctgctcattttgtaacagagaaaatcccacttgtgtatttgagggtttctaaggtctggcccacctgccctgttcagggtcagacagtagctggttgctgacatttgttgagaatgtatctcagggtgggccatgtgttaggtatgattcagtccccatggcagcccagcagggaaggtactctttgtattccatccttcggatgaggaaaccaagccctgagtgggaatgtgacttgccccaggtctcatagccagtgagtggcagagcagagctggagtctgaacccgggcagctggaccctagagcccactttttgctgcttcctcagccttccctgagtttggagtcctgataagctcttctgtgtgtttttccttttcaccctgtgtatgggtgtgtgtaaggctaatgtcctgtctgttgtttaacctggtggggaaactgaggcccagagacatgaagactccttcccaagaatggctggcataggctcctggtcctcagtgagagacctcactggcctagagaccctgcctcacctgggccaaatcctgaattgcctctgcagtttccctctggcctactccatctgggaagcaatccccaggactacatctttttgctttttgtctccaccctaagttattgctacagtcatggtctagggcacatggctgggatttgctcagactcctgtcctccccagtttgacatttatgtcatggatctcttttgacgcaagctgcaggtcagcagggcaggggcgggggtgcgggttatccccttgccaagggcaagaattgcatcccaggtttccttacttcgtggctgccagcgagccctttgtcagatcaccctgcccaccgttcttaagtggctggctcacttgctctcttgttctctgtgcccctgagggtcgtcctgctgccatgctttaccttgctctgtgcccatttcttcatttgattcactttctgcaagtctggggctgaaagtcaagactgtgaactggtgtgggcctggggctgttgtcactcagggaaaagctgcgaaagaggcggaggagactgtgtgcacatcaccgatgacccctcgggatccagaggcctccagccagcctcaggtacccagcggccccattgtgctgagcctgccctactctgtatctccccgtatagatccgtggccagctgcagtcgcacggcgtgcaagcacgggaggttcggctgatgcggaacaaatcttcaggtgagcttttgttctagtgccctccccttcaagtggccagcctcagcctccgaatctccctcctgcctctgccttctcccccactccctccaccaccttcctgccacagctgggaatgggcagcgtggggggtgccctctcttctctcccactccccacactctcctcacagctccagccaaaagcctcttcaatggggctgtcggggcaggggtgcagctctgagctgagctgggtgctccctggggtcagggccagggccaggctcccaggcacctcctctctgggactctgagtatctgagatggtaaccccctcccatacactcccttccctctcctttcttctccttcctctgcccctcactttcccccacattttttggtaacagcctctgaccagaaagtagctctgacgtggtggtcccacatgtgtgtcccaagggggaagcaggggatggctcttatccaaggacacatcccaaggaacagccaggacttcctggcctcgcctgttccctccctccctccctcttgcaggctgcttggagctggcctgaggttagcagggtggtggtggggggagttgtctctacaggacctctgcccaggctccccaaggcaggcacagtggggcctcactctgcctgggcttctctctccatctctcagtctctcctccccacacctccatctctctctctctctctctctctctctctctctctctctctctctttctccctctctctctttctctctctctgccccccccaactatattattcattccatcctcctatgcatcctaacggttattcttttgaacattaagcatgcccccccaagcccctctcatccaagccctccccatgtatctgcctctaaaggacatgctatcctgaggcctcaaccctgaatccctttcccaagcctggaatcttggttgcatgtaggtcttgctctgcatcaccccaactacaccacacacggacagcttctgggtctctctctccacaaggaggtgttccaggtgcggccttctcaatggccctgggcgcttctcccaggcacccattgattcttacctctaaggtcctcctggccaatcctggccaccattctccttttgtccaggggaacctggactgtttgtggctgtagtctccaccctgtggccctgaggtggctccctagcgaggcccgcctcccctgcgctgcggtgaggctgagatgaggtcgtgtctttaaccgcccctggtttccaatgggccaagagccttcctagcctcgcagagcagcctggcccagcttctcttttgctcctgtgattcaacacctgttacaggacccctcctgggcacccctggccttgagctgggcccgccctggagttacgtattgtggcttgtgtggagccagcagcctgcccaccatcccctccctccttctttggaggcagatctctcgtattctttccctcccagctgcttctctccgtctctgtcaccccaggctggctgggcaggtctgcccgagccccatctctctcttcccagttggtgtgtgtgtctctccccctaccgacctctggcctctgtttttctccctccaccttccctgccccacctggccatctaccttgccccccacgcccgctagtctttctctctctgattgcctctttctctttcttcctttttcctcttcccctttccctctctgccccccgtcctctcccctcgggtcccgcccccgggaacgccgtgtgtccaaagctgttgactaacccactgcgtctgtatctgaatgctgtctccaggtcagagccggggcttcgccttcgtcgagtttagtcacttgcaggacgctacacgatggatggaagccaatcaggttgctttgccgcacttgaacccccccccaaacaaatactactttgtaatcgagcgctccccatcgcctgattcttatggacacagttccctgccctgtggccctgtgtcccatccccccgccccctctctccccttcctgaccctcactatctcctcttcccatctctcgctaccccactgggcttctcatccagagcccacactcaccactggccccttcctaccaccaggcactagtgctgccccttcacctctcccagctgagcgttcagagaaagagctgccagggtgggttctttcacctagcttcccactcccccggggctggtggggggggcacccctctctggggttagccagagccaggacctcattccaccctcaggaccactggaagtcctgccagtgaggagcttagctattggcacagtcactagcaagactcattttgtcagccccatccctgcatgtgaatttggccctttgattttcatgcaaggggacagcactgctctgttgatctcaagttcccgtcgagtatgatagttttatcgacaccctggcctcacttcgccgcccctacccttcctatcacatctccacactcgcaggaggcaccacctcaggcagctctgtcttctcggcaaggacctgtgcacagtcagccctggggggagcctgtcccccaagcctggcacgggatcccaactcagcagctttgggacctccgagacccaaagatctgcctggtcacccacccctgcccagatccctggtgtagggcactggagagcagtttcaggggaggaaggggcagaggtggtagaatgggggatcccggcagaggcagccctggggccgtctcctcggggttggtaggctagtgccatgggcccaggacccagccatccatgggaagacggcctcatggcagaaacttccatctgttcgaaatggctctttctttttccccttctccagcactagcgcacctgcgctctctttctctttttctcccctctccctccccctccctgtctcccctcaccccccaagtgtagcctgtgtagtcctggccctgggtgtggcctggcagtgtcagggccgagtgggggtttctccccactgtccggcaagcgtcggtcagccgaacactgtgtgcctggtggtgtgtgttcacatgtgtgcgtgcgtgtgcccggcagagcagcaaacagctgcgcccgagagctgtggcgctttccctccctacctcccttcttccctccatccgctctccgacctccctccgttccctgtccctcatccatccagctgaagggctcgctcactctcttctcctatgctgaaacggtgcgtggggcactgctgcctggacctcactgtgctctgctttttcccgcagcactccctcaacatcctgggccagaaggtgtcgatgcactacagtgaccccaagcccaagatcaatgaggactggctgtgcaataaggtacaggggcggtgggcagcagttgtcatggacagagacagcaacagcagtggcggcgatctctcccttcctctcccgctctttctccctccatctctccccctcccccaatctctcctctccctctgtctctctctctctctctctctctctctctcattctctatcccttgctagctcagcttgagtagtcaccattcctagccagccatatacaaatgtgtagtgagcgttcacttggtgcaggctctgtcctcctaaaatgcagtcttgcctggagttccagtagactttaaggaaatatatacgtggatgatgaattagtgacagtgtagacttgaagtggtggtgtggagaatgtgggcttcagagccagactggctgaaatgagactatcccagatcggccttgattttggccaaggtgcttagcctctctttgcctcactttccccatctctaaaatgtgaatattaatgacacctctcccaaaaggtggttgggaggattcagctgtgttaatgagagagtaacactcagaacagtgcctggcccacatttaacacagtcgaattgttaactgtaatcatgaaagaaaagcacagagcrttctgagagcccatagcaggtagctcaagcctgaaggccactctgaccaggccaagtcaaacctgaaactggaggctgtggttttgtagtcacctctgtcttccctgaggggaagctgaggctcagagaggtggaaccatgggtgaacctttagctgtgccctgtgccttgctcctgatcacagggacttggatgccacagtggcttcaggtctgccctggggccagcattgtgattccacagtttgtagaggccccaaccctctccccaggaagtactctgcctagtcagggagagtggtgcatctgttttaaaaaaaaaagtcccatcagaggattggtgcttaacatttctggagagataaagacaaagtgacagtggaactccttcctgtgtttccagatagcctcaaaaccagggaattctcttttttttttttttgagacaggatctggctctgtcgcccaggctggagtgcagcaatctgggctcactgcaacctctgtctccagcgctcaagccatcagcctccagagtagctgggaccacaggcgcatgccaccacacccactaatttttgcctttttatttttattttttttggtagagacagggtttcgtcatgtttgccaggctggtcttgaactcctgagctcaagcagtcctcacgcctcagcctcccaaagtgctgggattacaggcgtgagccaccacgcccagcccaaaaccagggaattctcttgaactccttcccctcccctgcatcctgttggccaccaggtcctgtcacttccatcacagaaacgccaccttccctccctcgccattcccgctgctcatgccaatcgtcacgctctcacccactcactgtggagccctctctggtatgctggcctcttgtcctctttctcccacgccctcacctggaacattcctcaaaaccacctctgactacccacgcctctcctcctctgcttaaccagccccagctcagcttaagcataagatcctccattacctaactggcttccttccccggccttggcttttgcttctccccttactctcccacaccagtttcggaaagtccattgttccctccgataacaatccctccccagcaaggcttaacaaaatgaaacttctgggcatcccaggtcaaacctccctgcttctgtgcagggactgtccctgccgagtaaatggcaccccacccccagcccatttccctccccgagcccctgctggatggtccatgcagaccgacctgcccctcttcatgctgcatctgcccctgtgctattaggccatgagggcagagaccatgttctggccatgtgcagcagggcctggcccaggagtggtgcttagtacctgagtctggaacagagatggagtgtggtagaagctgggtctccagatgctggaacattcaaggaaaatttctcaagcgtagcaggatccaacccagtcctagagctaagaggaggggtgcgggtctggctactgacttctagggctgaaacactgaaaggtttctgaatagaggagcaagtttcagggagaggaacctaataaagggattgaatacctgaggcggggaacagtcctgggagttggtggccttaagaaggcagaggaaggagaggagggagttgttgtaccaaatgggggagttgtttattcctgagctgagtgggttggcacagaggacaaatgagagtctggaaagggaagatgcacagtactgagaacaacatcagaaggttcagaaggcacctgccaccattgcctaggggctttccttcctggggcactgcggggtccctgggagatctcttcatccaagtttggagggtgcagtgggaaatccctgctccctctgacggcctggcctgtgcctcacagtgtggcgtccagaacttcaaacgccgagagaagtgcttcaaatgtggcgtgcccaagtcaggtgaggcccacctacctctcgtgctctccagggcggagcggttggggagaagggaagggtgaggggtctgtgctcagggcttggtatagggaggagggtgaccagtcgtggagccttccccttatcaccagcctgtctcccactgcccctgacagaggcagagcagaagctgcccctcggcacgaggctggatcagcagacactgccactgggtggccgggagctgagccagggcctgcttcccctgccgcagccctaccaggcccagggagtcctggcctcccaagccctgtcacagggctcggagccaagctcagagaacgccaatgacagtgagtcagttgttccttcttcctctgtgccctagggtgtcgggctgggctcaccaagaccagagaaatggcagtgagcaggacctcatcctcatggaatctccacttggtgcggggatagacatttgatgtagggagaacagggggagtggcaacatcccacctgactttgggggtgtgtcgggaaggttctcagcagacaggcagccaggctggcacctggaccgccaagcagagttgatcctggaggaagcagtgagggaagcggcagttgcaaaggcacggagtgagtgggggcagaggaaagggagcagtgggggcattgaagggcagggctggcaagagtgccaggggtgtcctctaacattgggccccttcccacagccatcattttgcgcaacctgaacccacacagcaccatggattccatcctgggggccctggcaccctacgcggtgctgtcctcctccaacgtgcgcgtcataaaggacaagcagacccaactgaaccgcggctttgccttcatccagctctccaccatcgtggtgagggcggcacagttgggggccgggcagccagggtcccggcccccggggtggagacgagggtccttttccccagcctcccaccgcggctgccagcctggaaatcgggcaatggagccgggggcctccccgggcctgacccttctgtccctgcctcccctcctcccacaggaggcagcccagctgctgcagatcctgcaggccctgcacccaccactcactatcgacggcaagaccatcaatgttgagtttgccaagggttctaagaggtcagggccccacctgtgtgccttcccacccttcccctccccaccctcccactcccccctaccgcttggggcctcctatctcactcccagtctctaacatcctcctcagggacatggcctccaatgaaggcagtcgcatcagtgctgcctctgtggccagcactgccattgctgcggcccagtgggccatctcacaggtactcagaccccttgtgcctcccagcgtcctgagacctgggctttctcaaccctcctgcaccctctctgaagcaggaaggctggcttgctatccatggatgcaaaaccctctcccagtagctggcatggctattctaccttgctcctggctctctagaccccctgggacattccccttcatcatcaccgcagctttcttcccaattgcctcccatgcgctcatgtacgacgccattgtgcctggcattctgtgctgtttggtggggtttttattgtcctgaataggtatgatatacacatatccttatatgtaatatatacatatatgatatacacgtatcatatgttcctgaataaaaataacgtataagtggttgagagaaaattgggagaagagaataaagaagtaagaagatggtgtcttccttggcctgacacccaacacacacgccacacacagcagaatcagcagaatcagccctggaacattttggcgttcatctgtttttctgtcttgtgtttgccactggcctatttgttctcttgtggccaggcaaccctcgctttccacttgtcttaaggctgcatgctttgtctgtcaggtagaaatactagccccacgtgtgggacagatgcttctagcaggttccccaccccccacccccacaccttcctgttctaatgaacccctcccacctgcccttcaggcctcccaaggtggggagggtacctgggccacctccgaggagccgccggtcgactacagctactaccaacaggatgagggctatggcaacagccagggcacagagtcttccctctatgcccatggctacctcaagggcaccaagggccctggcatcactggaaccaaaggggatcccactggagcaggtgagccccagcatctctctctgcagctgtggtgggggccagcaggcataaagtccccggccccattattcacaggcattgtccctgccctgtccctccttacaggtcccgaggcctccctagagcctggggccgactctgtgtcgatgcaggctttctctcgcgcccagcctggtgctgctcctggcatctaccaacaatcagccgaggcgagcagtagccagggcactgctgccaacagccaggtgagtgagccctgtgggtatgtatcccggggaggcaggcaggcggcaggggtggcatgggcagacactgagccctgttctcctgtctggccccatgaccagtcgtataccatcatgtcacccgctgtgctcaaatctgagctccagagccctacccatcctagttctgctctcccaccggctaccagccccactgcccaggaatcctacagccagtaccgtgagtagccacagcctgtgggtaggggtggggagttcttaataaagcagggaatagtgtgaccccgttcccctcaccccctagctgttcccgacgtctctacctaccagtacgatgagacctccggctactactatgacccccagaccggcctctactatgaccccaactcccaggtaatagggcagcccagggagggatgggatcgggtcaggtcgcgtcaggaacagctagccctgcaggttcccttcacaaggtcttccctcacatcccctcttccctcctcctccctcagtattactacaatgctcagagccagcagtacctgtactgggatggggagaggcggacctatgttcccgccctggagcagtcggccgacggacataaggagacaggggcaccctcgaaggagggcaaagagaagaaggagaagcacaagaccaagacagctcaacaggtgaacaccagggtccagcagtcactggctggctgtgtggtgtcttccagcaacggcactctgtcagctcttgccctctcctgccaagggagatggcgggcaggtgtggatgtgggcagtgactgcttagcagaccatgctcttgccccagctctgctctttgctgaatggccttgagccagagcagtctcctcagtgtgtggcagggttgcccaactccaggaggtggcttgtgccatccgagtgagccctgtcaggtgtcttctgtcccatggtggggaccctcacattctgctggtgaatatacatgtatgccagagaaattctcacaggccataagggggtgggcaggaaaaaagccctgcaatgttttgtgggagtgggcagatggagggcacctcagtgtctctctgtggagaaagggtgtgacactgtgagcgtagcgtttacaagcaagcactaagtgttaccttagcaacctgatgaattctaaaaatggtgctgtgctggggggaacatggaaatatagaatgtggcattgtgtcatgcatataaagttatacacarataaacattcctatgcatttttaaatgataaaatggaaatgcacaacaaatgtgacagcgtgggtgtatgtcaggggaagaggagtgtcttcatccatttgctgctccataacaataccacagactgggtaatttataaggaaaagagattgatttggctcacagttctgtaggcagggaagcccagtggtgttggcatctggtgagggccttcttgccgcatcataacatggcaaagggcaagagagcatgcatgagagcaagagaaaattgggccaaactccccctttttatctggaacccactcagtgatggcattaaatggagactcaaaaggtggaggggggccgggagccgtggctcatgcctgtaatcccagcagtttgggaggctggggtgggcagatcacctgaggtcaggagtttgagaccagcctggccaacatggcgaaaccccgtctctactaaaaatacaaaaattagccaggcgtggtggcaggcgcctgtaatcccggctactcaggaagctgaggcaggagaatcacttgaacccaggaggcggaggttgcagtgagctgagatcgtgccattgcactccagcctgggcaacaagaacgagactccttctcaaaatatatatatattatatatatataaaggtggaggagatgggagggggtgaaggatgaaaaattacttaatgggtatgatgtacattatttggctgatggatgctctaagaaccctgacttcagcactatacaatctgtgcatgtaacaaaagcacttgtttattttatttatttatttattatttttttgagatggagtttcgctcttatcatccaggctggagtgcagtggtgcaatctcggatcactgcagcctccacctcctgggttcaagcaattctcctccctcagcctcccgagtagctgggattacaggcatccgccaccatgcccagctaatttttttgtaattttagtagagacgggttttcgccatgttggccaggctggtctcaaactcctgacctcaggtgatgtgtctgtctcggcctcccaaagtgctgggattataggcatgagctaccgcgcctggctacaaaagcacttgttaccccataaacttatacaatttctttaaaaagcagccgcgatctcttgaggagggcagagcctttgtgacctaatcacctctgaaaggccctgcctgtcaacactgttgcatcagggattaaatttatcttttgagatggagtttcactcttgttgcctgggctggagtgcaatggtgcaatctcagcacactgcagcctccgcctcccgggttcaaggaattctcctgcctcagccttccaagtagctgggattacaggcatccaccaccacgcccagctaattttgtatttttttagtagagctggggtttcactgtgttagccaggctggtctcaaactcctgacctcaagtgatccacccgccttggcctcccaaagtgctgggattacaggtgtgagccactgcactcagccgggataaaggctccacctgtgaacactgttgcattagggattacatttctgacacatgaactttgagggacaaaaaacatagcagagaacacagccagagaggggcttggcaagaagcactggtgactggtgacagaaaataggaacttgcactactgtgtccctcaccttctgattgttctgcctcagcttccactcatctgcctcccagatgggcccgccactctgtccacactgcttctgccacctcaccattgcaaaccagtgggggtgggggcacagggtgtgttcagtgatgaggtcaggagtagccaggtgccaagtgccttgcaggctgtggttgcgagtttgggtttattcttggtgtgatgggaggcgaaggaagggttttaaggacattgtatttgggggtgggagtggcttatacttcatgaaagagcgctctgctgggaaaggtggtcaggagccgtagcccagaggccagatgaagccttctgcagtggttcggactagggatagtggctggcccgtgtttgaggatgcagggcagtgggtcagcagatasagttagtagccccagggtcatgagggttctgggaacctcacctccaccctcacccccagattgccaaggacatggaacgctgggcccgcagtctcaacaaacaaaaagaaaacttcaaaaatagcttccagcctatcagctccctgcgagatgacgagaggcgggagtcagccactgcagatgctggctatgccatcctcgagaagaaggtgtgttggggccacccccctgcaccctgccccacaatcttgtccttcctttgggccctctgtggagtccctgaatttctgtgtccctccaccccagggagcactagccgagagacagcacaccagcatggatctcccgaaattggccagtgacgaccgcccagtgagtgcccaaggcagagaggggcgggggctctgatctggccaggcctgaccgcccaccctcaccctctacagagccctccgcgaggactggtggcagcctacagcggggagagtgacagtgaggaggagcaggagcgtgggggccctgagcgggaggagaagctcaccgactggcagaagctggcctgtctgctctgccgacgccagttcccyagcaaagaggcgctcatccggcaccagcagctctcagggctccacaaggtaacagcggatggttggcagggcatgctggggcctggcccactgaggctcatcctcttcacttctcatcctgtccctcttgcagcaaaaccttgagattcaccggcgagcccacttgtcagaaaacgagctagaagcactagagaagaatgacatggaggtgaggtgtgacctgaccctgggctccctcccctgtgtcccttccaagtccccatcacctcaggcagctggagttcaatttctcacgtgttaaccccgtgagccttcttccccattttcctatcctggctgcttgtgcctgtgatggcctgaccctcaggacctgagcctcattagccagatggcatgccctgtgggaccccactccccatgcctgtgttgcctgagaaaagagaccagctccccaacattcacatacacatacaaactttcagcaaatgaagtaccgggaccgtgcagctgaacgcagagaaaagtatggcatccccgagccgccagagcccaagaggaggaagtacggcggcatatccacagcctctgtgtgagtggctgggccaggtgagggggtctggagcccggggccggggccggcaggccgaccactcatgctgtgcaccgcccctgcagagacttcgagcagcctactcgggacgggctgggcagtgacaacattggcagtcggatgctgcaggccatgggctggaaagagggcagcggcctgggccgcaagaagcagggcattgtaacgcctatcgaggtgagtctcaggcagtcctgtcccatcccccagcacccctcacagcatcccccaccagcctgacagagcctgcctccctcacacaggcccaaacacgggtgcggggctccggcctgggtgcacggggcagctcctacggggtcacctcaaccgagtcctacaaggagacactgcacaagacaatggtgacccgcttcaacgaggcccagtgagcagcttcaagagcaacttctccacatgttgggtgtccatcctggggcagggaaggacagagtgttggatggctgggacggggccttgctcttgtcggccagcccactccccagccagagagggcttgaccaaatcaaattgaggtggtgacttttgttggaaaattgggctgggatcacgtcctgttttgtaataaaagctgaaaagtctgcatgttggcctctcctctttctcgtgctctagcacagttgtatagcctatacagacacggggacccaagcagatggacaggggaccttatcaggccaaggtggatggcagtggtggcattcagtgtctggaacataatggctactagaacatggggttctgacctgtaccccgacccataatatcctggttatggcccctctcccttgttggttccagcaggttatgttgtaccaggaaatctagcaccaccaggcatgaagcgccccctgatcagagctaggactgggaacccccatcccctgtccttgctgccccctggctttacttagcctgcagtcccaaggctaaactgcattttgccatccctagatctggagacaatgccctcaggcatctccaagtagaatacaagaggtactcaggttccagttggcccagagccctcaacaggctgatgacagaggggtggaggtggagcttggcctgcaaatccaaggccaggtcccagggatgccctttgagaaccattcaggcctaccttctctgttgttaccacagtgccccacccctctagtcactgcaacccatgattcccaagtatgtgcttgtgctctcggcagaggttctgggtacagtggaccgtgacgctggggctgccctcttccaagcctcagagggccacagcgtgaaagggggatggtgctagaagaccagttggtgcaaagcccctcccccatttattaatatacattgtgacaccaccctgcaacagtcataggaggtggggttagaaggggacccctagaggtaggatggtgctgatctggggtggtgggtgttgcccaatgaaggaaggggatgggagaaaaaaagggtgaaggaaacaggattaaaaagaggcctcctgggcctgggcacagtgagttgcacctgtaagtaatcccagcaatttaggaggctgaggcaggcggatcacttgagctcaggagttcaagaccagcctggataacatagccaggccctgtctctacaaaaataaataaataaataaaattaggctgggcgcagtgattcgcgcctgtaatcccagcattctgggaggccgaggcagatggatcactggagctcaggagtttgaaaccagcctgggcaacaaggtgaaaccccgtctctacaaaaaaaaaagtacaaaaattagccagctgtagtggcacacacctgtaatcccagctactcaggaagctgtagtgggaggattgcttgagcccgggaggtggaggttgcagcgagccgagatcacgcccctgcacccaagtctgggggacaagagtgaaaccctttcttgaaaaaaagaggctgccctagtctcaggatgggtgtgtcttttagcagagacgcctccacattcccttccctcttcccaccccagagcactgctcccaaaatcccacaaggaaccctcaaagctcaactggcaggagtgcaaaatgatacagccactctggaaaactggctgcttcctataaagttaacatatgcttaacctatggcccagcaattctactcttagatatttagctccaaatacatgaaaacatgtcaacaaaagacttgcatacatatatttgtagcagctgtattcctaatagccaaaaactgggaacaacccaaatgtccaactagaggagaatggatacagtgtggtatattcaaaggatggactacagctcagcaatcaaaaggaacacaatgctgatacagatatcaaaggatgagtctcacatggtgagattgttcacatggtgaaagaagccagacacaaaaaacacataatgtttcattccatttatatgaagttctaaggcaggcagaacaattttatggtgatagtagaagagggttgaggtgaggagggtgtcactggaaagggttgcaaggtagctttctggaatcatgaaaagtttctatgtcttgattggggtgctggtcacatgggtgtatacctatttaaaagtccaacaagctgtataactaaaatctgagtgttttattgtatgtaaattatacaagaagttggaaaatcaccaccacagcaaacctcaataaataagaaggaaataatgaacagaaattgatgatatagagaacaaaaaatgacagattaatagaaaccaaaagcagaatctgaaaacaaaaattaagaggaaacacttttggcaagactggtcaattgaagaagatagaagatgcaaatgcaacagagcttttaaaaataaagaatgtatctgaaaatctagatgaaatgaatatattcctagagaaatatcaaatgccaaaactgttccatggagaaactgattactcaaatggagcaattagtaatatagaaattgaaatggttgtcaagatcttccctttccccacaaaaaaaaaaaaagggcccagatgatgtgtgtatgtgtgtgttcctttctttctttctttttttttttttagatggagtcttactctgtcacccaggctggagtgcagtggtgcgatctcagtttaccgcaacctccaccttctgggttcaagcaattctcttgcctcagcctcctgagtagctgggattacaggtgtgcaccaccacacccagggaatattttgtattcttagtagagatggggtttcgctatgttggccagctggtcttgaactcctgacctcaggtgatccaccctccttggcctcccaaagtgctgtgattacaggcatgagccacctcgcctggcccagatggtttttataagagcattctaccaaactcccaaggattcctttcttattaaagttaattcctttcttattaaagttgttctagatattagaaaaaagaaaagatgtctattttaacaggctagtgttagctgaagctgcgaaggaagaggcactctcatacatcgctggaggcaatgcaaaatagtacaaccctctcttccaccctccctctccctctcctttgtctattttcctgcctccacagggctcactgtgggaccacagatgcaccccactatgcccagctaattctttgattttttgtggagaccaggtggtggtggtggggtgtgtgtgtgtgtatgttggggcgtgggggggtctcactttgttgcccaggctggtcttgaactcctgggctcaagcaatcatcctgcctcagcctgccaaagtgatgggattataggcgtgagccgccgcgcccggccaagactccatttattaaaaggctaaagaattttgccaggcgcggcggctcgcgcctatagtcccagcactttgggaggccgagcgggcggtatcgcctgagctcaggagctctagtccagtctggctaacgtggcgaaatcccgtctccactatggtaacatgtaaacatagaaaagataacagtaaaattttttctgtgttataggaccgttgaccaaaatgttatgcagcacatgattgtatatccataatttatattactgtatatagtcacagatatctattataatacgggtttgtatgtgaaactataattttacttattgttatgtttatggtctgtgtatcttgctagaatgtcagctccatgagcccaaggaagaatttccagcacctggcccatgtcaaatgaacttttttggccacctgagtctcggtctccccatctgtaggatgggtgtgcctttccatgtggaggcacccacacgttccgtttcctcttcccaccctacagagcacggctccggcaattccacagctcaggcttacattttcccatattctggacgctggtgcccaccacgtgcaccaggcactggccagacagaactaccacccccagcatgccgcgcgcatttgggccgtaccacaacctgtagggtcatctgggtctgaaacgggcaccagcgacgcgggagcagggactgacgcccctctagcaaagcatctgtggtacatcccagacccggggctctccaaggccccgcgcttccgagctccgcgcaaactctggcttctcttgtacgacagaggtggtttgctcttccgttgccccgtggcttcagctcatctttggcaggaaggcgaggcttccgcccggcacagggggtgagctggagcaccgtgcccccaagcctctggacagcatttggaggagggtgcttccctaatcccaacttcggggaaacccctcatgggcgtatttggagcctccgggcccggggtgatatttagggggcgtctgcttttgagacccttaaggggtgccgtttggggacttcggggtgggatttgggagtctgtttcggggagcacccctcggaggcagggtttggggggctttggggagattcttagggtccgtgtatgggcacccttgtccgtggagcaggatttgggttattcttcaaggggagaagcaaagcttgaggttactaaagtcaaggcgggactgggggagggcttgtttcaggacggggtcctggtgacagaacaatcgggaccgacgtggcattgtggaggtgtcaggcctttgtgacctctggttttgtgatgaggtcctccccgcgcctggaggctcaggactgcgagactggacacgtcgggggcccagatgtttctagggagaggagcctcccagctcaggctagggaagggacaccggagcccagctcttcctgagctgacgaggcgccacccggcctttattcattattcataataaggtggggctgtggtaggcggcagtttttttgcctctttcgcacctggtccgctgaaggttctcggcttgtgaattattcacgaggggcggatcagcgtgccgaagggacgtgctgaaggggcgttctgaagtctgccgcgcaaacgagttcattgatgattcgcaaaagttaagtagcaccctgagttttcagtggcttttctaggggttccgtgcttaattcatgaggagcgtggcttttgcagctttgtctgcgtgatccgcggttagctttcccttgcaggtaccagagttaaaacctggcgtctagcaaagggatgaggcctcctacattgttcatttcttatggcctggtaatcccagataatcagccggctctggattcaaatcccatcgatcctttccagttgtgtgatctttggcaaatcgttttgtaagcctgaataatgggtatgaggataacgataagattagcttacactcgtttagctacttagcgcatttaatcttcacgacaatcctaggaggtaggtcattattacccccactttatagataaggaaactgggacacaggaaggctaagtaatttgcctaaggtcacacaatcagtgagtggctgggccgggattcaaattggggtctagttccgcaatctgtagtcttaaccagatgccataatgtctcccctccccattcccctgcgccgccatttgatagtactactactactaatataacacttagcatgtgccaggcactggtctaagccctttctacttatttcttcatttaaactccatcgcaaggtaagttgctgttattcctattttatggatggggaagcagtggcccaagttgggggtttctctagtggctgagtattcataactaattttatattaatgtaaatatatatttacatatcttaacatattacttttatattaatatataatattttaaaaatttaacagtgccttgtgccagcaatgttctaaggctcatcccataatttatattctctgattttcttttgtttgagacggagtttctctcttgtcgcccaagctggagtgcaatggcgcgatctcggctgactgcaacctctgcttcccgagttcaagcgattctcctgcctcagcctccccagtagctgggattacaggcgcccgccaacatgcccagctaatttttgtatttttagtagagacagggtttcaccatcttggccaggctggtctccaa

SEQ ID NO: 96708 - DNA, 21578 bp, Homo sapiens
tccaccttccgggacctgctccctggggagtatgtgcagatggcaggccgggcagggcggaggggcctggaccccacaggcaccgttatcctgctctgcaagggccgagtgcccgagatggcagacctgcaccgcatgatgatggtgagcgggccagcatgctcggcagggccccagctccaggaccttgctggattctgtcttcgattctcctctcttctttttcttcttccttttttttttggagacagggtcttgctctgttacctaggctggagtgcagtggcacaatctcgggtcaccgcaacctctgccttccaggctcaagggatcctcccacctcagcctcccaagtaggtgggattccaggcacatgccacacaggcctggctaattttttttttttttttatgctttgtagagatgaggttttgctatgttgcacaggttggtcttgaacttctgggctcaagcagtctgtctgcctcagcttcccaaagtactgggattataggtgtgggccacagcgcccaacttcctccgacttttttgttttgcctgggagaagctgaggtaggagtgagtgaatccaaggatgagattggagcccatctcttccagttttctcccatgtgaatatggagctagatggggcctttgagtccatttatttcagtttgctcccttatgttacagaagaggtgagcaagtggtttgtccaaggccccatggttgcagagctaggaccggatctgacgggagtaggcccagtccagaagactggctggggttcagtaggtcccaccctgatctcagtgacttctgtgacctgactccaggggaagccgtcccagctgcagtcccagttccgcctcacgtacactatgatcctcaacttgctgcgagtggatgccctcagggtggaggacatgatgaagaggagcttctctgagtttccctcccgcaaagacagcaaggtaaggagcctggggtaaccagtgtgtggagcaggaggttggccaaagacaggctgggaataggtaggcatccagaggccagtgtgttgagggtggggagtgtgacagattgggcctggagactcccctttcacagcttcccctgctcccacccaaggcccatgaacaggccctggctgaactgaccaagaggctgggagctttggaggagcctgacatgactggccaactggtcgacctgcctgaatattacagctggggggaggaactgacagagacccagcacatgatccaggtgagcaagtgtgagtgctgaggaggtgataggagaagggaagagaagatcgtgttactctaggtgctactaaacttagtccaagtgtctgtccctgtgatgcctcctcccatctgtcctttgctcttcagcgacgcatcatggagtctgtgaacgggctgaagtctctctcagcaggaagggtggtggttgtgaagaatcaggagcatcacaacgcattgggagtgatcctacaggtgagggtgatgggaatttggactccagagggtgggagggagcaagccctctctccattttccccacttggccagggcaggttgcgtcatcatagggccctcattttcccctcttgccctccttttcaccctctcccttcccatcaccacatcatgctcactccttcctcccaccaccccaagaagtctgctctgatcgcttgacttggttgcccctctctactggtgagctctgcatggttgcttcctgattcctgcccaagggtgggtatctggtctctgcctttgatgtctactcatcacacccccctctcctggcctctctgaccacccccaggtctcctcgaactccaccagcagagtattcacaaccctggtcttgtgtgataagcccttgtcccaggacccacaggacagggggccagccactgcagaggtgccctatccagatgacctcgtgggattcaagctgttcctgcctgaaggtgagagtgtggcagatgtctgttttctgccagcagtataagcaggatgcctgggtccatggcaatgtctgccctgctctccccttttcacagggccttgtgaccacaccgtggtcaagctccagccaggagatatggctgccatcaccaccaaggtgctccgggtgaatggggagaagatcttggaggacttcagcaagaggcagcagccaaaattcaagtcagagatgctagggaggcccttctcctccagaggggcacgtagaggcagggaggggcagtggtctgggagtttcctccagcctgagggagaccatgaagtggtggggttgtagtgagggggctcccccagcctaagggagactgtgaagtggaggttgtagtaagagggcttccacagcctgagggaggcttctgggggagagaagatcttaccccagatcttaagatctgctccctcttcaggaaggatcctccccttgcagccgtgaccactgctgtccaggaactgctgcgtctggctcaggcccacccagccggacctcccaccctcgaccctgtcaatgacctgcagctcaaagatatgtcagttgtagagggtgggctccgggcccggaagctggaggagctgatccagggggctcagtgtgtacacagcccccgttttcctgcccaggtaggaccctgggtggtaactcccaagctgggagtaggggcttttcctctgtggtcccctgtagactgaccgcccccatctcagcccttgtcctcagtgcacccctgctaaggggcaaggagaaggctgacgggtggctctctgcagtacctgaagctgcgggagcgaatgcagatacagaaggagatggagcggctgcgcttcctactgtcggatcagtcattgctgctgcttcctgagtaccatcagcgagtagaggtgggtggggcagtggttggggcaggggggctaggggacagcagtgtgtccaatgcccaccctttttcttgcaggtgctccgaaccctgggttacgtggacgaggcgggcactgtgaagctggcagggcgggtggcttgtgccatgagcagccatgagttgctcctcactgagctcatgtttgacaatgcactgagcaccctgcggcctgaggagattgctgccttgctctctggcctggtctgccagagccctggggacgctggggatcagctcccaaacaccctcaagcaggtaggggacaccacccctttctccctgccagggctgtggcattcctgaccttcaccttcaggtagtcccccaggtgaccccctccagccctgtaagtgccccaaggatggaaaatggctgccttcttgatctggtccttccctgtcctggagcaggaaggcaggccttaacctctccttctttcctgcagggaatagaacgtgtccgggctgtggccaagcggattggtgaggtccaggtggcttgtggcctgaaccagacggtggaggaatttgtgggggagctgaattttgggctggttgaggttgtatatgagtgggcccggggcatggtgagtacctgaggtttgggattttgcagacggctggctggggagaacctgcccaggctgagtgcatccagtcctcaccctactttccccacagcccttctccgagttggcagggctctcagggacccctgagggcctggtggtccgctgcattcagcgcctggctgagatgtgtcgctcactgcggggggcagcccgcctggtaggagagcctgtgctgggtgccaagatggagacagcggctaccttgctacggcgggacatcgtatttgcggccagcctctacacccagtgaatgccccatgtaaaaacatgatgataaaacagcaaagcactgttgtgtgcttgagttgctggacagggatgactcagctaagaagacagcgagagaacctcttagaaatatgcttttattatctgcacacagagatatgactgcctccctctaaagcattactatttgggagagggagtcttggggggtgatgggaggtcctgagtcatagcttccacataccatatgggcaggaaggcgtaaggtgcatcttggtgtacagacacggtgactgggccgccaggctcccaagagaagagatgaacgagcctggggggcagatggaggcatcagttgagggccagaggctggatcctgggatccagaggggagggacagagctgaatgcctcacctggggtcatcctggacaaccgtgctctgggcaaagctaaggaaggcggcacagaagttcatgcacacagagggattccagccgtcacggtcattctggagcaggcagaggaggaggcagaagatgggcagtgggggtggtgggaggagagaaggcaggctgttgccctggatgctagacctgtggtcttggtgtttggggatacgggtgggagctgcaacatcgttcccttaccctgacatattcaaacatcttcatggtaggaaaggtcttgagggaagagacaaaaccgtctgggttacggaagccagcaacaacattcgggacccctgggaggaatgactgagcccaccatttcaggagcttgtgtctgacaggaaaagcaagggatcagtgggacccctcgtgcaccctccattctgccttcaccctcctccccaagtccctttcccagccttcaagcctaagctctcgccctgcccaccccgatcctgaacctgtagaaactcctccattggccagggctgtgcatctccttggaggtcttgagctccacatagcaggttgggggctgtgtggatggggcttgggggtctgtgcagtctacctcccctgagaagagcagagggtggcttcccaggcggctgcgtagcacagagcagaaggccacgttggtgttaacctccccagaggggtctggggagcttccaggtttgtctgcacaaggagagaagcagcagcaggcgtggggggctctcaacctctgggaaggggaagggggctatgaagcaggggcaactcacctgcacacatgtactgctcaaatttgtatcccatgtacataagctcccggaggagcggtggccgagcaagcctctgggcccgagcgttcggtgtctccacttcactcaggtatagtgttccctggaaccgggaggctgccagctgccagccctcctgccgctcatacggtgtcgtcagcagttttgtcaggtgcccccgccacgtcactatggcctctgccagccagcctggacccctgagaggcaggagttacaggctgaaggtctgacacaagcattagtgagatgctcccctcgaagaatagtcttgtttcttctaaggactgattctcaccccggctttggctctcctaattttagagggtaggtacgggtctccagatatactgcctaccacgctttgctcacccctccaaccggcctcggtgttccaggagccagcacagcaggtggtccagcctttcctggacctcctcgtcccggggctggtatcgatccgggtatccgtctctgaggtcaaagttggggcctggaccgttagtggggggtgggctatagtagcgcagggctcgggcatctccatggtactggcgttgagcatccagggagaagcagcccagttccgaagggcgccggtagaaaggaaagggcccagagtagagggcagggtctgtgggcagagaaggtgctggacgaggtagtttgttccgaggctcagctacctctgtcttctcagctcctctcttggtccccctgggatccatgaggtcctaagacaagcaggggtacagagtttccattctacagaggaggcctggagaaggatgactggtttaggactaagcgagccacctgatcgccaggctctggccttgaaacattcaggcccctcagacgccaccgcggccaagctctcatcctgcctctttccttgcccttcacccaccctccctccaggtcctccaaatgcagtgaggttaggaaggacgtctgcgctcagatcaagaatccagttacctcaaagctccccaacttccacctccgcagagctatgacgtcatggcaggcacgccagaggccgaaggatgcaaaagtggttttctgctttcgatgatgcaatcattcagcgacagtggcgggcaaacccctcccggggcgggggaggtgtgagcttcacgaaggaggttgacaccaacgtggmcaccggcgcccctccacgccgccaacgagtccccgggcgtgcgtgcccttggagggagccaatccgcggccggcgtggggcccggcctggcggaggtgatgctggtatgtgcgtcgccaccgcccctcccagcactgacgggcctgagggacgacaagttgacgctcctttcgtcatcacctggtctaggagggacgcccggggagaccgtacgtcactgctctgcgccggaagaccctattttcaggttctcttccctccattcctaccccttccccggtaccataaaatcccgggatatgagctggaagaggcatcacctgatcccggagacctttggagttaagaggcggcggaagcgagggcctgtggagtcggatcctcttcggggtgagccaggtaaccatggcaaccccgggggtgggkcctcgcttccggtagccgagagttttgttagaaccgcgtccccgccccagttccctgtccgtgagccgatttatctgcccagggtcggcgcgcgcggctgtctcagaactcatgcagctgttcccgcgaggcctgtttgaggacgcgctgccgcccatcgtgctgaggagccaggtgtacagccttgtgcctgacaggaccgtggccgaccggcagctggtgaggggcgtcggtgcgaccgccggaagcccctttcctaactcctggaattccctgtcactcagtcactccgccagccgttcagcaagcattaggcctttcaggcgagggcactgtgccaggcactggggtgccacagagaccctgttaaaagtcccgcaggtagtacagggcatttcaaatcatggaggtagaagaacgaggcttttggggaaaccgagtcatggggcatggttcgaacatacagcgctgggagtgcagtcagacgtcagatcatgacaggccttgtacatcagtgttgtttccatcttacactgaggcgatgggctggtagagaatatcatagagagagggaatggtgtrttggagatagtggatgaggcagggaggtcagctaagaagatactgcatctgagaagtggtgaaggcctaaattaggtcagtgcagtagggagggagaggagagtgaggaagagggaggagtccaggacaactcagactttccagatgactgcgtggctggtggtattaggagcacatttagttgttggactacagataatgtgtttaattttatacaagttgagttgatggtgcatgtggagcatccaaagacaaaggtattagacagttggatatgagagttggagagaattctgggccagtgataatagaattacaagtcatggaggtgtgaatagcaagtggttaattctgtgatgtggtgagatccagtaggaagagtgggtagaggagtgatttctaacctttttgtaatctttagaaggtgataaaagctatggctatctctctccagaaaaatgcacgtttgccacrtatacatagggtgtatgtrtagttaggggggaaatattttactaatcctgcgaggtccgtggttaaggactccaggtttagagtggaagttaatagggtcaaatccacaatgctgggaaacaccatcatttaaggcagtgttactgaatatatgagctgagttattatgcctgtgtcaaaattacrtgggctgcttgttaaaaaaaatacaggttcctgggactcatccaaggttaatgaattacgctctcttggggcgggatttgggactctacatttttgaactgcctcaagtgctttttaagtgtgccttaaaatttgagatccactgacrtaaagggaaagcagaagaagaggaatctgtgacagaggcagagagggacttgcctgagttaagaggaacccagaggccggcgcggtggctcacacctgtaatcccagcactttgggaggccgaggtgggtggatctcttgagctcatgagtttgataccagcatgggcaacatgacataacccmakctctacaaaaaatacaaaaattagccaggcgtggtggtacgcgcctatagagctactggggaggctgaggtgggaggattgcttgagctggggaggcggaggttgcagtgagctgagatagcaccgctgcaccccaccctgggtgatagagctagactttgtctcaaaaaaaaaaaaaaaaaaagtaacccaggaagaggcctactgtgaaagtaaagagatttttgagaaagtgaagtagttggcagtattagaacctgtgattcaagacagtggtctaagaagagggaagaggtaaagtaaaatataaactgaaatctaggctgagtgtggtggctcatgcctgtactcccaccactttgggagactgaggcaggagwatagcttgaaaccaaaagtttgagaccagcctgggcaacaaagtgagaccccatctttactaaataactgagatcccatctctactaaataaataaattaaaacacaaaaattcttagctgggcatggtggtgtgcacctattgttctagctgtttgggaagttgaggcagaaggagtgcttgagcccaggaatttgaggctgcagtgagctatgattgcacgactgcactccaggctgggtracagagggagaccctgtctctaaaaaaatgaaaacaacaacaaaaaaacccagaactgaaatctgtccattggatttagcaggtagaaggttaatagtgatctttcaagaaaagaggaaagaaaaggaaggcagtctagcactcacttgaggtgagctagtctccctgactaggtctcccgtgaggaagcatgccagatggaaccactccttaaggagtatttgttgattttaatgtattggtgttagcttttgtttttaaaaacctttaaaagttgcagaatgaaaatataaacatatataatttaaatgatgtttataaagcagatacctatctagccactccctaggtcaaactatagaatatgaccagtatcccacatatatccctctctgatcaaaatgtctctgatcagaatgtccctgggaggtgactgctgtggtcattgttgccttagttttcccttttttttttttttttttgaggtggagtgtcgctctgttgcccaggctggagtgcagtggtgtgatctcaactcactgcaacctctgcctcctgggttcaagcaattctcctgcctcactgtcctgattagctgagactacaggcacgcgccaccatgcccagctaattttggtatttttagtagagatgggggtttcatcatgttggccataatggtcttgatctcctgacctcgtgatctgccctcctcggcctcccaaagtgctgggattacaggcatgatccaccgcacccggcctaattttgtatttttatagggatggggtttcaccctgttggccaggctggtctcaaactcctgactcagatgatctgcctgcctcggcctcccaaagtgctgttttttttttttttaattgtctttttgataattccactatttttttttttttttgaaaagtctcccatgtctacctctttccacacagacacggcaaccatccgatttctcaatcttttccccaccttttcccgctttctagtccacaaaaccaccattgtcatcgtggcccgttctcaatgagctgttgggcacacctcccagatggggtggtggccgggcagaggggctcctcacttcccagcaggggcggccgggcagaggcgcccctcacctcccggacagggcggctggccgggcggggggctgacccccccacctccctcccggacggggcggctggccgggcagaggggctcctcacttcccagtaggggcggccgggcagaggcgcccctcacctcccggacgaggcggctggccgggcggggggggctgaccccaccacctccctcccagacggggcggctggccgggtggggggctgaccccccacctccctcccggacggggcggctggctgcgtggggggctgacccccccacctccctcccggacagggcggctggccgggcagaggggctcctcacttcccagtaggggtggctgggcaggggcgcccctcacctcccggacggggtggctggccgggcagggggctgacccccccacctccctcctggagggggcggctgccgggcggagatgctcctcacttctcagacggggcggctgccgggcggagggtctcctcccttctcagacggggaggctgggcagagaccctcctcacctcccagacggggtcgcggccgggcagaggcgctcctcacatcccagacggggcggcggggcaaaggcgctccccacatctcagacgatgagcggccgggcagagacgctcctcacttcctagatgggatggcggccgggcagagacgctcctcactttccagactgggcagccaggcagaggggctcctcacatcccagacgatgggcggccaggcagagacgcccctcacttcccagacggggtggcggccgggcagaggctgcactctgggcactttgggaggccaaggcaggcggctgggaggtggaggttgtagcaagccgagatcccgccactgcactccagcctgggcaccattgagcactgagtgaaccagacaccgtctgcaatcgcggcacctccggaggccgaggctggyggatcactcgcggttaggagctggagaccagcccggccaacacagcgaaaccccgtctccactaacaaaatacgaaaaccagtcaggcgtggcggcgcgcgcctgcaatcgcaggcactcggcaggctgaggcaggagagtcaggcagggaggttgcagtgagctgagatggcagcagtacagtccagcttcggctcggcatcagagggagaccgtggaaaggataattccactattacttgtcttttggggtttgtttttattctctctttgagttttgtttccttatgcgcccagttacttttgaaaatgttctgggcagatttgcctagattaataaatgccctccatgttccaattacttttttttttttgagacagtgtcttaccctgtcaccaagctggagtgcagtggtatgatcttggctcactgcaacctctgcctcctgagttcaagtgattctcctgcctcagcctcccaagtagctggcattacaggcacctgacaccacgcccagctaattttttttttttttttttttttgagacggagtctcgctctgtcacccaggctggagttcagtggcatgatcttggcttactgcaagctctgcctcctgggttcacccattctcccgcctcagcctcccgagtagctgggactacaggtgccygccactatgcctggctaattgtttttttttttgtatttttagtagagatggggtttcaccgtgttagccaggatggtcttgatctccggacctcgtgatccacccgtctcagcctgccaaagtgctgggattacaggcatgagccaccgcatctggcctatttttgtatttttaatggagaccgggtttcatcatgttggccaggctggtcttgaacttgaacttctgacctcaagtgatccacccttagcgtcccaaagtgctgggattacaggcatgagccaccgtgcccggccccagttatttttatttttattttttgagttagagtctcactctgtcacccaggctggagcgcagtggcatgatctcggctcacagcaactttctgggttcaagcagttctcctgtgtcagcctcctgagtagctgggactacaggcacacatcaccacgcccggctaatttttgtagttttagtagagacggggttttaccatattggtcaggctgatattgaactcctgacctcaggtgatccacccacgtcagcctcccaaagtgccgggattacaggcttgagccatctcgcccggcctacttagatgttatattagtggtaattcctgttatcctgtgagctctttagtgtctaaacaattttttttaagagatggggtctcactgtgttgcccagttgcaatcatatcttactgcagcctcaaactcctgggtcaagtgatcctcttgccttagtctcccaagtagctaggaccataggtgtctgcccccacgcctggctgtttttacattttttgtagagatgtggcgggtgggggggtctcactgtgttgcccagactggtctcgaactcctgtcctcaattgatcctgctacctcagcctcccaaaatgctgaattacaggcatgagccactgtacctggtcttaaacaattttaaaataacatttttatccaggattttagttaattttcaacaggtggattagttcttgctgtattctcgtaaacagaagtcctggtttatttttatttgttttaaacattgaatcccatactcctccccaccttaccctacccagaatttagactgttaatgttttgaagccacagcctgcatcttaatcactattttatcttagtgcctggtcttagaaattatattgactctttgatagaccatatataaggcaggtggatgagaatgtgggtagctagttggaaaaggctgcttggtcatttgcttgattattttctcacacagtttttcctttactaagagaaaatgcccccatattggcaaacaaaatctccctgcctgagagcrcccagagtatagcagagcatcttaccctgatacgcctcttttcactctcttctctgtggagacagaaggagcttcaagagcagggggagatcagaatcgtccagctgggcttcgacttggatgcccatggaattatcttcactgaggactacaggaccagagtatgtgactgtgtgcrtcaggggtgctggggggagggcacaggttgggggagacagggaasttgggaaacagaaataaaaacaaaagaaagaatttccctgcccccacatcccatggagagggcacagggccctggtaaatagtaatatgagggagagagacaggagggaaagagggaggagtgagagggtaaagagggggggagaggagggggaggaggaggaaggaaggagggggaggaggagggggggaggaagagggggaggaggatgaagaggaggaggaagaagaagggtatgagaggtggaargatctgagcaagaggtaagacaggaagagaaatgctktcctgggggtggaggttggtagagagtgagggtggggatggaccatgtctctcatctctgcttgtaggtcctcaaggcctgtgatggccgaccgtatgctggggcagtgcagaaatttctagcttcagtacttccagcctgtggggaccttagtttccagcaggaccaaatgacacagacctttggcttcagggactcagaaatcacgtgagacttgtggaaccaaccaaagtcaggcatctggtgcttccctgcctccctccagttccatccagcctgtcctcctgtttttttggtgaacctgccagaaaagctgccaaaaagctgactcttcttkttaataaaatgacccaagtttgtattcctccccacaagagaggaggcctatcttacctgggccttagaaagagccctgaaatagaattcagttcttggtggcttatcaaaagcacacaggggcctggcaggaastgtaaaagcttgatgttaatcatactgggactaagaggatagagaatggtaggagctgggatacccctaaacattcacattaaaacaaaaaaaacccaaagctaaaaaacaactgggcaggagctaaataaaaatctaattttgagaggctgtatctggctcaggcctcctactttgtaacccatggaatatgtgaaagcatttgaaaaactatagcactgatctcacatgggcagacacactctcagagagatgtggtgggagccatggcgcagtctgcctaggcagtggcaggagcgcagaagactctgattcctctcctcggtcctaagaccgaatgtgtgtcaggacakgtggtcagggaagagaagctatttaactgaaccagtaatagtagcaggaaaagaaaaagtggagggagggcagtcmaggtagggggcctggaacaagcaactgcaccaacagaggcagttggtgcgagcacagaaccaccccaggctgggattttgttatccagtctctcttgcatggttgcccgtgtttctggagacttgtgtaaacattaatggatgaggaggagagatggttctcagagcccagccctcatctctgctggcttcccactgccctcaggcatctggtgaatgctggagtcctcaccgtccgagatgctgggagctggtggctagctgtgcctggagctgggagattcatcaagtactttgttaaaggtatcccatctgcagctcaagcctgcagcccctcaccttttggtggctcctcaggcctctaggccttattcacckttcccctytcctgtgccacttctcctctagggcgccaggctgtccttrgcatggtccggaaggcaaagtaccgggarctgctcctatcagagctcctgggccggcgggygcctgtcgtggtgcggcttggcctcacctaccatgtgcacgacctcattggggcccagctagtggactggtgagtctttccctggcctctggcagattatggagcaatgacccaaagtgggatttcctcccagctcatgcttagtttcctagtgaaggccagtggctctcattcttctctggaacccgggagcaccccttcccaagttctaagttctcctcacagcttgagcctaggcgtctggctccagccttgtctttctcctgcacagcatctctaccacttcaggaaccctcctccgcctgccagagacatgaagattctgctcatcattgctcagctcctcagagtgggccgggaggggactagaagagctgcatgatggtggctgagacagggtcaccttgggaaggcttgggagccaggatgagtgtcgggctctcgtgtgtgcaaaaggtcagatgtgactgctgctgtttgcctggtttctgacccagtggtggggtttgagcaatgcttctctgcccttccatggaaagtggaaccagaaatggtgccaaggctgtggctgttccctttcgtgtaaaatggtrctgttattactctgtcttgaaataggaaggtgggatttctggggaggctggtgaaggagggcagggttcttttctctaygtgtcatgttaaaattgccaaataaagtacctctgcctgtgatattttctggatgtcctttatttactgtgacgtgtgtttgggtgccttgtttaggggtagaggtgaagtctgagctttgcctcattcagagaggaaaggggtcaggggttcactctgacgttcaggccattctccctgtggagtggtgagggtgtacctaatctcctaaaccacggaatttctgttagggcctaaaaaagcaaaagcctagtatagttcaatttgtgttggaatgaaagtaagagacaagtgtcttagaagcctgtcattgttttgtgagggcctttaaatatcctgtactcgtgggccatgttgggcccttgtacgcccaggtatacatgagcttgtgtgcacctataccctgatacagatatacctggtagggggaggtgctcaggcactggaatgagaggagttaacggggaaggacagggttatttctgggccaagattcagagtttcccatggacacccaggtgtccggggtgcccccacaactctgggcctgaggccagttgcacttcttggctgtcacgtggtttcccagcttagctgggctgggggaggagcaaggtccagagtcaactctgccccgaggcctagcttggccagaaggtagcagacagacagacggatctaacctctcttggatcctccagccatgaggctgctctgggggctgatctgggcatccagcttcttcaccttatctctgcagaagcccaggtcctggaggcgggatgctgggtgcttggattggggcagggctggcatcgggacccgattcaggagtgagggagagcaggggtggaggtgtcagagcgaagtctgactgctgatcctgtctgttctccccaggttgctcttgttctctccttctgtggttcatctgggggtccccctatcggtgggggtgcagctccaggatgtgccccgaggacaggtagtgaaaggatcagtgttcctgagaaacccatctcgtaataatgtcccctgctccccaaaggtggacttcacccttagctcagaaagagacttcgcactcctcagtctccaggtaaccagaccccatgccctcctgctgcttgtgggggcctcctgccctgttcccatctgtcttgtaagtgtcatcatcttcccactggcctcctcccctcctgtcttcccaccctggcattctccttccacgtttctcccttggtctctgtcctttttggtcagctgtctcttgctctgtgacccgctccctctccctctccctctcctgacaggtgcccttgaaagatgcgaagagctgtggcctccatcaactcctcagaggccctgaggtccagctggtggcccattcgccatggctaaaggactctctgtccagaacgacaaacatccagggtatcaacctgctcttctcctctcgccgggggcacctctttttgcagacggaccagcccatttacaaccctggccagcggggtgagtctcagccccagggcctcaacctttaaccccctccgagccctctcaggatgagtttggtgccccctaagtgagataacctgaaagaaagtgccacacagaaggggtgcttaggaaacatttgtcccctgctccctctgtggagtttgacccaccctccccttgcacatggacccctgctcacctctctcctcctccactcccagttcggtaccgggtctttgctctggatcagaagatgcgcccgagcactgacaccatcacagtcatggtggaggtgagtccccgacctctggccttcctgatcctggccactgatgtgacctcctgcctgtgagcacttctccccttgcagaactctcacggcctccgcgtgcggaagaaggaggtgtacatgccctcgtccatcttccaggatgactttgtgatcccagacatctcagagtgagcgctcccaatgtgggggctgcccccaagctacaccaccccaattcctgttaggctctccacctcccacacagaggcacgtccccagatgccctgaccctcagcctcctgagcctctggttaacccccacagtcctcttcccagggaagcaggctgctggctctccgtgccccactgtacagatgggctgagccccttccttgtccattctcaggccagggacctggaagatctcagcccgattctcagatggcctggaatccaacagcagcacccagtttgaggtgaagaaatatggtgagagctggaaactggagggacaggcagctgctttcctgaaggaaataagggtggaaggagaggtactgggagcagctcagggcagggagatatgggtgccacagccctgagcagaggggagtctttgagctggagtctgacctgcctatcccttcaccctgggtcagtccttcccaactttgaggtgaagatcacccctggaaagccctacatcctgacggtgccaggccatcttgatgaaatgcagttagacatccaggccaggtaatacctccctccccacctctgcccaccagcaccgggtcctgctccctactcagtatgaatgggctcctgcttccctgccctcgggccattattccccccagcccttggcccaccctcttctctctgccacgacaggtacatctatgggaagccagtgcagggggtggcatatgtgcgctttgggctcctagatgaggatggtaagaagactttctttcgggggctggagagtcagaccaaggtaggaaggagaataggggctggggaggggaaggggcaagggaggtgaggtgggagactcagtctcaccctatgtcctgtttctttctatgccccagctggtgaatggacagagccacatttccctctcaaaggcagagttccaggacgccctggagaagctgaatatgggcattactgacctccaggggctgcgcctctacgttgctgcagccatcattgagtctccaggtgggtgactttcccttattgtaaccccagacccttgcctctgacctctgagctaaccctctgtcctccggcaccaacaccaccccacttctcacatctcatctcagactcaaaaccaggaaacacccaggagacctggtttctctccaactctgtctctgtgactcggcccttttccctggctgagtttatttatttctttgctcgttctgctcattccttcactcctccagtggacatgtgttgttcaatgccccgtgctaggcctcagcatgcacagacatgttggggaccagcctcaacgccacccgtagggttcctgaagtccattggtgacacaggaatgagaagagacaggttaagagttcataaagagtgggggccagggggccaattgcaaaatggaggctgcaaaaggctcagagctctggtctccacactattttttgagtacagtcactcagatctaagaagcagatgttcagggagaaacagtgaaagggaggcagtgggtcataggcgtaatctatagcaatagagttttaaatgaatctcctttgtgctcaaacagcatgtctttaaattatcggagagtagctggtggaagtgggcttagctagaagactgcatgtctgtccaatgcttcaaaggagggtctttctccttgaacacagtgtttacagataagacagggggtctcactctgagcatgggaacatgatggcaattaggaggcttttcttctcagaggcctcttgtggctttccacaacttattgtctcatatttttatggacagtttatacaggcaccccacaagtccttttcccaacatgcccccctccctttttttttttttaaccgctattgctattatggcttatttgtggtgtttggtctgttttcagaagtgtcttttgcatctgtagactaaaagtaaacagcataaacagatacacattaaagtaaaatttgtaatagttgatcctttaatggtcttaatctgtttaagaggatttatgtttgaaagtccgtcagtagctccaatgagaatgtcagtctcaggcaggagggttaaatgagcctgagatgctttaaaaacctgtttttttaaaatttggttatatttaatgttaaatttttatttttttcttttagatgatgtctaactttttaaaaatgatgtttagtagtattatacgaatggggagttatgtagaaattggaagtatttcaattacattgtacttctaattgatgttttaagtttattgtacgatcttccatttaaataacagtctgtctaagatcatttgtttgatttgtcaattgttggtctatttgggtctgagaattccacaattttgaggaattttttgttaactatttatatattttgtagtttgaacagaggagtgtaaagcaattccagcagccgcagcagtagctgtgactgcaataaggcccataagactgttataagggtaaaaataaatctctttgttttggtaaacacttttttttaaaacatttttgtgacaatatgaatggaaggagaggctttctaaggtctattgagggaaaccagtatccaaactcctttcttagtttttatcagtaacacagatgtttttacaccgaacgtggaattaatacaggtgaaaaggtgacagttttgacaagtaatagtttgagaattaggtcgaatgtcaatatttttgaccattaacataaaaggagggttgacacaactctgaatgggcactgttttgttggaagaaaactgatacgcaaattgaagtttttaaccttttttttttaaagataatatatttttttctaaacttaaatatgagattgggccattattaactttcataatttggagtgtttagggcctattattggattaattattttgggatgtgggccagctgtactaaaattggtccaaattatgggaaaatgagcacgtttttcagtgtaagtagtgttacctttttgatagtatagtttctgttttagttttgtcttgtatttattattttgatgggtacaattaactgtaaaggtcccctcaggggaccaattaatgacaatttcataggaattattttgtagtaccatagtgtgatcagagatgtaattttttttaattaatatttttaaattatttgaccattgttaaggttgttggcacctcttttttgggggcttaaactgttaattgaattgaactctgtgaatgatccgggctccatccagaaaataaatgataggatactggtctttgattatgacctggaattttaactagtcaatgttgtcggtagccttttaggcaaccgatagttggccttatgtaaagaggggggaactgataacctatggacacatttattaacttttttttttttcctttgggtgagagggcccatgagtatttgtaggcttagggatccaaacgctattattaacataaacttcaactgggggttttaaccatgtgacaggcctaattaaaggcaggaatgggacacatgcccaataggtataattttgggctgttgtagccacaggtttgttaggcgaggaggtcactgtttttattttggctttgtattctaggattagtaaataacagaagacaaacatgagtataattagtaacttttttttttagtaaaagagtgacctgtagtgttacttggcatcttagtttactatatgttattaatgaggaaccccactgggggtatgttaatttattctagctaagcagttatgttattagaagctgagaagggggtgtttgttaaagtaacagggcagaagaaaggcggatttaagatacgagcttaatacagtgtagcaggtataggtagtaggcaaagtgagagaattaaaaatgaataaattatttggcttagacttttgtttttttagtataatgtctgaggcctgtgttgtttgtggaagtcgcattgttgaggctgtagttcctgtagggtcttttttaggctggttcaaatgttttttt

SEQ ID NO: 96709 - DNA, 102640 bp, Homo sapiens
cccttttgggggtaacattctacttaactggagctcaaagttagtgatccttagcatcaaagtcattacaaatgttcatttgtaaaaaccattcttagctcatggaccttacaaaaacaggcactgggctggatttggtccacaggctgcagtttgccgatccctgaactgggccaacagataccttaggactcctttttaatcaataaatttgcttccttaattaaaacatgtcctcaatggttatataaatactttggttttactagtgttattttaatatataatataaaaataaaccagctcagtcctcatttaaattgctaattcaaattaaggggtatggcttagtaacactatactataatttgtgtaaggttggcagtagcaatccttttatttttttttacatttttatttttctaattacttggcaagcagtagcaattctataatcactgcttttccggaagtaaaatcaagtaaatattaccattatgtccatatttataactatgaacaggcccaataaggtaggatttcttttcttttcttttgtttttgagatggagttttgctttttgcccaggctggagtgcaatggtgtgcaatctcggctcactgcaacctccgcctcctgggttcaagcgattctcctgcctcagcctcctgagtggctgggattacaggcatgcgccaccatgcccggctaattttgcatttttagtagagatggagtttccccatgttggtcaggctggtctcgaactcctgacctcaggtgatctgcccgcctccgcctcccaaagtgctgggattacaggcgtgagccactgtgcctggcctggtaggaattcttacattgcatctcagaagagagaggtaattattaaaaagtgtatattaaagacacattattgggaggctgagggatgagaatcgcttgaacccagaaggcagaggttacagtgagccaagatggtgccactgcactccagcctgggcgacagagtgagactctctcaaaaaataagtagttccaagatatgagaaaaaaattgtacatactaactgtgaaaaaccaacacttattatttgtaaacatgttaagatactaaaaaacattatgttgatgattttcacatttaattatatatatatatatatatatatatatatttaaagatagagggtcttgctctggatcatagctcactgcagcctcaaactcctgggctcaagtgattgtcctgcctcagcctcctgagtagctaggactggagtgtgcacaacgcctggctagtttttaaatgttttatagcgatggaccctccctatgttgtgcaggctggtctcaaactcctggcctcaagtgatccttgatcctctggcataggcctcccaaaatgctgggattacagtgggattacagccacacccaggaggattttcacatttaaatgaaaatgaaaatgaaaaccgatactctcaaacacaagttaaaattacaacacaactctgaatgaaacatttaacccattattacttggtagattcaataaaatgaaggaaaaaaattatggtgtcagacttcagactgacttttgagactgaatacatttattacaaacgaagaccattacaagtgtttatttagaatgataatgtcttggcttctgcataccatgttttcaaaaaatcttttttaaaataaggcttcattttaaaaacacttaaaacaagacaaacccttattttggcaaatgtcaattctagaatatcaacctgagtatcagtgtatttggaagagagtataaaacaaagggtcaagaattttgatagaatagtttttgaaaataaaacttgaaacattaccatggtataaagactatttcaaaattacaatactactgtgcttaaacaagtaatttgaaagataaatctttgaaagaaaacatgaaagcgtacataccctcatttctcctatacaagtttatttaaatacattcaatgtattttctcttctacctaattatttcagaagtatccttttcataggaatttactaaatataccttttttttttttttttttttttgagacagagtctcgctctgtcgcccaggctgtagtacagtggcgcaatcttggctcactgcaacctgtgactcccaggttcaagcaattctcctgcctcagcctcccgagtagctgggactacaggaaccccccaccacgcctggctaattttttgcattttgtagtagagatggggtttcaccgtgttagctaggatggtctcgatctcctgaccttgtgatccgcccacctgggtctcccaaagtgctgggattacaggcatgagccacggtgcccggctaaatataacatataaatgacttttcaaaaagagcagaaagttgaaaacactttctctaggaaacctttcattttcttttttctttttcttttttttttttttttcagacaggatcttcctatgttgcccaggctgctgttgaactcctggcctcaagcattcctccctccttggcctcctaaaatattgggactacaggcgtgagccatggcacctggcccatttttctttttaaacttatttctatttccaaatagccataaatcaaacaatgatatcgtgacctgtaaagtaagagcttgaaattctcctactttgcactagtaaaagtaaaatccaaggcaaatcacttaatttccctgaacttcagtttcttcatataacatgaagataaaacctaccttgcaagatcgtgagagctgaggaaaacacattgtgatgtgccttctactttcatacttaggtggtgagaatgtaactaagcacaaccattctgaaaaactggcaagacctagaaaggctgaacatggctgggcgcagtggcacacgcctgtaatcccagcaatttgggaggccaaggcaggtggatcacttgaggccaggagttgagaccagcctggccaacatggggaaaccctgtctctactaaaaatacaaaaattagccaggtgtggtagcacacacctgtagtcccagctactcaggaggctgaggaatgagaatcacttgaacccaggaggtggaggttgcagtgagccgagattgcgccactgcactccagcctgggtgacagagtgagattctatctcaaaaaaaaaaaaaaaaaaaagctgaacatatgaataccttatggccatcaattccactcctagtacatatattctagatagacactgtccaatatggtagccactagcacttgaaatgtggctggtgcagttgggaactgggaattttaatttaattttaattaacttaatctcaaaacagatgatcaaatcgttattagaaaatattaatgtgtctttggaggccaggagcggtggctcacgcctgtaatcccagcactttgggaggctgaggcaggtggaacacctgaggtcaggagttcaagaaaagcctaaccaacatggcaaaatcccgtctctactaaaaataaaaaaattagctgggcatggtagcacatgcctgtagttccagctattagggagggtgagacagaagaatcacttgaacctgggaggtgaagattgcactaagccgagatcgcgccactgcactccagcctgggcgacagagcgagactctgtctcaaaaaatatacaaataaaataaataaataaaagtgtctttggaacaatttggatatatgaatctactttatcaactgtaaatcttataaacataatcacagatcaaaggtttatatttatggaatataaaaaatatatttaaaatattttcttagagacatcaagcctctagtctttaaaaaaaaacaaattttttttttgagatggagtatcactctgtcgccaggctggagtgcagtgggtggtgcaatgtcggctcactgcaacctccgcctcccaggttctagtgattctcctgcctcagcctaccgagtagctgggattacaggcgtgcaccaccacacccggctaattttttgtacttttagtagagactgggtttcaccatgttggtcagaatggtctcgatctctggacctcattatccgcctgcctcggccacccaaagtgttgggattacaggcgtgagccaccgtgcccagcctaagaaatatgtttttaaaagaacctttatagccacattgtttattctctctcccaactgtaaacaacccaaatgtccaataacaatagaagggattatggtatagtcacactgtagaatattatacaacaaaaaactacatgcaaaagtgtgattgaatctccacaaatatggataatgagcaaggggtgagtcagaaaaaaatacacatgcactctgaacccatttatatagattgaaatgcctaacaattcattttttaggaattcatcatagacggaaaaattaaagtaaaacaagtgagtgcttagcacaagtcaggataatggttacctcttggtggaggagatggaatcacagaaacatactgggagattctaaggcagtgtttttcaaccaatttttaactattgtccctgtaaggaacctttctagacattttattcctaatcacaccccccgccatgaaaatttaacactacatatatactgtataactgtttatatactgtggccctttggagggacacaaatcattgtagtaactaagattccgaccccggccccaccaattttcaaccccttgaaatgtaaaatcacccctgttaagactgcatgttctaagttattggcaatgctttattttctaatctaagaggtggatacaggagtgtctgcttctgttagttataattttttaaaatgtatgttttatacacccttctgtatatatacttgacaataaaaaataaaaatagaaaaattgacttaaattgtgctgaggactgaaaaatggtggttatttccgtttcagagcagctcaaataataacagtaaggaaattagttaaataaagaaaaaacatgcaaccaaaaattttaaaagctatctatgtctgaagtgaatctaaaagtctcatgaagatcaacctccactaaaggaagctggctctaagaaaatgtgctggtatcctttccctaagaaagaaataagaagataatgctacttccactacatgcaattttagtttaccgaagactatcaagtatatatcttaacttcctcgtattaaaaactgtgattatatgaatattagaacataaaaaacaaatgaactgttattacttttagtgatgctgttcttctgcctttgcgatccaaaggcaaacaaagacaattttgcgtgtggcagaagcgggaacaagcacctggatttaacaactacagtaatgatcactgaatcctccaaccacctcttcctaccccaactctaaactaggacttcattagttctcgcctgctagttctttgatctccctcccagcctcccatccttctccatttagtctctccttttctgcactccccagaatagagtctagctcttaatcctaatcaacgggcctcccaccaactccctaatttacctgacagcaatctgacctctcaggacactcaactctgcaaccggagccaaccggaaacggaggttgtcacctcgagtttctcacggcaggaaagcggagaagccgcttaacgttccgatactgggttagagattcctgaatcaggtagagactacatgagggacgctggaagtcgattattttcccagtatatgtgcatcctcaatctgactgaggtaacagatactgtagaaaagagaagggcggggaagataatatgttgtccttgcttggggacggaatccttagacaccgcacacagggcggggctgccggcatactgcagccaataagggaggctgttgttgagagcgtgttctcacccaatgagagggttggttgttgcgctgcagttggcaggctgctgcgggaggcggcggcggtaggaagccggagacagcagggtgacaggtaggcggcggtgctgtctttgggggaggcaaagtgctagatgaagaggggttttcttctccttcggccgcggaaactacagacgggagctggcgagggtggtctggaaaggcggtagccggtgtgttggtggtcccggaacctctcgtaaaccaggtagcatcttgggagggtcgtgaggaggagaaggcggcagccgaggcgggtggaagccgagccttgtggggcgacgtgggggcccacctagggcgtgggggctgcggtggcgccagcagagagggaggagaggcgggagcaaggcggtgtcgtgagggctgaagggattctttgcacaaagccccaggcgagaaaaggacacggcattgaagacagttaagagaaatcccagtgattgcttcttagggccatttcctgggggtggtgagggggagcggagaagaaaaatatttactggcggtcagattctgaacactcattattgctgtacattatgtaatctttggctgttatttacccaaacaactaggttgtccctcctgggagaggaggtcttgcaacctattaatgtgttagaacacttttttcattggcttgagtgccatttacattggcaggttctctaggcgaagggtggtagcatggaggatagagtagtcacgaagagcttatcccaattatggacttgacagatactagtttgcgatgaatgtggccaggttcatgttttgtagttcgtgaatttatttgagggtcaaggctgacaacattttttaaagatcttcagaaaagtggggaatcctttaaaaatgtacagtaggagctcagtgtaagttggaaaatgactagaaaattagttggtagatcccttcctccccccaggatattgtggaagttagggactgtgcaaataaggtggtggtctgaatatggggaaaaaaataaactttttttttttttgagacggagtttcgctgttgttgcccaggctggagtgcaatggcgcgatctcggctcacagcaaccttcgcctcccgggttcaagccattctcctgccccagcctccggagtagctgggattacaggcatgcgccaccacgcccgactaattttgtatttttagtagatacggggtttctccatgttggtcaggctggtctcgaactccggacgtcagatgatccgcccgcctcggcctcccaaagtgctgggattacaggcgtgagccaccgtgcccggcagaaaaaagtcaacttttaagtagtttgttctgtaagcaagtctgagaagctacttatgaattatttattaggtttaaaaagtggactctgaacctctcggacagaggcaaaatatatttatagatataattaactaaattatcttatttaaaaaaattttataattcattgtttccacaataaaatgtagaattaaaataggaattctattcagtatgtgttatggaagggcaaacgacataaaaacttgattttgtaggtcattgaaaaacaattttgagagcagcactggaaaatgattttaaaagaagtgttataaatttctaaaatgtaaggtgtttgaaatattgcctttagcttaggagataaggtctaatgtagtgtcagcaactctacaattttcctaaatttatttcggtactgcatgtcagaaaaactttataagatgtgatttttttctattaatggtaatttatattcctatatatgaacctaaatcaaaatttcattttttctcaaaaatttaattgggaaagaggtgcatcattaaagttgtttgttcccagatgttctcagtactgagacatttgtcagtgctttagataaaaatttttattgatgtttggtgttttgttctttgtcttttctccttttccaagaataatgcaatctcagtcacaaagaaaatttctggttctattttaggtggaattctgtagtgttttgagtaccagttaaatctttgcttttatgcgtgtgtgtgtgtgtgttgcttttatgcgtgtgtgtgtgtgtgtgtgtgtgtgtgtgtgtgtgtgtgtttcttcttatgtaaccagcctactagagctgtcttagagaactaatggctgattttgaatggccagtaggtgtcattgtagaatgcagtaagttgagtatcgagtaggaaattaccaagtagctaaagaaacactagtccaaattagcatatagtgtggttagatgatcgtttatacgttatagaagttctctctgatgaaacatttcagtattggagctgtttataaggaatttgaaacaatgattgtaaaggagtttaattgtttgccctaaaatagaccttgaaagtgtgttttttagcccggccctttaactgtcttgacatgcaattcagatttaagtttgattatttgcaatacagttttggcatcttgtagtagtttattaagttctagaatgattgaaattttcagcttgactgagtcttatagaaaaaccaatgctacatagtgaaaaactgataaaatatgggcagaagtttcaaaactagttatcataccagtactttgtattgttctttttttttccccttagagatccttgttccgagttactgttcttttaaagccagaacagaagatttttttgtctgtcatcgtctgtggcttattatcttttttttgatttccagaattgcttctttttacactttatctggtcagtagcctatgttcttttcttgggatgtggaactgaacatttatcactgactaaaatgtagtggattctggagggagccagcacagaaagctctgaaagtagcttacatctgttccgagtacagctccttaccttcctagccttctgttgagcccttgtcactttgtagctctgctccttaagcctgtgatagatacagtgttttgaaaaagtttggacctaatttaagaattcttcatggagttggaaatagatacctcaaaacaatttaggagtttttaaaaaggcatacacatatcacttatatcatctccacttcccttcagaattttacggatgggaggagtgtgaagggggtagatgtattttggaaacaaattcccttgattaatttggttcaccactggcttccacttcagagtggaagtgccttggtctaattcaaggctctagcacttgtggtatgaagcagtaacagtagtttcagctttagagaaagggctgccaaatctactaatttactaatacttttatagctcaataaattgtcaccatttcatgtcatagctaggatagcttttttttttctttttttgagacgtagtttcacttttgttgccctggctggagtgcagtggcgcgatctgggctcacagcaacctctgcctcccgggttcaagccattttcctgccccagcctccggagtagctgggattacaggcatgtgccaccacgcccggctaattttgcattttttttagtagagacgggatttctccaagttggtcaggctggtctcgaactccggacgtcaggtgatccgcctgcctcggcctccataagtgctgggattacaggtgtgagccactgcacccagcctgtcatagctaggatagtttttctagccgggagctggagttgccagaaatgaaaattgtgctgaatgttttggtttggattagttcttacttggcacttagctgctttccataaatcaaactaatttatttcatgattcagacctgtgctaatttgtatagacatttatatcctattctcttactgtccctgaaagctatctagttctagaattaaactaaaattggaaaataagagttggagtaattcaaggtccttttctgataatgctatatgatgaatatatgcattaatctttgcattaacattcactcagtaatatatactaaaagttggcattgcaaatatgtttaccttgacttgggtccagtttagaaacttacggttcatctttgtgaattctagactttctgtttgggtatctggctgccatggagacaaatctgagaaaaagtatgagtagattttaattttagagaaaagcataaaaactcaattatgtaatatattaagaggtgtgactttgattatttatagaattatagtactttctaggtttgaaatataactgccaaaaaagtggtcataaaatatggtaagtggcatcaatttattgaatggcaaagcatggtttacagaatatctgttttgtcctattttgacacatgaaacttcaaacagtgttagaatcaaatttatccatcacctttgtcattttgaatacttaactgttgatagtgcttgattctttttttttttctggtgagaagatactaatatatatacttagaattagccagccgaactcagtttagatgatcccaattttgttgacaacctccaaagcatcataatcaggagccagtcaaacataagccttcttctcttcatcaggtctgatcagggtcttgatcttggctcatcaatgttatggagcttctttgtagcctatttgacctggtgcttgttggctttaacatccacaatgaacacaaatatgttgtcttctatcttcttcatggtgaactctggtcagcaggaacttgatgatggtatagtggtcaagcttctttctccttgtatcctgctatcttacaaggatatttgggctgcctatggggctgcagtgccttgggccaccgggacgtgggtgacttgcggatcttctttttttgtgtatgtgtttgatgccacttaccatattttatgactactttcagcctttcagcactgctttcttggccttcaaagcctttgctttggcttctgctttaagatgggtaggagcttcctttttcgccttcggcactatcttgtgaaaacagtctccctgattcttaattaatatagacttgttagctactaagacttgccaattaacctccttaaattcctttccatattatatataaaatggatgagagaggcaagttagatactgagcaggtactgaaagttataatttttccatattcttttgtattggggctttttaatctgtgtattcgttctttatttatttattagtttatactttttaaatgaaaaaaggtgtggggatgggagagagtatactactgtcctttctacattatagggtgactgtaagactcaaatagaaaacatagtggctgggcacagtggctcacgcctgtaatcccagcatctcgggaggccgaggtgagcagatcacttgaggtcaggatttcgagaccagcctggccaacatggtgaaaccctgtctctactaaaaatacaaaagttagctgggcacggtggtgcacacctgtagtgctagctactggaatggctgaggcaggaaaattgcttgaacctaggaagtggaggttgcagtgagccaagattgtgtgcactccagcctgggcgatgaagtgagactctgtctccaaagaaaaaaaaaaaagaaaagaaaacatgaagggcttttataaaatctaaagttaatttgaatttgcagtattttacagtatctgctatttatggaaaatactaggggaaatgaatataaaacttaagactcaaatgtttctgttccttaaggttctgaatcttctctcattttatgctttgttactctgtgatttttttatttaattagcatccaaatatgatggttctcaatctgtgtctctaatccagagctttccctttaactttagttcctattctatacatgtaattgcctgctagatgaagatgagctacaggtccttcaactataatatgtttaaaagtgaattcatgttttcccttttgtcatctttctaacctgctggagctggaaccctgatgttatctatctttaacccttacgcttcatctgagcaatgctaggttctgttgactttaccttcttactctttctttgattccatttacttctctcaatttctgtagctgctagaaatattatgaagaattagggcctagaggcaactatctagattagaatcctagctccgctatttacatctcagtgtccttatctttagaaatagagttatacaagccaacaattgcagtcttgggcatttgttccagagaaactgaaacttacattcatataaaaacctgtgtgaattctcatagcatctttattcctaatagccaaaaactggaaacctaaatgttcttcaacaggttaaatagactatagtgcatctatatcatggactgctatgcagcaataaaaaggaatggactgttaataaaatgtaacaacttgaatgggtctcaagtgaaaaaaatctcaaaattgcatattccatgattccatttatataacattcttgaaatactaaaaataaagagatagagaacagattcgtggttgccatggtttaggtatcaaggagaggggagtgggtgggactacaagagtgtcttggtgacagaacagttctgtatcttgattgtgatggtaattacatgagtctacctatgtgataaaattgcatagagctatacacacacgtatacatgagtgcttgtaaaactggttagatctgagtaaactttgtagactgtagcaatgtcaatttcctggtcttgatattttactgtagttattcaaggtgttcccattgagggaaaatgggcaaagggtacatgagacctgttggcagttttttttgcaacttcctgtgagtctataatttcaaaattaaaagtttttaagaagaattgttaggattaaatgagcagatacacagaagatttttttccagagaattaaatcgtttattgattacacatgataatggatgatacacaagcttcattcccatctataattttatctggtaccattattcaatttagatatattgcataggatgtgccaacaatcacttttataaccaataattccatgattttgcttgggtaatcccttttaatggtgaacttcaggtcacaacagtaactatcagttcaactacaccaaggtttccgaagacaatagcttctccacccaagcaggttgtatataaattccaaatagaacctggcatcaccctgaaggaattctaacttcacactgttggggaaatttaccaagatggcttcagagtagactaactttacacagcacattaaaaaaaaagacatttattcagcgtcacgatcagactattacatttagcaatcaacagcatgggtgcaaaaaaaaaaatctacattaaaaccctttgttggaatgctttacactttccacagaacagaaactaaaataacctgttatacaattagtcacaaatacagtcctcgagttttttgcccatacacatgagtatttgtctaaaacatgtcttctttgtagcagctaggccctgccaccactgtgcttggctgagttcacaaatctgttgtaacctgtagcttccctgtcacttctctggctctcctctcctgctaagctttgtttcctaattaaaatcttctgccactgccatagctactgctactgctggaaccgccatagccaccttagtttcgtggttttgcaaagtattggcctccaccgccataggggccagagcttctgcctccaaaatttcctcccttcacgggtccaaaatttgaagactgatttttgtaattgccaaaatcattgtagcttccaccacctccaaaatggcttccatcattaccaaatccattatagccatccccactgccatcatatccaccaccaccacggctgccaccaaagccaccacgaccactgaagtttcttccatgaccaaagttgtcattcccactgaaaccacctccacgaccaccaccaaagtttccagaaccacttcgacctctttggctagatgaagcactagtcatctcttgctttgacagggcttttctaacttcacagttgtggccattcacagtgtggtatttctgaatgacaatcttatccacggagtcatggtcatcaaaggttacaaaggcaaagccccttttcttcccactgcctcggtcagtcatgatttcaatcacttcaatttttccatactgttcaaaataatctcttaggtgatgttcttcagtgtcttctttaatgccaccaacaaatatctttttcacagttaagtgggcacctggtctttgagaatcttctctcragacagctctctttggttccacgactcttccatccaccttctgtggccttgcattcatagctgcctccacctccttcacagtggcatatgtgacaaacccaaagcccgtggagcacttggtgtttggatctctcattaccacacagtctgtgagcgttccccrttgctcaaaatggctcctcaggctctcatsggttgtttcaaagctcaaccctccaatgaagagcttcctcagctgttygggctctttaggagactctgacttagacatgacggcagggtgaagagagactttaacgatgcttcttcggcggcgtccacgggcagaaaggagaagatttttattatagtacttgatgcataataaatgttagctgctattaatagtaatagcagcagcagcagcagtagtagttgttcaggcctctaacctctcagtaggcctctcactaggaccatttcaacagttgccgtatatatatgtttatatatattatatatataaatctaattaatatatttaataattattattatttttggagacagggtctcactctgttgcccaggctggagtgcagtggtgcgattatagctcactgcagcctcaacctcctgaactcaaatgatcctcccatctctgcctcttgagtagctgggattacaggcgcttgctaccactcctggctaatgttttttttttttttgtgagacagagtctcgctctgttgcccaggctggagtgcagtggcgcgatctcagctcactgcaagctctgcctcccaggttcatgccatactcctgcctcagcctcccaagtagctgggactacaggcgcccgccaccaccacgcctggctaattttttgtatttttattaaagacggggtttcaccatgttagccaggatgctctcgatctcctgaccttgtgatctgcctgcctcggcctcccaaagtgctgggattacaggtgtgagccaccgcgcccggcctcatttttgtatttttaatagagacaggatatgttggccaggctggtcttgaattcctgacctcaagtgatccacccttttcagcctcccaaagtgccaggattacaggctggagccaccatgtctggccagatttctattataatatagtaatttcctcccaccagttttgccagttgatcttttattaaagatagtatacctttgtatttgtattccataatattacaatatgtgcttttactttattttataattttttgagacagggtcttgctttgttgctcagactggagtgcagttgtgtgatcgtggttcactgcagcctcgacctcccaggctcaagcagtcctccctcctcagcctcccaagtatttgggaccacaggcatgcaccaccatgcccagttgattttgtcctttttatagagacgaagtcttgctttgttgctcaggctggtctcaaacttctgggctcaagtgatctgcctgccttggcctcccaaagtgctgtgattacaggtgtaagccactgcacctggccagaatgtgtactgttttatgcaagtctgttgggtaggccacagagagatcagtttattttccgttttctttaagaatgaaaaacagtctaaaaaatgacagtcagtaaaataatttgtgaaaagatttttctgaattaaattttaaatttaaaaatttaaaaattttcttattcaataaaaataaaaaaaaaaaaactataagtatgaaagacttcaagtggcagccaggaagaactggttcaaagtatttatgaagtataaatagaaaagtctgtataatatgcaggaaaatcagccttaattgattatgattgttgtgctacagcagtgtttttttaaaacttgaaggaggttaatctgtagaagagtcaactattttattttattttttttttcagatggagtttcgctctcccaggctggagtgcaatgctgcagtctctgcttactgcaacctccacctcccgggttcaagcgattcttctgcctcagcctcccaagtagctggggttaaaggcatgtgccaccatgcttggctaattattagtatttagtagagacagggtttcactatgttaggctggtttcgaactcctgacctcaggtgatccacccaccttggcctcccaaagtgctgggattacgggcatgagccaccaccacacccagccaactttttttttttttaatttgaacaagttttaaacagctagttgaacatcttccattaaaatgttcctttttttttttgataaactatttattttcttaacccattattttcatgtaatttggcttttccagttacagttttgtaagccacattgcctttttagaacataactaccaactgttggcaaaaaattacagtactgtagtatgaaatttgttagtgtactaaagtactctaaacatccatccatatgttgtactctccaagagtagaatctcttttttcagtcttgcttcctactctacccctcccatttcagtagaaatatcttatactttatgaacattaagttgaggcatagctgagatggctgttggtgttttagaatacaaatttgttgctggagtctcttttttgctttatcagttaggaattgtgtttggctgccggaaacagagataagaaataaccattgcttaaagtagttaatttggtaaaaaaaattcagacgtaggagatctagggcctatatggcaactctgtggagttgtcaagggcacaggctgcttctgtcttcttctttcgccatctttagcatgtgtcttctactttcaagattacctaatggttgctggacctccagccatcacatttatgttctaggcagaagaaaggaggaagaaaggcatagacaaaagggctatatctctcatcttttaaaaaaacctctctagaatttcctacacaacacttcttctgatctcattgactgaaacatagtcatttggctatacttagctacaggtaaggttcagaaatggcttttagctggtcatacaaactagattagtgagagtggagtaaggatctatattggatggaaactagtaatctttgacatacttgctccttatcttctatactgtatctgctgctgaccgcctagtagtgctgttaagctcttcattcaatagacatgaattaagtgctaactatgtactaggtcctgttaagaaccggaaatgcaaatgcaagtgaggcatactccctgccccagaaaagttgtggtttagtaagaagaacccccccccccccgctttttttttagacagagttttgctgttgttgcctaggctggagwgcagtggcgcaatctcggctcactgcaacctccgcctcccgggttcaagtgattctccacctcagcctcccaagtagctgggattacaggcatgtgccactacgctggctaatttttgtatttttagtagagacggggtttcaccatgttggccaggctggtcttcaacttttgacctcaggtgatccacccgcctcggcctcccaaagtgcgaggattacaggcatgagccactgcacccagtcaataagagggctcttcaacctgcacacaggtctttgacaacataagatgttgagtactatgggctgttgtgactatgattctgcccaccccatcaatttatgaggcttaagagggagaaggggagaggccttctttggaaggggagtattaatggaaagaaactattccctgctctgtgaggggaaaggaaagggttttttccttcccaaaagtcaagataaggaggtcytgaaagagtcactctctgtcattaagaagagagatttacatttgctctttggttgggtatctgcctagccaccaatctcacttatatgcccctgttctactgaagaagacatggtaatggaatgcctgataccagggccaggcattcccatctataacttggattcctgttctgagagrtataagagatggattctgcatatatccttaggtcattctgaacaagtcaggaactatattcatcagggttttccagagaaacagaaccaataaggttgtgtgtgatttattataaggtttattataggaattggcttacacaatttaggaggctgacaagtcccgagatctgcagggtagttggcaagctggagactcaggagacctgactgtatagttccagtcagacacagtccaaagtcctgagaaccagagataacatagtagcagtcactcaggcttgagactctgaagagctaatgtttcagtttgagtttgaaggctggagaaagccaatgtccttaggcaggaggaactgactctctacttgggggaggcttagcctttttgtctgttcaggctttccactgattaaatgacatccaccacattaggaaaggcagtctgctttactcagtctatagatttaaatgttaatctcatatggaaacacccagaaaaatgtttagctaaatatatggagatgagattggaaacatttttatccagggtagaatggaagctctctgaccagagaaaagtgtcatgacatagtgataagaaacaaatgtaattcgatatgaaaatttctgtgatttctttttttttcttgagatggggtctggccctgtttcccaggctggaggccaatggtgcaatcttggattactgcaacctccacctcccaggttcaggtgattctcatgcttcaccttcctgggtagctgggactacaggcatgcgccacgatgcctggctaattttgtatttttagtagagacggggtttcaccatgttggccaggctggtctcctgacctcaagcgatccacccgccttggcttcccaaagtgctgggattacaggcgtgagccgctgtgctgggcctaatacctgtgatttctattggtgaccaaatcacaaaaatattatggctggttgttttattgttttgcctatactcacaatctaatgacattataaatgttagttagagattggtaaaaagtgatacaattttcttcttatcaaagtttatgagttttattatagatccctgggggtctgtggacgctatgttgagaacttctgtgtgaagaggaaggagagggctttgaattgatgcagggttgtatgctatggaaaagattcatagaggaggcaactgttggtctgagtgttggaagaaggggagggtagttaggatagagggtagttgaaaggcattccagagaggaatgtagcataagaaaatgtgtgaggtgtgagacagcctggcatattgtgaaattgtagatcagcattggtgaggggaagtctgtgttgagccagggtataatttctattcttgctgacaagaccattttgttcacgtgcctgttgagcaaatactggttacaaaggccatttagccaaaccgatagatccatatctttggtctcttcaggtatagtgaacaacgagatactgtttgaagttttgcctactgggagttccctttctcctgtcctgtagggctacttctctgtaaggtcaatgccagcagactgtatgcaaccatgtataaaccaggcctaagtttttttttttccttctttcctttgatcttagggaactctacaaggccatagattaaggaagagttgattagtagaagtaagtgccatgggtgtctcagccatttgttcttctagcttatttgtgcttttggagcctgctctaacctcattacaaccattgtagtcaggattacttggttatgtagtggtaacaaccaaccttcaaataaaggcttaaaatttgaaaaagagagatttgtttcctctcatgtaaaatctggtgcaagctgggtgattccaggcagctgttcttcatttgatgggtcagcattgcatatctatatttatctctgcttctattatcatagtgacgagaagaacaggctggagaattgcatactggcacataaatgtttctacagaaatgatttctgctctttggtcaaagaaagtcataaggtcacatttgacttaaagaggatagacaaatatagtcctcccttgttcccttgaaagttcatatctgacacactatcacttccatttcatcatggaatgctgccagcacatatagctttatggcttggaggatcggaacactcacttcttgaaagtatgtcaggtcacatggtcagtctctgctggtgctcaaaagccaagcaaggagctatttctcaaaagaagagcaatcatctgcagagagggcatagctctcttcagaagcagtagttctcatgcaggggcacacttgacaatgtttagagacattttgttggtccaattcagggcattgctattggcatgtaataggaagagggcagggatgctgctaaacatcctaccatgtaaaagacagcctttcacaatgtcaagggtgaccaaaatgccaatagtgccaaggttaagaaatcctgctttagatggacttaagtgcctggtggtctgtgttgtgattcttctagcagggcctactggtagctttatacagctactttatcatctaccacagacgctttgaataccaccgaatttgctggatattaaggcccaaatggcagagcatctttttttttttttttttttgagatggagtttcactcttgttacccaggctggagtgcaatggcatgatctttgctcaccgcaacctccgcctcccgggttcaagcaattctcctgcctcagcctccggagtagctgggattataggcatgcaccaccacgcctggctaattttgtatttttagtagagatggggtttcttcatgttggtcaggctggtctcgaactcccaacctcaggtgatccgtctgcctcagcctcgcaaagtgctaggattacaggcgtaagccactgcgcccggctggcagagcatcttatactgctaccttgacctcttgccttctcatgtcctaggccccatttaaaactggcagctattaatgaattattcaggaaatgggcagagcatcacactaaatatggtttatgttatttctagaatttaaagagttccactgtgcacagtgcttcattttattttattttatttatttttttttttgagacggagtctcgcactcttgcccaggttggagtgcagtggcgccatctcggctcactgcaagctccacctcccaggttcatgccattctcctgcctcagcctcctgagtagctgggactacaggctacaggcgcctgccaccaccccggctaattttttgtatttttagtagagacggggtttcaccgtgttagccaggatggtctcgatctcctgaccttgtgatccacccgcctcggcctcccaaagtgctgggattacaggtgtgagccaccgtgcccagctatttttattttagagatagggtctttctatgttgcccaagctggtcttgaactactggcctcaaatgatcctcccacatcagccacccgagtagctaggattacaggcataagccactgctcccagcattgtgcttctttctaagtggtggtggcaggctgagctatgataacttgtccttcatttttatttttatgtttttatttttagagacagggtttcactctgtcacccatgctggggtgcagtggcatgattgtagctcaatgtaacctcaaactctgggcttaagtgatcctctcacctcagtccctggagtagctggaactataggtgctcactaccatggcctgttaatttttgtattttttattgagacagggttttgccatgttgcccaggctggtctcaaactcctgggctcaaatgatttggcttcctcggcctcccaaagtgctgggattacaggtgtgagcccctacgcctagcctagaattttagtgtttgttttttttttttttttcgagatggaatttcgctcttgttgcccaggctgtagtgcaatggtgcgatctcggctcaccgtgagttttagttttacaagatgaaaagagtatggtgatggttggacaacattatgaatgtatttaatactactgaaatgtacattaaaaatggttaagatggtaaatttttttaccacaataaaaaaaattgaggaaaaaacacaaaagaaaaaaagatgccaatatttcaaatatttttgcctttaggaagaacttattatgaactgtgtcagttaactaagtaaggaatacttttagaggttaaaaatgccacgaaatccagacactgcatttcttgactcaactctttgaataccaaccgctttaaacatttatttattcagtatttgaaaggtttattctaaaattcaacataggctaggtacagtggctcatgcctgtaatcccagcactttgggaggccaagtcaggaggattgcttgatgcccagagtttaagaccagcctgggcaacacagcaagaactcatctctgaaaattaaaattaaaaaaattcgacatgttttcttggaatttatttttgactttaattttgtgcctacatacctaaataggttatatatccaatatgtttttaggttctttggtgttggatactactttttatgggggaaaattttttttttacttgaaatacaaggaatggatcctttcctccctccacccctatgtcactaaatgggagtaaattgtacttaagatatgcccaagctttagcacccagaatgtagtctttaaaatattatttcctactaaaaggggttccttggagaaatgtctggttctaggcctaaggcaggatttgtagaaggtaagtctggaacttcttgtcctagcaggaagctaggaggttatcttcatttactaggtttatgtcaaaagggcttaggagctttgtagagggtccctcaagaccattcccacatttcatgatttccaagattgactctcaggactcaagtcattttattcacagttatagtttattgcaatgagatgatacaaggcaaaatcagcaaagcgaaaggcatatggaatgaagtctggaagaaaccaagctcaagcttgcaagaatcctctcccagtagaattggaaaagatgccattaattctccagtaatgagttgtgtgcacagcctcagattagcccctaatgagattttaagggcttctccgattattcctgagcatgcgtatagcactgggtacacatccctttgcataaatatgaccttctggattcccaggaagttgttggagcttttcagagtcttttatggacatctcattccccagcttttcttttctgggttttttgtttgtttgtttttgaggtaaggtttgtttgtttgtttttgagatggagtctcgctctgtcatccaggatcaagtacagtggtgcaatctcagctcactgcaacctctgcctcctgggttcaaacgattctcctacttcagcctcccaagtagctgggattacaggtgctcgccaccatgcccggcgaattttttgtatttttagtagagacagggtttcaccatgttagccaggatggtcttgatctcctgacctcgtgatccacccgcctcagcctcccaaagtgctgggattacaggtgtgagccaccacgcccggcttgggcagttctttttctgatcttccctgagattactcatgtcatttgattgggactgttatttaagatggcttcactcacacatttgttgggtagtgctggctgttggctggcctatgtctattcattaggctagctttggcttcttcacatggctgctagattttaaaagtagaaasaagggcaagctccagtatgcaagcacttttcaaacctttgcattacgtgggatagtttcgcattcctataaatgtttttgagctctgctctgggatgcagttacatttatttgaaaatagttccagattttgattttacagatcacctgagttcaggagttcgagaccagcctggccaatatggtgaaaccccgcttctactaaaaatacaaaaattagctgggcgtggtggtgggcacctataatcccagctacttgagaggccgaggctggagaatcacttgaacccaggaggyggaggttgcagtgactggagattgcgccattgtgctccagcctggttgacaagagcgaaattccgtctcaaaaaaaaaaaaattttaagatttaatagatagtactggatctgtgttcactgtaggggtagtaagtccccattacttaggaagaactcttatgtgtacttgaccccatcctcaatggaattggtgagaagcggcactatttctggccctgtgtaagttctggacactgctacctctaatctttctggtgcttcttttcctggcttctggtagtttcctcacacacacagtgtgctgatcagttttcgtttgactactagagagggatcctttgcagatcttcagagttcgttttcagtacagctctccacattacgctgtcctctaacactttggtctacctgtactcttagctctgcctccttaactcagagagtctaccaggtttcacttgcctttctcttccttaccctgcagcctggaaagtcttgaggaaggaagttgaggcaacttcattgttctttactgtctgtgcccagtgtaatgaaaactgtgtttcatgtactttctttctttcttttttctttttcttttgagacagagtctcactcttgtctaggctgcagtgcagtggcacagtcacggctcactgcagcctcaacctcccaggttcaagtgatcttcccacctcagcctcctgagtagctgggactacaggcttgtgccaccatgcccggctaatttttaaaattttttttgcagagacgaggtctcacggtgttggccaaggtggtctcaaactcttgggctcaagcagtcctcctgccttggcctcccagagtgctgggataacaagcgtgagccactgtgacctgcctttgtttcatattttcttccgtgtttttttcttccccccctcctgttgcccaggctggagtgcagtggcgtgatctcggctcactgcagcctcgcctcctgggctcaagtgattctcctgcctctgcctcctgaatagctggcactacaggtgcgtaccactgcactgggctagtttttgtatttttaatagggatggggtttcactatgtcgcacaagttagcctcgaactcctgagttcaagtggtccacccgccttgccctccaaaagtgctaggattacaggcatgagccaccacatcgggccctcttccatgtcttaaattcaggcaagaaggtaaattcactttctgtcactccatcttgttgagaaatagaaggcccttctctcctcacacttttctccttccttagtattaggctcatgattgaggattggggtgttctctatggtcttggtacaatctcagttttgggctggtttttgtgccaggaccttacagttttcctgcccccaccccacacaatgacagattaggcaatacatatgcttaataccaaggtagtgattaattgagggagaactgacatctttatgagtcttcccaactcatgaacatggtatatcctccgctttatttacaccatctttattttctctcgaaaatgttttcttgttttcattgtagaggtcttatacatcttttgttagatttatttctagtcttattttttaatgctgttgtaagatgcatttttaaaaatttgtggctggtttatagaaacaattgattttttgtatattaaccttatattcagaaacttagataaattcacttattttaataatctatagagtcttttgggttttcttggtgtataattatatcatctgtgagtaatagcatttcttcctttccagtccttattctttttgtttttcttgctttactgtactagctaggccttccagtacaatgttgaatagaagtggtgataatggtcatctctgtcttgttttcaacctcagagggtaaagttttcaatattttaccattgtgatacttgctataggctttttacggatattctttatgaatttttcaataggttatatcataactgaatattgaatgtgtcatgcttttcctgtacctatttggatgatcacatgaattttctcctgaactgccgttatatgcctggagtaaattcctttttatatatggtattctttatatatagtactagatttaatttgctaattcattgatatttttgcctctgtgttcataagagaaattagtgtgtgattttccttccttgtaatgtctgtgttaatttttgttatagctatactgggtttgtttgtttgtttgtttgttttgagacggagtcttgctctgtccccccaggctggagtgcagtggtgcgatctcagctcactgcaacctccgcctcctgggttcaagcgattctcctgcctcagcctcccaaacagctgggattacaggcacccaccaccacacctggctaatttttatatttttagtagagacggggtttcaccatgtttggccaggctggtctcgaactcctgaccttaagtgatctgcctgcctcagcctcccaaagtactgggattatagacatgagccactgtgtctggctattataatggttcttaaaaataggaagtctttattcctttttttttttttttctttttttgagacagggtcttgctgtgtcacccaggctggagtgcagtggcgtgatctcggcccactgtaacctctgcctactgggttcaagagattctccctcctcagcatatttattattttctgttctctggaagactttaataagcttggtgtggtttctcccgtaattgaaagaattcactagtgaaaccatctttacttgagattttctttaaggaaagatttttaataatacattccatttctttatttgctttggggctatttggatattctgtttctttcagcattagtaatttaatttatattttttaagaaatgtgtccgttttatactgacatggttttttttgtttgttttggggggaattttttttttttttgagacagggtgtcactctgttgcccaggctagagtgttgtggcacagttatggctcactacagccttaaactcgtgggctcaagcaatcctcccacctcacaggctcttgagtagctgggaccacaggtgtgtgtcaccacacccagcttattttttttattttttgtagagatttcttctttgacctatagataatttaggaatgtagttttaggccaggtgcagtggctcacgcctgtaatcccagcactttggcaggctgaggcaggaggattgcctgagcccaggagttcaagacctgcctgggcaatatggtgagacgctatctctatttaattttaaatttaaaaaataaaaaagaaatgtaattttaattttccaggtagttggtgtttttctaggtttttctttattatttttgttattgttgttaatgatttgtagcttatttttgttgtggttagaaaccatactttgcatgccatcatcttttttgaagtatgttgaaacttctcttgtggctgactatgcagggagtctttgaaaagaattcaaatttttgccaggtgcggtggcttacgcctgtaatctcagcactttggaaggccaaggcgggtggatcacgaggtcagaggatcgagaccaccctggccaacgtggtgaaaccccgtctctactaaaaattaaaaaaaaaaaaaaaccggggtggtggcacgcgcctgtattcccagctactcggggggctgaggcaggagaatcttttgaaccccgggaggcggaggttgcagtgagccaagatcgcgccagtgcactccagcctgggcgatagagcgagactccgtctcaaaaaaaaagaaaagaaaaaagaaaagaattcaaattgtgtagttgctagttacagtgttctgtattagtcattttggttggttgttaattgcaccattcagatcttactgatttttggttgctttttctgtcaatttgctgagagagatgtgggtctccaactattattatggctttatctttttctccttttaattctgcaaatttttgctttatgtttttgttttctttttttttttttttaagacagagtcttactcagttgccaaggtgggagtgcagtggtatgatcatggcctactgcagccttgacctcctgggctcaagtgatcctcccagcctcccaagtagctgggactacaggcacacaccaccacaccctggttgttgtttttttgtttgtttgtttgtttgttttgtagataatgggtttcgccatgttgcccagactggtcttgaactcctgagctcaagcctcccaaaatgctgtaatcataggcttgagccgccatgccctgctgctttatgtattttgaggttactgggtacatataagtttatgattgtggtaccttcctgttggattgatcccttcattaatattactttaatctctaataatcatccttgccataaattctaaatctttctctgaaattagtgtgtcttttttaaggactgtgcttcttgtttaatccagtctgacaaaattcgtcttttactagaagaattttttctacatcggggtatctactcttttggcttccctgggtcatactggaagcagaagaattgtcttgggccatacataaaatacactaacacgaatgatagctgatgagcttaaaaaaaaaaaaaaattgcaaaaaaaattgcaaaaaaaaaatctcatcatgttttaagaaagtttacaaatttgtgtcgggccatattcaaagccctccctgggctgtgagttggacaagcttggtctatatactgtaatataattattaatatagttgggtttatatgtataatcttactgtcatttgctatttgtcccatctggttttttttcctatttcttgcctgcttttagattaaatattatattttccttctaacttgtttgatatatgtatataattttgttgtaatggttatcctagaaattacaacttccttctttaactttttacagtataatacaaactattactattactagtgtcacacaactgctaaaatcttagaacctttaaaccttataaggcatttcagttactgttttgaactgtcactattaacatttccttatactgtttaccccgatatatatattttttatgccccagaactgagcggatgatattgtttatttcttcctacatttccatgtttatgatttaggataatttccttctgtctgaataattccttttaagtttcttttagtacaggcttgaaggtgagattttttttttttttttttttgcaaattttaaaatttcacctttatttttgaaggatagttttgctgggcatagtattctagattagcagttattttctctttggccctttaacagtgttattctattatattttggcttctgttgtttctgttgagaaatttgtgagtcttactgttttttgaagagcaactcttttttttttcctatggctgcttttttatgatttttttctccatccttacttcttcccttccttctctagtttacggcatcctgggtagaattttcttttaatatgtcctgcttggtgttggcagagcgttctgaatttctagattgatttctgtcatsagtttttgaaaactcccagttattctttcttagaatattgcatttatcaatttatctacttttctaggacttctgttttatatgtgtgtgtgtatatatatatatatatatatgagaactgtgacacacacacacacattagacattgtgagtgtgcatcacatttctcttaaacctctccctctcctcctttcactactttccctttccccttcctctctcttccattcttttccctttatgcttcagtttgggtatttttttattgatttgtcttctagtttactcatcctgtattctgctgtgtctcatttgctctaagaccaatatattaaattcttcagattatgagactgatgtgctgccggctgcactgagagggctctatattgagttcttaatttcacatattgtatttttcggttctagagtgcttatttaattatttttgtagttcctaatccattagtgaaatgttgcatcttcagcagttttgtacatttccccttctattttctattaatcaggattactttaaataattgtccttgtgtgttaacttcattttacaattatctgtgagtctgattctcttgtctagttttctcttaattattggtcactttttttatccctttgtatttttagtaatttttaaattgtgtgccagactttgtatatgaaagaaccatagaggtgctatgcagtgttcccagtagggatcacatttttctctgttgcacaaattggtaaggacctaattaccttcaaccagacagggattgagctattttagggttgtcttaaagtttaataaactcattgttcttgtcatttggcctttttctttgtcactttttaaactgagagtctactgagtatctatctccttggccctgaagtctgtgggagatttgtctctgtagagattccccacatagccattctgcctatagactgcttcaaaaatttggcagtcatcttggtggttgtggttcaaaattcccaaggtacaaaaagagagtctttcccaccctatttccatgatatcaagtgccccttctcaaagtactaccagtctcttttgtgtctttccagagatactcccttagcccttttcaagttcttcccccccactgcagaaccttctcataaaacaaaactcacatgtgaaagcccagtgtatgagataaagtgtcagctgctgtggtggagtagggggtcctgacacatcttcagttaaaataattctaagagaattttatcacagtattctttgtatcaaagaaaggtagagcataatgtagtcagcaaacacatgaaaatagttattactttctaagaaaagtctccattttagcaatttgaaaatgattctgacaaaatcttttaatgtgtttttctgccaaaaattcagtaagagcattttttgtgttcttttctaaaaaagataagtttttcagttatgtgaaacccatccaaaataattttgtagcttatgatacttattatttaagcttggttttatactgcatattacgattttaatgagggtatttttaaaatgattgtgtgtttgtgtgtctgtgtatgagagagagagaaagaaaaatcactgtaacatgtttcaaaagagtcatagaatttttgtctggaagggacttaattttacaaataatgcaagtgaggctccagataatttaagtaatctactcaaggtcttatagataattaatggcaaatttgaaattaaaattcagactttctgtcttcaaaataatgctttttaattaggtttgataaaggtatacaagtatgctagttattacagaaatgttttggatctataattatttcttaaaattagataagctatattgtaaatgcctatcaaaactgttctttgtattacattcttgagaatattacctcaatatttcagttttctatttttattttttatagaattggaaaatatttaactcttaacaaatgaattccccacttgaactctgccgaattcctgtgccacctcctcctttagaaaactgatcttaatacaggtaaaattaagactttaactttttaaaggataaagaataaattttctatatcattagacatgttagcatttttggtaatctttgctggatagcttctatttattgagcagttttacctaacataatgacatcttaattattgcctttgaattctattttgaaagtttttcccttttataaatgtgttttttaaaaacctttctgttatctaaactttattgaagaattgaatttactcagcataattgcattatccggctacatctagatcgatgctgtccaatagaacttctttgatgatggctatattctatatctgtgccgtccaatataggagactctagccacaagtagcttcctattttagtcagtgcagctctgggctttgccttaggaaatttggtaattatactaatagtatgtcttaaatgcctaagttttagacttacaccttgaaatatcttcatagttgttggtcaagtttgaaaattagcagtagcaaaaccatcactggctatttcatatgttgtcctgataattgtatagcttggtttatcccataattttgatccacaagaaacctttgagagcacttaccacagttagttttgctcactgttgtatctttaacattttacttggtacctagcatgtaattggtattcacagtgcatattagttgaaagaatggatgaataatctccgtactataaaggaaaaaaatgcctcctaaattgttcaaaccattaaataattatattgataatatttctataataataatagtagcaagcatccattgaagacttatgttgtacagtcactgttctaagtaagaccttacgtgtgttgatttatcagatctttaaaaataaacctttgtcatagcgacatgcattattctcattttataagtaaggaatttgaagacagagattacttaagtagctttcccaaggacacatattattgtacttagagagcttggacaaaaactgtgagttttcttccctgcaagtagttctttaccttcttcagatcacattccagcagcttattattttgttcattatgttgtagttagggcttgctaataaaggttgccattaccatctctggtacagtggtgcacacttgtaatcctagctctaatcccaaggcgggaggattgcttggggccaggagttcaaaaccagcctgggcaatgtagcaagaactcatctctaaataatggtaatactattaataataaaaaggtcatcattgtcatagttatcataaagatagtcattttctgtgatagcctctttgttatacattctggaactaaggcagtatggatctgaattaagctgcatgctggaatatcagcttgagttcttttaagtatagtttttaccaggtgatgtaatatacagtaggagaaatgatcttcagaattttatattttatggttagataaacagaaaggttgcaagtccaggcactgtagcgtatgctgtaatctcagctattcaggaggctgaggtgggaggattgtttgagcccaggagttcaagaccagctggggcaagatagcgagaccccatctcaaaaaataaaagatagcttgcagtctatttgtagctgtgctctgtagatatctctatgtactaagagtgctgtgcctggttagaaaatacatgtttggccaggcgcggtggctcacacctgtaatcccagcactttgggaggctgaggcgggtggatcacgaggtcaggagatcgagaccatcctggctagcacagtgaatccctgtctctactaaaaatacaaaaaattagccaggcatggtggcaggcgcctgtagtcccaggtactcgggaggctgaggcaggagaatggcgtgaacctgggagacggagcttgcagtgagctgagatcacgccactgcactctagcctaggcaacagagtgagactctgtctcaaaaaaaaaaaaaagaaaaaaagaaaatatatgtttacagaatttctctgtaaccagtactattctatttttctttctttttttttttttttttagtatttattgatcattcttgggtgtttctcggagaggaggatttggcagggtcataggacaatagtggagggaaggtcagcagataaacatgtgaacaaaggtctctggttttcctaggcagagggccctgccaccttccgcagtgtttgtgtccctgggtagttgagattagggagtggtgatgactcttaaggagtattctgccttcaagcatctgtttaacaaagcacaacttgcaccgcccttaatccatttaacccttagtggacacagctcatgtttcagagagcacggggttgggggtaaggttatagattaacagcatcccaaggcagaagaatttttcctagtacagaacgaaatggagtctcctatgtctacttctttctacacagacacaataacagtctgatctctcttttccccacatttcccccttttctattccacaaaaccgccattgtcatcatggcccattctcaatgagctgttgggtacacctcccagacggggtggcggccgggcagaggggctcctcacttcccagacggggcggccgggcagaggggcccccccacctcccagacggggtggcggccgggcagaggggctccccacttcccagactgggtggctgggcagaggcgccccccacctcccagacggggcggcgggcgggggctgccccccacctcccggacggggcggctggccgggcgggggctgccccccagctcccggactgggcggctgccgggcggagacgctcctcacttcccggatggggcggctgccaggcggaggggctcccccagacggggcggctgctgggcggatgggctcctcacttctcagacggggcggctggtcagagacgctcctcacctcccagacggggtggcggcggggcagagacactcctcagttcccagacggggtcgcggcggggcagaggcactcttcacatctcagacggggcggtggggcagaggtgctccccacatcccagatgatgggcggccgggcagagacgctcctcacttcctagatggggtggcggccgggcagaggctgcaatctcagcactttgggaggccaaggcaggcggctgggaggtgtaggttgtagcgatccgagatcacgccactgcactccagcctgggcaacattgagcattgagtgagcgagactccgtctgcaatcccggcacctcgggaggccgaggctggcagaccactcgcggtcaggagctggagaccagcccggccaacacggcgaaaccctgtctccaccaaaaaatacgaaaaccagtcaggtgtggcggcatgtgcctgcaatcccaggcacttggcagtctgaggcaggagaatcaggcagggaggctgcagtgagccgagatggcggcagtacagtccagcctcggctcggcatcagagggagactgtgcaaaggggagaggaggaccgtgcaaaggggagggggagggggagagagactattctatttttcaaatgaaggtactaaaatatatttttaggattttagagttggaaaataactaatcattgtaggaaactgaagcccaaagggtttaaatgagttgtctgaggacatataaacagtatggttcattgactatatatatgttttttaagtacccgtcttacatccagaaatcatagtatctttgttagctttgaatgcatagtagtgagcaatgcaaaaatgtaccctgttctcttggaatttacaatccagtggggagatggacaattagtaagtaatgaggtctgataaagaagttacaaaccccgaagttctaggcaggaaataaatcttgtgttggaatggaaaatactggggaatggaagaagagctgctatttacataaagtggttcagaaaggctgctgagacttacaagatcagaaggagccagccacttaagtagcaggagcaggacagcattctaggctggaacagcctgcacagatgtgctggagttaaggtgcacgtaaagctgtagagaaactcaaaggagagtatggccagaacatagaaagctgtggggagagtagtatgaaccataagacagggaccagattgcatagtgcctttttcaatcatagatttcaaaattatggcattagattcaaatctgagttctgccacttaaactgtgttaccttgtataggtcacacacccatttacactttaattttcttatctattagatgagaataacaagctacttcataggacatagtatcatggagattatataatgcttatagcaaacacttatgtaatgtttatcttgtgataagaactgttctaagtatacaaaaactatatgaagtaggtaccgctattcccagttttgaaatgagggacagcgggtttgagtatagctagtaagagggtacaagggtttaaacatagctagtaagtgaccttaaccttaggcaaccttgctccagggtttgtgatcaaaatgtgatcctcaggatcctttaagggggtccataaggtcaaaactatttttcatattaatataaagacagtatttgccatcttcactgtcattctgtcataaatatacagtgaggtttttctgcaacagattgaatgcagaagcaattatgaggctgggcacagtggctcacgcctgtaatcacagcgttttgggaggctgaggcaggtggatcacttgaggtcaggagtccgagaccagcctggccaacatggtgaaaccccatctgtactaaaaataaaaaaattagccggatatggtggtgcatgcctgtgatcccagctactcggaggctgaggcagaattgcttgaatctgggaggtggaggttgcagtgagctgagattttgccactgcactccagcctgggcaacagagactttgtctcaaaaaaatgaacaaacaaaaaaaaattatgagattcacaaaaaaaaaaaaacaaaagcaataacaacaaaatgctattctcaatttgtttttgttttagaagaacataattttcaccttaaaatgttaacatgtaataggcttattttcaaatgaattaataaatgaacttttttaatgaaagaaattctgaggccaaaaaaagctgagaactgctgctgtacaccactacattgtgccacctgttgttaaatcagataaaatataggaaacacctggtaccatgtttatacttaataggctcgctagtaatttatttcctcactttttttttttttttgagacagagtctcactctgtcgccaggctagagtgcagtggcgcggtctcggctcactgcaacctctgcctcctgggttcaagcaattctctgccccagcctcccaagtagctgggattacaggcatccaccaccacgcctggctaattgtttgtatttttagtagagacggggtttcaccgtgttggccaggatggtctcgatctcctgaccttgtgatctgcccacctcggcctcccaaagtgctgggattacaggcgtgagccactgtgcccagcctatttcctcacttttaagacacatttttttttcacattttgatatttttagaaattgaggtgtgacttgtctgaagaaacttttcagcgaccagccaagtaaattgtgaagtagtagtagtcatctatacttggtatttctagaatttaactttatgtattcttttattcagttagttggtattagcggcaccatgtggggttgaaatattaattggatttgtgtccctaattgttgtttaaaatatctgctgtatatcactgtatgatacagctttgaaatgaacaattatctcagtagaagattgcctgaccraaaaaaagacaacaaaattgccaaatcattcagtctcttatatcaaaccttggcaaggttagtgttactaattcatgcatctgggacaacatctacttgtcaaaaatttctggacgatatttgaagaaggtatttaacttccatttggtatttagttttccaagtaaaattataaagtttaacttagaaaacagaaatctcaggttttgttatggccagaaataacactgtcagtgctgaaggtgctcaaaatcaacagatgattggatgcctgctatatgcctgtcacttgggatacagtgcctgtccctgtaaagtacagattccagtagaaaagacagacattaagtaaacaaataacrttaattacagattatgctaaatgctatgaagaaaatgggcagagtaatggggttggagggaggaggaaggtagaggtagctgattaaagtatatagggaaaggttctataaggaggtgatacatgaactgagtctattccagccatatacagagctgggagagaatgccaggtgtcaggtacaaagaccaaaggtggccagaaacataaaggataatttttaaaaagtggcatgtggttctgtggaagaccttatacgcttgtcttttagttaagctttttttttttaatcaacaatttgcaagtctttttcttttttttaattatactttaagttttagagtacatgtgcacaacatgcaggtttgttacgtatgtatacatgtgccatgttggtgtactgcacccactaactcatcatttaacattaggtatatctcctaatgctatccctcccctctccccctaccccacaacaggccccggtgtgtgatgttccccttcctgtgtcgatgtgttttcattgttccaattcccacctatgagtgagaacatgtggtgtttggttttttgtccttgcgatagtttgctgagaatgatggtttccagcttcttccatgtccctacaaaggacatgaactcatccttttttatggctgcatagtattccatagtgtatatgtgccacattttcttaatctagtctatcattgatggacatttgggttggttccaagtctttgctgttgtgaatagtgccgcagtaaacatacatgtgaatgtgtctttatagcagcatggtttatattcctttgggtatatacccagcaataggatggctgggtcaaatggtatttctagttctagatccctgaggaatcgccacactgacttccacaatggttgaactagtttacagtcccaccaacagtgtaaaagtgttcctatttctccacatcctctccagtacctgttgtttcctgactttgtaatgatcgccattctaactggtgtaagatggtatctcattgtggttttgatttgcattactctgatggccagtgatgatgagcattttttcatgtgtcttttggctgcataaatgtcttcttttgagaagtgtctgttcatattctttgcccactttttgatggggttgtttgtttttttcttgtaaatttgtttgagttcattgtagattctggatattagccctttgtcagatgggaagattgcaaaaattttctctcattctgtaggttgcctgttcactctgatggtagtttcttttgctgtgcagaagctctttagtttaattagatcccatttgtcaattttggcttttgttgccattacttttggtgttttagacatgaagtccttgcccatgcctatgtcctgaatggtattgcctaggttttcttctagggtttttatggttttaggtctaacatttaagtctttaatccatcttgaattaatttttgtataaggtataaggaaggcatccagattcagctttctacttatggctagccagttttcccagcaccatttattaaataaagaatcctttccccatttcttgtttttgtcaggtttgtcaaagatcagatagttgtagatatgtggcattatttctgagggctctgttctgttccattggtctatatctctcttttggtaccagtaccatgctgttttggttactgtagccttgtagtatagtttgaagtcaggtagtgtgatgcctccagctttgttcttttggcttaggattgacttggcaatgcgggctcttttttggttccatgtgaactttaaagtagttttttccaattctgtgaagaaggtcattggtagcttgatggggatggcaatgaatgtataaattaccttgggcagtatggccattttcacgatattgattcttcctacccatgagcatggaatgttcttccatttttttatgccctcttttatttcattgagcagtggtttgtagttcttgaagaagtccttcacatgtcttgtaagttggattcctagatattttattctctttgaagcaattgtgaatgggagttcactcatgatttggctctgtttgtctgttattggtgtataagaatgcttgtgatttttgcacattgattttgtatcctgagactttgctgaagttgcttatcagcttaaggagattttgggcagagacgatggggttttctagatatacaatcatgtcatctgcaaacagggacaatttgacttcctcttttcctagttgaataccctttatttctttctcttgcctgattgccctggccagaacttccaacactatgttgaataggagtggtgagagagggcatccctatcttgtgccagttttcaaagggaatgcttccagtttttgtccattcagtatgatattggctgtgggtttgtcatagatagctcttattattttgagatatgttccatcagtatctaatttattgagagtttttagcatgaagggttgttgaattttgtcaaaggccttttctgcatctattgagataatcatgtggtttttgtctttggttctgtttatatgctggattacttttattgatttgcgtttgttgaaccagccttgcatcccagggatgaagcccacttgatcatggtggataagctttttgatgtgttgctggattcggtttgccagtattttattgaggatttttgcattgatgttcacatcagggatattggtctaaaattttctttttttgttgtgtctctgccaggctttggtatcaggatgatgctggcctcataaaatgagttagggaggattccctctttttctgttgattggaatagttttagaaggaatggtaccagctcctccttatacctctggtagaatttggctgtgaatccatttagtcctggactctttttgattggtaagctattaattattgcctcaatttcagagcctgttattggtcaattcagagattcagcttcttcctggtttagtcttgggagggtatatgtgtccaggaatttatccatttcttctagattttctagtttgtttgtgtagaggtgtttataatattctctgatggtagtttgtatttctgtgggatcggtggtgatatcccctttatcattttttattgcatctatttggaggcacccccccagtagggacagactgacacctcacacggccgggtactcctctgagacaaaacttccagaggaacgatcaggcagcaacatttgctgttcaccaatatccgctgttctgcagcctccactgctgatatccaggcaaacagggtctggagtggacctccggcaaactccaacagacctgcagctgagggtcctgactattagaaggaaaattaactaacagaaaggacatccacaccaaaaccccatctgaacgtcaccatcatcaaagaccaaaggtagataaaaccacaaagatggggaaaaaacagagcagaaaaactgaaaattctaaaaatcagagcacctctcctcctccaaaggaacgcagctcctcaccagcaatggaacaaagctggacggagaatgactttgatgagttgagagaagaaggcttcagacgatcagactactccgagctaaaggaggaagttcgaacccgtggcaaagaagttaaaaaccttgaaaaaagattagatgaatggctaactagaataaccaatgcagagaagtccttaaaggacctgatggagctgaaaaccacggcacgagaacgacgtgacgaatgcacaagcctcagtagccgattcaatcaactggaagaaagggtatcagtgatggaagatgaaatgaatgaaatgaagcgaaaagagaagtttagagaaaaaagaataaaaagaaacgaacaaagcctccaagaaatatgggactatatgaaaagaccaaatctacgtctgattggtgtacctgaaagtgacggggagaatggaaccaagttggaaaacactctgcaggagattatccaggagaacttccccaatctagcaaggcaggccaacattcaaattcaggaaatacagagaacgccacaaagatactcctcaagaggagcaactccaagacacataattgtcagattcaccaaagttgaaatgaaggaaaaaatgtgaaggacagccagagagaaaggtcgggttgcccacaaagggaagcccatcagactaacagcggatctctcagcagaaactctacaagccagaagagagtgggggccaatattcaacattcttaaagaaaagaattttcaacccagaatttcatatccagccaaactaagcttcataagtgaaggagaaataaaatacagacaagcgaatgctgagagattttgtcaccaccaggcctgccctaaaagagctcctgaaggaagcagtaaacatggaaaggaacaaccggtaccagccactgcaaaaacatgccaaattgtaaagaccattgaggctaggaagaaactgcatcaactaacgagcaaaataaccagctaacatcataatgacaggatcaaattcacacataacaatattaaccttaaatgtaaatgggctaaatcctccaattaaaagacatagactggcaaattggataaagagtcaagacccatcagtgtgctgtattcaggagacccatctcatgtgcagagacacacataggctcaaaataaagggatggaggaagatctacccagcaaatggaaaacaaaaaaaagcaggggttgcaatcctagtttctgataaaacagactttaaaccaacaaagatcagaagagacaaagaaggccattacataatggtaaagggatcaattcaacaagaagagctaactatcctaaatatatatgcacccaaaacagaagcacccagatttagttaagctttttgttttctttttcataaaatattatttcatattgtcttttaaagtacttaataaattactgtcttaaaactagtagtatttttatagagttgggaaatatgtgttatgattataattaataccactatatttctctatttaaaggtatttcatttttagtcatttttttaagtggtatgggtggaaactatagatatttaatgtgctaaatttgtggttataggaaagatcaaataggaatttaaaatagtaatttagcctggagatggtactttttttttttttttaaactagaggatggtcatcaggattacttgagggacttttccaaaataaatattctggaccctatatcagacagggattctgataaagtatatatcaaattaaaagatttgtgttgctttttaaaaagtatttggcttggctgggtgcagtggctcatgcctgtaatttcagcactttgagaggccgagatgggaagagtgcttgagcccaggagtgagaccaatctgggcaacataggaaaacccgctctctatatacaacaaaaaaaattgggctgggtgccgtcgcttacacctgtaatcccagcactttgggaggccgaggcgggcagatcacgaggtcaggagatcgagaccataccggctaacatggtgaaaccccatctctactaaaaatacaaaaaaattagccgggcgtggtggcgggcgcctgtagtcccagctacttgggaggctgaggcaggagaatggcgtgaacccgggaggcggagcttgcagtgagccgagatcgcgccactgcactccagtctgggcgatagagggagactccgtctcaaaaaataaaataaaataaaataaaataaaataaaataaaataaaataaattagccaagcatggtggcacatgcctatagtaccagctacttagggggctgaggtgtgaagattgcttgagcctggaaagtcaaggctgtgaggctgcagtgagccctgattgtgtcactgcattccagcctgggaaacagagagagatctcatctctctctctctctctctctcacacwcacacacacacacacacacacacacacacacatacacacacatacaaatagctttttgatttctaaaggcagtttatgttctttagagaacatttgaaaaaaaatggaccaattgtagttttttcttgcccttttcagtaaagtagtaatatacatttaaaaaaaaaacaaatgccttgtagttagctaaaagatgacttgtttatacatttctcctaaaacatagacttcttgatttaaaccatttaaaatgttttgaataattataattatctaaaaaacttttaattttgatgtttaaaaaatgtttttgtagcctgggcaacatagtaagaccctgtctctacaaaaaacaaaattataaaaaattagccaggcgtagtggcacacgtgtataatctcagctactcaggaggctgaggcaggaggatcaactgagccaaggagtttgagactacagtgagctatgattgcaccactgcagtccagctgaggtgacagagacctgtctctaaaaaaaaagttcttaatttttgtgtaacaataactagttagaaaagataatggaagcgaatctcaatcgtaattgcatcaaaatataaaaaccacgtaggaattaattggaaattgtgttgacctctatgaagaaaatacaaaatttatactaagacatatgaaagaagatttttaagaaagagcagtgctgtgcttctctgtgggataactcagtattgtgaagatgtaatttggaattaatttataaattctcctgaggataggatgtggggaaggaatttattatcaaaagtctaatattcatcttcaagaataaggcaggcaataatgatgaaatatatttttagaaaaaatgaattaggataaagcttgtactgttatatattaaagtatattataaaatgacagtaaataggctgggcgtggtggctgacacctgtaatcccaggactgtgggaggccaaggcagactgatcacttgaagtcaggagttcgagaccagcttgggcaacatggtgaaaccccatctctaccaaaaatacaaaaaattagccgggcatggtggcacatgcctgtaatcccagatactcgggaggctgaggcgggagaattgcttgaatccgggaggtggaggttgcagtgatcgagattgtgccactacactccagcctgggcaacagagcgagactctgtctcaaaaaataaaataaaataaaataaaatggtagtaaataaatgattgcagtccttgtgcaaaactagtgggaaaagtagctgggaaatattttcaaatatatgtaagactttagtagtatttcaagtctctgcagaaacagaaacaagaaaaggcatgcaaacaatgtattagaacaattggaagaaaaaattgttagattttaatctaatatcatattctaaaataacctccagattgtttaaagagtaaaccatgaatgtggtttttaattttagaagagtcaagccttaactaagcaagcaaggtgattttttgtttgtttgttttttgagacagagttttgcttgtcgcccacgctagagtgcaatggcgctgtctcggctcaccgcaacctccgcttcccaggttgaagtgactctcctgcctcagcatcctgagtagctgggattacaggcatgtgccatcatacctggttaattttgtatttgtattagagatggggtttctccatgttgatgaggctggtcttgaacttccaacctcaggtgatccacctgactcggcctcccaaaatgctggggttataggcatgagccactgtgcccggccgatttttaaaatacagtaatatatattgtgatttcttttttgttacagagtgttctgattccaattttcattgtgctagttttaaaagtcttatatattaataaatgcaggcaaattgatggttttatatttagattaatttaggtttctatgctatggtagtagctttataaacagagcaggaagaaattattctgtacatgtaacagccatatgcttcttaaaaatctgaaagattatagttttgagagtagatttggatatgctatcaataatgtttatatcttataaccttaaaatttcaagtacaatttttagaatttatactgtggaagacaacaacacaaatgcacaaatatgtataagggtgttgattgcaacaatgttgtggtaatataagaaaattgaaaacaatctgtgtccatcagtaagttattggacagataagggtttgtgcttacagttttatggctgttaaaaaggatgagataagctgggcgcagtggctcacacctgtaatcccagcactttaggaggccaacgtgggcagatcacctgaggtcaggagtttgagaccagcctggccaatgtggtgaaatcctgtctctactaaaaatacaaaaattagctgggtgtggtggtgcactcctggaatcccagctacttgggaggccgaggcaggagaatcacttgaacccaggaggcggaggttgcagtgagccaagatctcgccactgtgtttcagtctgggcgatagggtgagactccaactcaaaaaaaaaaaaaaggaatgagatagatctatagatctttgatgtgtttttaacaaatgtaaaaagcacactgtagaacactatatatgatgtgaacatatgactacatttaaataacatatttacctacatacatgttataaatatatatataaatacagatctggaagaatggttgacagtgtttgtggatggaatgagtggttgggctaagttccattttttttttacgggcatctatttatgatattttaaaattatttcaaaatttattatcaactaactgtatttatagatagatatttttgtaaaactatagaggtaatagttgagatacagagcaggtatggctttttaattttccagtaaataaaaatcaaaggtcagtaatttaatatccagcaatagagataagggagttgtttaaagttccaattttgtttattttggaaagtatgtcctttttgtcaccattacaatgaaatttccggactttttgtttttgtttttgagacggggtctcactgtgttgctcaggctggagtacactggcatggtcatagctcactggagccttgaagtcttgagatcaagcgttcttcccacctcagcctcctcagtaactgggactaccggtgtgcatgactatatccagctaatttttttttatatgctttaagttctagggtacatgtgcacaacgtgcaggtttgttacataggtatacatgtgccatgttggtttgctgcacccattaactcgtcatttacattaggtatttctcctaatggctatccttcccccatccccccacctcatgacaggccctggtgaatgatgttccccaccctgtgtccaagtgttctcattgttcaattcccacctatgagtgagaacatgtggtgtttggctttctgtccttgtgatagtttgctcagaatgattgtttccagcttcatccttgtccctacaaaagacatgaactcatccttttttatggctgcatagtattccatggtatatatgtgccacattttcttaatctagtctatcattgatggacatttgggttggttccaagtctttgctattgtgaatagtgctgcaataaacatacgtgtgcatgtgtctttatagtagcatgatttataatcttttgggtatatacccagtaatagaatcgctgggtcaaatggtatttctagttctagatccttgaggaatcgctgcactgtcttccacaatggttgaactagtttacactcccaccaataatgtaaaagcatctgttgtttcctgattttctgatggtcgccattctaactggtgtaagatgttatctcactgtggttttgatttgcatttctctgataaccagtgatgatgagcattttttcatgtgtctgttggctgcataaatgttttcttttgagaagtgtctgttcatatgctttgcccgctttttgatggggttgtttgattttttcttgtaaatctgtttaagttctttgtagattctggatattagccctttgttagatgggtagattgcaaaaattttctcccattctgtaggttgcctgttcactctgacagtagtttcttttgctgtgcagaagctctttagtttaattagatcccatttgtctattttggcttatgttgcctggtgttttagtcatgaagtccttgcccatgcctatgtcctgaatggtattgcctaggttttcttctagggtttttatggttttaggtctaacatttaagtctttaatccatcttgaattaatttttgtataaggtgtaaggaagggatccagtttcagctttctacatttggctatccagatttcccagcatcatttattaaatagggaatcctttccccgtttcttgtttttgtcaggtttgtcaaagatcagatggttgtagatgtgtggtgttatttctgagggctctgttctgttccattggtctatatctctgttttggtaccagtaccatgctgttttggttactgtagccttgtagtatagtttgaagtcaggtagtgtgatgcctccagctttgttcttttggcttaggattgtcttggcaatatgggctcatttttggttccatatgaactttaaagtagtttttttccaattctgtgaagaaagtcattggtagcttgttggggatggcattgaatctataaattaccttgggtagtatggccattttcacaatattgactcttcctgtccatgaacatggaatgttcttccatttttttgtgccctcttttatttcattgagcagtggtttgtagttcttgaagaagtccttcacatgtcttgtaagttggattcctaggtattttattctctttgaagcaattgtgaatgggagttcactcatgatttggctctttgtttgtttgttattggtgtacaggaatgcttatgatttttgcacattggttttgtctcctgagactttgctgaagttgcttatcagcttaaggagatttttgggctgagatgatggggttttctagatatacaataatgtcatctgcaaagagggacaatttgacttcttcttttcctaattgaatacgctttatttctttctcttgcctgattgccctggccagaacttccaacactatgttgaataggagtggtgagagagggcatccctatcttgtgccagttttcaaagggaatgcttccagtttttgtccattcagtatgatattggctgtaggttgtcataaatagctgttattattttgagttatgttccatcaatacctagtttattgagagtttttagcatgaagggttgttgaattttgtcagaggccttttctgcatctattgagataatcatgtggtttttgtctttggttctctttatgtgatgggttacgtttattgatttgcgtatgttgaaccagccttgcatcccagggatgaagctgacttgatcttggtggatragctttttgatgtgctgctggattcagtttgccagtattttattgaggatttttgcatcgatgttcatcagggatgttggtctaaaattctctttttttgttgtgtctctgccaggctttggtatcaggatgatgctggcctcataaaatgagttagggaggattccctctttttctattgattggaatagttttagaaggaatggtgccagctcctctttgtacctctggtagaattcagctgtgaatccgtctggtcctgggctttttttggttggtaggctattaattattacctcagtttcagaacctgttattggtctattcagagattcaacttcttcctggtttagtctcaggagggtgtatgtgtccaggaatttatccatttcttctagattttctagtttatttgcgtagaattgtttatagtattctctgatggtagcttgtatttctgtgggatcagtggtgatatcccccttatcattttttattgcatctatttgattcttctctcttttcttctttattggtcgtgctagcagtctatcaattttgttgatcctttcaaaaaaccagctcctggattcatggattttttgaagggttttttgtgtctctatctcctcagttctgctctgatcttagttatttcttgccttctgctagcttttgaatgtatttgctcttgcttctctaattcttttaattgtgatgttagggtgtcaattttaggtctttcctactttctcttgtgggcatttagtgctataaatttccctctacacactgctttaaatgtgtcccagagattctagtatgttgtgtctttgttctcattggtttcaaagaacatctttatttctgccttcatttccttatttacccagtagtcattcaggagcaggttattcactttccatgtagttgtgtggttttgagtgagtttcttaatcctgagttctaatttgattgcactgtggtctgaaagacagtttgttgtgatttctgttcttttacatttgctgaggagagctttacttccaactatgtggtcaattttggaataagtgtgatgtagtgctgagaagcatgtatattctgttgatttggggtggagagttctgtagatgtctattaggtgtgcttggtgcagagctgagttcaattcctggatatccttgttaaccttctgtctcattgatctgtctaatattgacagtggggtattaaagtctcccattattactgtttgggagtctaaatctctttgtaggcctctaaggacttgctttatgaatctggctgctcctgtattgggtgcatatatatttaggatagttagctcttcttgttgcattgatccctttaccatcatgtaatggccttctttgtctcttttgatctttgttggtttaaagtctgttttatcagagactaggtttgcaacccctgctttttttgttttccatttgcttggtagctcttcctccatccctttattttgagcctatgcatgtctttgcatgtgagatgggtctcctgaatacagcatacttatgggccttgactctttatccaatttgccagtctgtgtcttttaattggagcatttagcccatttacatttaaggttaatattgttatgtgtgaacttgatcctatcatgatattagcgcacccagctaatttttgaaaatttttttgtagagatgggaatctcgtgctgtgtttcccaggcatgtctcaagctcctggcctcaagcaatcctcttacctcagcctcccaaagtgctagaactgcaggtgtgaaccaccatgcctggccttctaacttcctataccatcagaccatgccttcctgtccaccctcaactcttgcccattgtgccctgtactccaaaccacttggatcttcgtttagattctgtaactttctgtgctttttcttaccacaggaccttttatataagtggttccctcttcctagaatgttctctttctactccccttaattctatagatctttgatatctcaacttaagcagcacctcagagaagctcttttgattccttagtcaatattggctcctttgttttgtacttctgtgtctttctttctctccttcttttcttttcttttctttctttcttttttctttctttcccttcatctctttgaaaaaatatgtttggtctcctccactatataagtggttcattaaagtgggtgtacatctggatttgtttattattatatttccagatcctagcaaatggttgccgtatagttgatgcttaagaaatatttatggaatgaaccaattaattcttacggaatccctttttagcttttcggcagctgcctacttgggtgctgataaacttccagggttgaccttagcatttaaatggaattacagtttacatcctacagcttgctttttctacttgggcattttcctagtgcatttatttatttatttatttttgagacagagtctcactctgttgcctaggctagagtgcagtggtgtgaacatggctcagtgcagccttgacctcctgggctcaagggatcttcctgcctcagcctcctgagtagctgagattacaggtgcacaccactacacctggctaagttttttttttattttttatagayattgggtctcaccatgttgcccaggctggtctggaacccttgggctcagtcctgcctcagcctcccaaagtgctgggattgcaggcatgagccactgtgcccagctgtttttccattttagaaaatttatggatctgttttcttcagaggccttattgtgtatggtgcatatatgtttatattcagtttgctgaatatgtaacctttggtttctagtttatctagctttgtcatttatactctcttggttcattttatgatgtgtagtttgttctggttatgtatttggtaaaactgtagactgcatttgtctggataatgtgcaacttgattttactcaggacacttgtctttgccagtttgaagtatttactggagaaaatatgaaagcattaggataataggtttcaagtgtatcattaaacataaaacttatttttattttatttttgagacagggtctggctctgtcgcccaggccagaatgcagtggcacgatcatagctcactgcagcctctatctccggtggtcaagttatgctctgacctttgggtaccaagtaaytaggactggatgtgcacgccaccatgcccagctaattttcttgatttttagtagagacaaggtctcactgtgttgccaggctggtcttgaactccgagctcaagtgattctcctacctcggcttcccaaagtgttgagattcaggtgtgagccaccacgcccagccagaacttacttctgaaaaattttcttttaattgtgctccaaactaagacaagtcaccttatctaaaatgtatagtagattaattttccttggtgaaaggcacatatcatttatttctagttgttcctataagtactactgtcctcagcttcaatacttttttcttttagagataaaagaggagtagaaggtaaaagaaaatgctgggaactgaccgttgtgttgtggaagaatggttatcagaattcaaggtaaattggattggagatcagaatgtattatatttttctatacatcagtaattcaaactgaatatgtgctctatggagaaacattatgtgctctatggagaaacataaaaatatggtaggaagtggaaatggcaaaatacaaaataacgtgtttctgtaattgcagttcttaaaaatggtactaatatgaataatggctagaaggtgatacataaagatgaaaatagttgttaggattgatgagacgatattttaaaatatattcagtaaaagagaagatccatcaagctttaataaggcacaaaaataggatttatgcctacgtttttctgtcctataattaaaaatcaaatagtttttatggaaaactatgtaatttatgaatactatggaattgtaaatgttttggcaaaacataaatgcaagaattgaaacatcctacatttttttaaagattagattaatttaagatggcccatttcaggaaatgttggtataatgtgtgatttctaatcagtatttatggttgagtagttagaagaattgtgtactataacatcctaacttaatttgtttgaactctgatgcttctttctttctttttttttttgagatggagtctcgctctgtcacccaggctggagtgcagtggcacgatctcggctcactgcaacctccacctcccaggttcaagcaattcttctgcctcagcctcctgagtagctgggattacaggcacccgccaccacgcctggctaatttttggtatttttagtagagacaggtttcaccatgttggccaggctggtcttgaactcctgaccacaagtgatacgcttgccttgacctcccaaactgctgggattccagacgtgagccactgtgcccagcctatttctttatattaattatttttacttttctcacttgagtttgttataaatctgttcaagaactatttgtgtaaaataaagttccttgcttctcaaatgttcacttttgttttcctttggtggtttcttttaggcattacctgacactcagatcaccagttatgcagcaactttacaccggaaaaaaacacttgtaccagccctctataaagttattcaagattcaaataatgaggtaggagacctcaagaaaaataatttctacatagtgaaatgaaatatgtataccaaaacacataaatttaagttttataattttctttccttgtggatctggaaaattttctttctgctgtttttcattctgatagttgctttggctttccctattccctgcctttccatattttgaaatgttttggtcaaattttttcctgttgagtgtgcagtatgttttgattgttaattttattgaccatcatctcagtggattatttatttgaaacttttctgtttcctgttctggaatgtttcctgctctggaagccatattttaactgtatactgatccagctttatttatcttaagtatttttacaattattttactgataatatataactaggtataatcactctagtcagtgaaatcaaactgataacacaaaatgatgctgctagtaaatttagcctgaaaaggatcagaggaagcactttttagtctaagtagtcaagatcaataaacttagaatgagagttttgtattatttagccttgtgatagaaggaaaaagtacagttattgaatctgtatattaatttatgcaaaatacacacattatctttccattaacacagtagtatgacatacagttttatcaccactggattcatgtatgcttaaaatgaaaatgaaaggaacacacaggaaagtagcttcttatcttcccagatacagcctccaagagtgcctctgctgtgtactggagtgagtttgaagaagttcaggtaatcctctcctaaccagcagcttaacttaaagtgcatcttcatttttgtcctaccactaaaagcttgcttattgacctccttctttcctgtctcctaaattgtgactggctctcagttagacttgcatctgttgctatttgtagcagcaattgcaggattcatttgctttttctcttgcagtgtatttctgaatgttttataactctgggtatgcataatgtacgtatatgcatatccatatggtcaagagttttcagaattctttgtttgaataatgaatgtgtgtattccctaccccttgttttgctctgtcttaacatttaagctttgcttattaaaatgtatttgttttaatgctttctctttagattgtaagctcttcatgggcagtggtcagatattctgtatttgtaacttcccgagaatctagtattttatcatgtacataatgaacatagaatagtattgattggaaggacagtgaagtacaaaatgagattctaaaatgacattttcattagggctcacaagtgtataagaagtatccctttcctatttttttgtttaatactttagaagctattacattaaaaaagctattctcattactttctgttgtcatatttcgtaatattaatgtgtgggactttgggggtttcatggctagaaatggaaaaattacagcttgagggatgcgagctcaaggtccagcattcattataatcaatcagttgctagaggaggtctgaatttctctcctgtctcctgtcaggttagaaggctctaaccatgtgttcagacttcagaaaaatagaatgataaattctatagaatttcaaaacaattctggactttagtcatagaaggaggtcccttttaatcctgattttgttatattctgaaagaaacaaacatactatttaggttacaagaaattattttagaaaattgtcatgtgccatatttagtatgaattaaacttaaaatagttgccggcgcagtgtctcacgcctgtaatctcagcactttgggaggcggagcggagtggatcatgaggtcaagagattgagaccatcctggccaacatgatgaaaccccgtctctactaaaaataccaaaaattagctgggtgtggtggtgcacgcctgtagtcccagttactcaggaggctaaggcaggagaatcgcttgaacttgggaggcggaggttgcagtgagccgagattgcatcactgcactccagcctggcaacaaagccaagactccatctcagagaaaaaagaaaatatttggaaactttcatattttcagattcaaatctaccattctacagcactctcttgccttttctggtgtttagtgggtgaaatatctcaggttgtatgaaaagccatctgttctacttaggcctggattctgtcttctctagctaccttaaggactctggtcctgcaattattccttctctcttccatcactgatctttttttctttccctgatgagtggaatatgataaacaaccatattctattctctaaaaactttatttcagcttacctcctattatattatctaccccatttctctgtccctattcacagatgaacttcataaaatattgcttattcatagcctctgtctacttgtctccatttcttcacctcacattctttaacccactcaagttaggcttgttcattattccatccaaatactctcagtgtgttcatcaaatatcatgtctcttagtaattatcatgtcaaaacagtgtttgctaaatttgggaatggtgtcagttatgattttttctaacccaaggatgatgatttttaatactttttgatgtgggtggtggtgccatttaagggaggtcagaatcatttatattaagaatttgagaacatggtgcttgctatgagacatatgcttcaaattaaagtttttttattgtttgtttgtttgtttttttctgagccagggtctcactctctctcccatgctggagtacagtggcaccattatagctcactgtaacctcaaactcctggactcatgtgatcctccaaactcaccttctcaattagctacaggcacatgctaccacaccctgctaattttattttttattttctaaagacagagtctcacggtgttcaaggctggccttgaactcctgggctcaagcgatcctcccaccttggcttcccaaagtgctgggattacaggcatgagctattgagcctggccacaattaaagattttaacacatagcattggcaatttttcttttttttttttaagacagggcctcactttgtcacccaggctggagtgcggtgacttgaacacagctcactgtagactgaacctcctgggctcaagcaattcttctgcctcagccccccaaaaatagctgggactacccaggtgcgtgccaccacacctggctaatttttgtattttttgtagaggtgaggttttgccacattgtgcaggctggtctgaaactcctggtctcgagccatcagcctgccttggcctcccaaagtgccggaattacaggcgtgagctaccacacctgaccagcgagtttttaacggtcttactttgtagtagtatctgattaaaacttactggattgccaacatctaccccccattcgcttacaaaaaacacagagtaataatgctggtaaccctgtatttcttcactgtgcttagttaaaatatagtgtcccacatgccagtgtacctgttgctactgagaaagaggagtttaaggtcttcatagaagaaattcatcataattgtaccatggcccataaagtttagagaaggcaatctttggagagttttttactaaagaggagattgagtttgaaacatgagtataaatttttagtaaacaaaatttgtgagagcaacagttttttacttctaaagaactgaatattgctctcaatatttaagaaagatgccagcaactgacagtttccaaaagtttattacttgttcattattggcactacatagaatacactgttttgtgattaaacaatctatacctccattctaatataagaagtgcggtagagtggaaacatcaacttgatgtcagaagacctgaatttagtgtcttatttcaccattaacttcaccaacctttgacaaattgtctgactggtctagacttcaatgtaagggaagagttggaatatttttcttttgtgtcagtcttgctctgttacccaggctggagtgcagtgatgctgtcatggttcaatgcagcctcaaactcctgggctcaagctatccaccctcttcaaccttgtgaatagctggatgtgtacctccacacccagcctctggaaaattttttaagattttaaaaactgttctgatagtgatttcacataaagggcttagtatttactagactaggatgtatatgtatgtaaattttttaagctttagaattcttccagagctaagcctaactcttctaaatatgttaactgtataattgacatggatttgttaactttttataatcatgacagtgactttttattgtagagtgttagattattacagatgtatgtaactatattcaaacagatttccaaatgtatatgcattattttaatcatttagaatagaggaaagtacatgaaattactgaactattattctttttttttaaagagttagtattaaactttaaaaattactttatagtttcttgtcaatattttatatgaattttaaagtcatagccagttttctgcagcctacggttactccagcaaacccattctaaattggcagtacatatttagggaaaagtgggaaagtttattttaactgctcattttcttcagttttctaggtcatgaagttcctcataagtcatattgtgtgatatcgtatgaaaaattagccaattgaacactgaaaaagctatttctggatacttttctcctttataaaatctttcacataaatacaataagaaaaatttaagtcagttttaaaatagtttgcctcacttgtatgtattttaaatattagctagaattttggatgcacaaatatgtattgcaaaatcccttcttctactgagtggtatataagtttttttaaaatggaatgtggatgctttaataaatttcatattgcagtgaagacactgagcacttagagacaatgacatcaatacaatgaaaactgattccacagaacacttacaaatgcatacattttcctccaaagaaacatgtttttcacagatttaagtaacaaatgatttacataggattcttctgattccaaaatatgtacagaatttttgactgtcagaaactgattagcagtggttgaaaaacagagttgctttgcccaacagcatgactcttagaaaattctgtatcaacacacatttttcagtaagagtggtatataatttgcttaaatcatagtctcagttgagattttaagtttattcccagcaatattatgcaaaattattttatttcaatggaaagtttttgaaatggaagatagagttgataagaatagaaaggaaaattcttctcaaatataaatgtagtacattggctaaaggactaataatctagtaaatttagtagtacagtatactgaaaggtacattgatgtatgggcacaaaatacttcttatagttagtggattggtcagtttaatatgtggtctctttacacaaaggttttggttaaattaaaatgtggagaaattaatattaagacttttaaaaatattatacagatataggtgccttaaaaaaaaaaaaacaacagttacaaccaaaagaattgaaatgaccagtgcactttattttccttttagctcctggagcctgtctgccatcagctgtttgagctctatcgtagctcagaggttcgacttaagaggttcacactgcagttcttgccagaattgatgtgggtttatttacggcttacagttagccgagacagacagagtaatggttgcattgaagcacttctgttaggaatttacaatttggtaagttgaagatgacagtttgggaaattttaagtattttttaaggtcctctgaaataatacttaaggaatgtttagagaaaaataaattggccaggcgcagtggctcatgcctgtaatcccagcatttttgggaggccaaggcaggcatatcacttgaggtcaggagttcgagaccagcctggccaacatggtgagactccgtctctactaaaaatacaraaattagctgagcatggtggtgtgttcctgtaatcccagctacctgggaggctgaggcaggagaattgctggaactgaggagttagaggttgcagtgagccaagattgtaccactgcactccagcctgggtgaaagagtgagactccgtctcaaaaaaaaaaaaaaattaaaaataataaataaattgaggccggatgtagtgactcatgcctgtaattccagcactttaggaggccaaggtgggaggatcacttgagcccaggagtttgagaccagcctgggcagcttggccaaacctcgtctctataaaaaattagctgggcatggtggcatatgcctgtagtcccagctactgaggatactgagatgggaagatctctggagccgaggacatcgaggatgcagtgagccatgattgtgccactgtgctcaagcctgggcaagagagcaagaccctgtctcaaaaaaagaaaaaacaattcaaatgtctataagtgtaacttgtttgaactaattaggttgagtacaggggtagatattgataatgcatttttttgataatgtattttataaagtatgtaaaactactataattgattgtattattaatattttatttatatcttcaaattgttttatttgaccaatatttatgaatgtttttggatgtatgccattgagttggacactgaaaatatggagaattacatgtgtggcacctgcttttaggaaactcctgctgtgttcgaaaagacatgtttatagataactaataatgtggtttgtataataagaggattttagagagaaactcagatgttagctgaagttatcatggcaggctttattgaggtgatgccatctaagctgggtcttatgaagaggtatagttttggcctgttgagatgaggagccggtgaggtttctggaagcagctatcaattgaacataagcagagaggcaggagagtcaagtcacgtcctggaaatagaaagtagttctgtttgaagcacagagtatatatgcaagctggaaaagacaattttgtgtcagttttggagaatctttttaaagtgaagagtttaggtttaggttctctttaaagcaattagagggttttgaacagaagaattgtattatatattaggaaaatgaatcttatggtggtgtgcagagagacttttgaattataaattgaatttaatcaccacttcttatatgttaaaggctatatacataattgagaagagtgaggcaaatggacatgaaatttctgtttctctgaggggaggacatcagttacagggaaaaagtccatatagtattatagcatgttaggatttttaaaatcttagtaagaacacagtggaaactagggggagaaaaaccataaacacttctgagatactaggggctttacatggaacttgaagattgagacttgattacttctgcaagatggggagggtatgctagaaaggttacaaagactgtaggaagcaaggtaaaaaggtgagagagtttaggaacatgggatcatctgtgttgcacctttctgaagacttgggcagcacaaggcaccttttcttgcgcagtgcaaggaagcaaaatagcacagcatcatatttccattctcatgtgcctctacaaaattgggcagttacctgaactcatcaataaagaatcgtgaattttatgaatgtatcttggagtcgttgagtggggtagcaattgagaaaccacagtgttatttgtcataaaagttgtaaatttgttaatagttatttgataatatattatatatttgatagtacattgtttatgaaactgttttcttctaaggaattaagtaccataaacattattattctatttttttctcatgatgtccagttaaggaccattggtattgaaatttcttcaccttgaagtcttatattttgtgtatttagtatacattataaacaaaattccacataataaagtttagttgtataactgaaaggtaataaggtacaagaaaattgaatctcatgrtaaatattcttctgtaccagtgctcactcctctcttagttactttaaaaaatcattagcaaacatttccatctctagaagtctgaaggaaggagcaagggctttagaatgacttgcattcagttcagaaccatgccctgccacttattaggtgttttaaatttgggcaagttacttaatatcttgacttcagttgcctcatccataaaaaagaaaacattgttagtaggactaaaaacaacttgaagaattcattatgttgcataaggtgtttataaatgtccattattattaccatcaaaattaaaagtgggtttaaaaaaatgaaaattgatctaggaataaaattctctactttcctaacttgcctgattgttttttcttttcaagtaggaaatttgttatatatatcactgtgtttcctatagtgcttaccagcagatacttagtaaatgtttgttgatttaataatggaatttggtgttttagattatgcttagcattaagctatcatttttattaatgtgtttagtgtaataaaattcaataatgggacacatgaaacaaacattttgcaaagtgtcatgtttgacaagttgttgacataacttattggtgctgtggttcagttatcttttgacagtgcaaaattagtatactatagaaaaatgctcagttatatgtcagaaatgtaaccctaggctttggactccttttgattccctcgatgtctgtgttcttccttttctgtggttctcagtttttcttaatcacagtgggagtcatccatatattcttttctgtttttccttctttccctccccagcacttcgttgtttcaaatagccccagggggagttgtatatttctcttaaacaaaatttagcatatcattttcacaaatacctgcaaagataaatcaaaagtacttggcttaatttgaaatttaagaataaaattaaaacatttttgcttaacttaaatcaggcccattcatcttagcataggctttctctgaagcacagtggcccagatgtggtgggacctggtttaactacaaagaagttataccctcaagggacttttcagacctattttcctaccataattagaggtatggtcattattcacatgtaattggtattcttctctgacataataaactcagaaatgagccctatacggaagttctttggggtttgtgtttggtgatgatgattattgctgctgttctttcttttttttttttttttttgaaatggagtgcagtggcacagtctcagctgtcgcctaggctgaagtgcagtggcagtcttagctctctgcaacgtttacttccggggttcaagtgattctcctgccttagcctcccaagtagctgggattacaggcatgtgccaccatgcccagctaatttctgtatttttagtagagattgggttttgctttgttggccatgctagtctcgaactcctgacctcaagtgatactgcctgcctcagcctcccaaagtgctgggattacaggcgtgagccactgtgcccggcctgatgtttcttctttttaggccatgcagctactcagtctctgactacttaccatataggtctagtaagggcagtcttctttctatggattttatgccagtgatgtatgctaatatgagttgtaagggaaatagacaaaaataagacagtggggaaaaggattgctgcagttttcactcctctgattgtcgtcatctgtaggcgtgtgtgtgtgtgtgtgtgtgtgtgtgtgtgtattttttgaaacgaagtctcgctcttgtcccccaggctagagtgcgatagtgtgatctcggctcactgcaacctctgcctgcctggggttcgagcaattctcctgcctcagcctcctgagtagctgggattataggcgtctgccaccatgcctggctaatttttgtatttttagtagagacagggtttcatcttgttggccaggctggtctcaaactcctgacctcaggtgatctacccgcctcagcctcccaaagtgctaggattacaggcgtgagccaccacgcctgactgcacatatttatttataacaggaatattggaggtgccagagatggagaaatgaaggataccattgtccattgtcttttttatgaaaataaagtgttttctaaaaaatcacaagaactgtcttgtagcttagtaaaaattacctaataggaatttatttttaatgacttagactaataatcattttgtttgtttgtttgtttttgagacagggtgtcactctgtcacccatgctggagtgcagtgggtgatctcagctcactgcaacttccacctccaaggctcaagggatcctcccacctcagcctcctgagtagctgggactacaggcctgcgataccatgcccagctaatttttgtatttttttgtagagatggggttttgccatgttgcctaggctggtctcaaacttctgagctgaagcgatccgactgccttggcctcccaaagtgatgggattacaggcctcagccaccacacctggcccaataattattaatgtggcttatttcaggtcattcgtttattgcgaatgattgtaagagtttcttttattcaagattcattcataaaggttctcaccatttaaaaaaaaagggataactatgaggtgttgcatgtgttaattagcttgattgttttaatcatttcacagtatatacatatattaaaacattgtgttttatgccataaatatataatgttcatttgtcaattatacctcagtaaagctggaaaaaattcattctgtattaaattaatgtgtttttcttgttttcgtaagtgtggatctcttggataagacttttaattttaatctgtttagcatagccatgtttttactaaaggagctaatcacttgtaatcttcccatcctgtatgtaaatttaacatcaaattgattcgtttgcctgcctcatgtctttgctgtcatattgtatttgatttagtataatattgtactcaatgtccatctctctgtggattctgtggattataactgtactaccaaagtgtacaaatttgttaataagttagaaaagataaactagggtggtaatgtttttatacattactgtttctgaaaaatcttcctactgccaatcatatattctgtaaattaagaaagtaattattatttcgtgtagatctgtgattatttcattatctttgtatattttttgactataggaaatcgctgataaagatgggaacaataaagttctgtctttcactatcccctccttatccaagccttcaatataccatgaagtaagtaacattggaaaggtggaattattttaaattatattgagtaacaaatcaaaaagtcartttyttatcagagataaatattcctaaaatatctttactgatttgcttcttaaaagtggatgtttgttattagaagactgagctgtgacgagagaggtagaaaataatgaaaattttctttagttcttttgtttttttattcttctatcagtatcttttttgtttgtttgtttgtttgttttttgagatggagtctcgctctgtccctcaggctggagtgcagtggtgcgatcttggctcactgcaacctctgcctcctgggttcaagcgattctcctgcctcggcctcctgagtagctgggactatagacacgtgccaccatgcctggctaatttttttatttttagtagagatggggtttcaccatgttggccaggctgatcttgaacacctgaccttgtgatccgcccgcctaggcctcccaaagtgctgggattacaggtatgagccaccacgcctgactctaccatcattttttactctcattagtcttttatgaatttttaaaaaattctttaatttttaaaatatttttatttttaattttttaaataataagcttaaaaatattctttaatttttaaagtcttccatactacttagaaatcaccttagattgatttgtttttgttattctttattattctaggaaaataactacttaaaagaatgttgacactctaattgttgtatttcagtttaaaggaatctaattgctgtattctaggtgttcagtacattatacttttttgcttatatttatttggctgaagaatttgagaacactgataatcatgtaggtaaatgatacctgttgagctgaacttcttctactttctgtctttaagtaaaatccaataagaaacttatgaatcaaacttgtggtctgcagtggcctttgttgccactacactaagtcgtgaggataacatttaaagaaactttactagtagtctaaaaattgtattctattttcctgtcaacacacagtatcctgaccatctcatagctctttgcactattaatttgcttaattaattccgtgggactttgttttgtgtttaaaatagaatgtctcccatttagccaggaatcattttagcacagtatatttctgaataatagattttaattaagttgtgtgtatcatgaaataaaatggagagtagtaaagtattaaagaatggatggttcttcttcttcttttcttttttttttttttttgagacagagtctcgctctgtcacccaggatggagtgcagtggcgcgatctcagctcactgccacctccacctcccgggttcaagcgattctcctgtctcagccttccgagtagctgggactacaggtgcatgccaccacgcccggctaatttttttgtatttttagtgcagatggggtttcactgtgttagccaggatggtcttgatatcctgacctcttgatctgcccaccttggcctcccgaagtgctgggattacaggcgtgagccaccgcgcctggcctggatggttcttctaactttagaaacatgaactcaataatgttagtattaaagagacatttgggccagttatggtggctcatgcttgtaatcccagcactttgggaggccgaggtgggtggatcacttgaggtcagaagtttgagaccagcctggccaacatggcgaaaccgcgtctctactaaaaatacaaaaattagctggatgtggtagtgggtacctgtaatgccagctactcaggtgtctgaggcacaggaatcactcaaacccaaaaggcggaggtttcagtgagcaaagattgtgccactgcactccaacctgggagacagagtgagactctgtctcaaaaaaaaaagagagatatttgattatagtctttaatattgtttgtataattataagcagttgtactcattctggaatatagacattaaaatggatgtatttttaacctttagttttttcagcaacttttcatactctcttaaatatagatttattacatgacttttaaaaaatgtttttagttttatattttacaggcaatttccaaaagaagctatagaatttatataattgacagttgaaagattctgaaccttttccgtgaagaatgagaagaataaatgatccaaaactgccttttatggaaaagaaaattaaatattattacatgatacagatttttacttcatggtagagacattgtctcatactgtaccttatttttgtagccttcaacaattggatccatggctttgacagaaggggcattgtgtcagcatgatctcatcagagttgtttatagtgatcttcatcctcagagggaaacattcactgcacagaaccggtaatggtcaaaactgtatatagtaacaacttgtatgtatgtatgcatgaatatatatatgaatgaatgaatgacagagtctcactctgtcacccaggctggaatgtagtttgtagccacaaacatggctcactgcagccttgacctcccaggcttaagtgatcttcccacctcagctttccaagtagctaggactacaggtgtacaccaccatgcctggccaattttttttttattttttgtagagaaaaggtcttgctatgttgtccaggctggtctcgaactcctggcctcaagcacttctcctgcctcagcctcacaaagtgctgagattataggcatgagccactgcacctggcccatttatttatttatttagagacagagtctagttatgttgcctaggctggtcttgatctcctggcctcaacgtgatcctcccaccttagattcctgagtagctgggattacaggcatgcaccactgcactcagctaacaatcattaacttacacttagtagttaactataattacttcagttcaagtttggtatgagaagactccaaaaggtaaatacatcatagttgtgaaatacccattgtctaatgtttggtattatgttatggtcatcttgtataaagcagtgtaaaaagtggatgtgcagtcagtcaaaccaggattcatattctagtactgcaatttagaaatttttccctcagacagtttatctactctgtacaccttgctttcttggttgcagaatgggattcgtacctgaaattttacagtttgagggacaggttgcaaaattgccctcacttctgactaattgaaagttttgggagttcccaaaaccaaactcttgtttgataatttgctagaaggactcacaggattcactgaaagccattatactcacagttatggtttattacagggaaagaatagagattaaaatcagccaaaagagacacatatagtagaatatgaagggtttcaaacacaaagcatctgttgtcctttcccctgaagtcaggatacattaccctcctggcaycaatgcatgacagtaaacacaaagtattggtaatgggagaggctcatttaagctctggtttccagagttttttttattgaggcatcattatgtaggcatgattgattaggttgattgcctacttggttgatctcagcctccatgtggactgatgcagtgtgacccagagctaccaccttaaatcacacggcagttctttctggcatggccaactcctacctaagaaagtcagatgtggtcagtccggcctgaagttctggtgttaccagtctcggccctaaacaaagactctttatcagattaacttcctaggagcaaaggccagatgtctctttgggcaaggccagtttatagatggcccatgaattattatggttcaacttaaggtttttcaactttacaatggtatcaaagcaatatgcattcaataaaaactgtacttcaagtacctatgtaaaccttctcatttttactttcagtacagtattcagtaaattacatgagatactcaattttatgataaatataaaataggctttgtgttagatgatttttgcccagctgtagggctaatgtaagtgttctgagcacatttaaggtaggctggactatgctatgatgttcagtagggtagatgtattaaatgcttttttgacttatgatattttcgatttacaatgggtttattggtatgcaattccatcataggtcgagaaacacctgtatttattatacaggctgtcccctggtctttggccaaggctcaaaaatgatcatgtttatctgggcatctacatttagtatagcatttatatgacagatactatcattatgaatatgcctaacatttggaggagccagtgtaggttacagatagatttaaagaaataactaattcatcctttaatgtttgcatatattttcatatttttgcacaaatttgattacctcacccctcttctttatctaccttgtggtaaacttgtgcagcactatttgtcatagaaattagttaatgattagctaaatttagttcctcctcaggcaagtcatgttccattagtattcattctaaggaggcttcaattcaatttccaatacatatgaccaatattataaccttaccaacaatgccaatattataccatgtcacaggatggcagtaaatgaaacctgaaaaataagagccaaagatactggcacattcatagagtgccagtcagtcattaacaattatcccagttcatcatcatatatgaccaaaatatctcccagagagaagtcactcaagtttacagacttctgtttagccttattaagttctaaaagcaggagtggcctcacaaacacttgacttttactctttcaggcatctagtataattgagctaatagtatcatctcttgctctgagtgtcttccaaggtgctaatgtatttcccacattgcaaaactcatttattcatttaaaaaaatctcgccaggtgcggctcatgcctgtaatcccagcactttgggaggccgatgcaggtggatcacctgaggtcaggagttcaaaaccagcctggccaatgtggcaaaaccctatctctgctaaaaaatacaaaaaaaaaaaaaaaattaaccaggcgtggtggtgggtgcctgtaatcccagctacttgagaggctgagggagggacaatcacctgaaccaaggaggcagaggttgcagtgagctgagatcacgccagtgcactccagcctgggtgacagagcaagactccgtctcaaaaaaaaaaaaaaagccaggcgcgatagctcacgcctgtaatctcagcactttgggaggctgaggcaggcggatcacaaggtcaggagttcgagactagcctggccaacatggtgaaactctgtctctactgaaaacacaaaagttagccaggcgtggtggcgcatgcctgtaatcccagctactcaggaggctgagacaggagaatcgcttgaacccggggaggcggaggttgcagtgagccaagatcgtgccattgcactccagccttggcgacagagtgaaactccgtctcagaaaaaataaataaataaataaaaataacaaaataaaaaataaaaaatctcagctactatttctctctctcttcatttgtactccgacttttctaccttggagagaggttaggtttgaccatcgtgttggtctctatttctggcagcaaaactggctagcaagtgcctccctatcaattcactcccaaggatgtagggtatatttatataaagaactaatgtgctatcacaactaggcgataaatatacattctctgtcaatcctaattttgccagatggaatgaaggcatagcctagcccatcaggcctttaggaattctgacataaagatttgaaggtgtagttccggtttttttgcttaggaatcatctctgctccttgcacccacagttgcagcactggtactggaaccactgccttaggtgggaaaaaaaaatgttgaggtgatgtggaaaagacgggaaaaaagtgtagtaataccaccaccttctgtcactatgagaataacagaatagtaatgatgactattccagcatcatctctccactgcctaatcccaaacccccccagaaaaacagaggaatctctccagtgataattggccctcccttggccccgctcaggttaagtacacagtcatgaaggcctataagccaacccttcatacctgtatctcacccccagccttttagaccaaaaatatctcatttgattgttccaattattttcatttttcaattgctttcattccacgcaattgcttgttccattaccctgaggatgtctctttgcccactgttggacttttggtcttttttttttttttttttttgagatggagtcttgcactgttgcccaggctggagtgcagtggcacgatctcggctcagtgcaaactccgcctcctgggttcacaccattctcctgcctcaggctcccaagtagctgggactacaggcgcccgccaccatgcctggctaattttttgtacttttagtagagacggggtttcactgtgttagccaggatggtctcgatctcctgacctcgtgatccacctgcctcggcctcccaaagtgcygagggattacaggcgtgagccactgcacccggccattggacttttggtctttaaagtgtgtttcttgctccaaaaatgtagctaagcagtccatatgggtacaatatcttctggtccttttacagtactctgagcatttgatccacaatctgataagcaaaacctaatgcagtgtctgttcctgtcaggacccatttgtggcctccagagactgctggcatctgtttggcttgccagctatgtgcaggaccttcccccagaggaatctgccccatagccatctgcagtctttgtctgttttattggcattttatgcctcagagggtacaaaaaatatgtctaaattcaacccatctctgcattgctgcagtaccaccatgtccactcatttcatggacccaagtgatcactccaggtggctacacagggatatttgcccataggtgccagtcacctgattctagaagggagttctcctgatgtgcattgacatatcctacttatgcacgcttcaaattcccatagtgatttccatatgcctgtttttttccatacaggcacccctttattaggccagttttatattacccttctgcctgaccacatggccaggccactggccaccactcataagctgataaaaacccaaacaggccaggcatggtggctcacgcctgtaatcccagcacttggggaggctgaggcgggtggatcacctgaggtcaggagtttgagaccagcctgaccaaaacatggtgaaaccctgtctcactaaaaatacaaaaaattagttgggcgtgatggtgggcacctgtaatcctagctactcgggaggctgaggcaggagaatcacttgaacccagaaggcagaggttttgcagtgagccgagattgtgccactgtactgcatcctgggcaacaagggtgaaatccatctcaaaaaaaaaaaaaaaaaaaaaaaaagcaacaacaacaacaaaaaacccaaacatagcggcaaactgcatgcaattcagccaacctgctaagctgatatgttttcacttttttttttttttttaagatggagtctcgctctgtcgcccaggctggagtgcagtggcgcgatctctgctcactgcaacctccgcctcccaggttcaagcgattctcctgtctcagcctcctgagtagctgggattacaggcgcacgccaccatgcctggctaatttttgtatttttagtagagatggggtttcaccattttggtcgggctagtcttgaacccctgaccttgtgatccacccacctcagcctcccaaagtgctgggattacaagtgcagtggtgcgatctcagctcactgcagccttcaccccactagttgaagctattctcctgcctcagcttcccagcccagctttttaaagaataagtcttgggctggacacattggttcatgcctataatcctagtgcatggattgaggtgggaggatcacttgaggccaggacttcaagaacagcctggacagtatagcaagacccgatctcttaaaaaatagctgagtgtggtgatacatgcctatggtcctaggtactctggaggccgaggctggaggaccaagcccaggagtttgaggctgcagtaagctatgattgcaccactgcactccaacctgggcaacaaagcgagacccaatctcttaaaaaaattttgtatttctttctctagtggcacatagatatcttattctttttaatgatgagttattattccattttatgtatgtaccatcaatttttagccagtctcttattgagtaaatttagattgttttcagttttttgctgctataaacaatattacagggaacacattttttgtacatacatttgcgtgagagcacgaaaagtatctataggataaattcctagcagtgaattgttacgctaaataatatctgtggccgggtgcagtggctcacgcttgtaatcccagcactttgggaggccgaggtgggtggatcacgaagttaggagttcgaaaccagcctggccaacacagtgaaacccgtctctactaaaaatacaaaaattagctgggcgtggtggcaggtgcctgtaatcccagctactcgggaggctgaggcaggagaatcgcttgaacccgggaggcggaggttgcagtgagccaagatcgcgccactgcactccagcctgggtgacagaggaagactccatctcaaaaaaaaaaaaaagaatctctgcttttttagttggagtagatattgtcaaattagccttgccaaagcaactataccaattgaatgtcctactagtagtttgagagtttttcctcctactaactcccaatactgattattttcaaagtttttaatctttaccaatctgatagttaaaaactggtgtcacattgttattcattattgtttttctttacctatgaactgcatattcatgtcctttgtcctttttttttttttttggctgattggtgggagaggtttgtttcactgtattgcccaggctggtctcaaattcctgggctcaagcagtcctcccacctcgacctcccaaagtgctgggattatagatgtgagccactgtgcccagccccatttttcttattgagctgtgtatttttttttttttcctggtgacttgcaatagttctttgaatattgaggaattgacactggtttttcatgttgcacgttttcagctaattattgactttacatttattttttaaattgagatataattcacataccataaaatttacccctttagggagccaggcacagtggctcatgcctataatcccagcactttgggaagctgaggcaggtggattactggaggccaggagtttgaggccagcttagccaacatggtgagaccctgtctctactaaaaatacaaaaattagccgggtgtggtggctcatgcctgtaatcccagctactgggtggctgaggcaggagaatcacttgaacccaggaggcggaggttgcagtgagccgagattgtgccactgcactctagcctggcggcagagcaagactctgtctcaaaaaaaaaaataaaaatagaaataaaatttacccctttaaagcatacaattgagtagtttttattactagacattttacatgaatggatccatacaatatgttgccttttgtgtatggcttctttcacttagcatgtttacaaggtttgtttctgtggtagaatgtatcagtactttctttttataactaaataatatttcattgtgtggatataccacattttatttatccattcatcagtggatggacattcgagttatttctattttttcttttttggctgttatgaataactctgctctctttagtctatttgggctgctataacaaaataccttagactgggtaatatataaacgatagaaatgtattgctcacagttctgcagattcgaaagtacaagcttaaagtgccagcagattcagtgtctagtaagggctcatagtctctgcctcatagatggcaccttctagataatcaaatgtaggagggcagagctgtcatgacctaatcgtgtcccaaaggccccatctcttttttttttttttttttgagacagagtctagctctgtcacccaggctggagtgcagtgtcacgatcttggctcactgcaccctctgcctcctgggttcaagtgattctcctgcctcagccacttgaatagttggtactacaggtgtgcaacaccgtgcctggctaattttttttttttttttttgtagagacagggtttcactatgttggccaggctggtcttgaactcctgacctcaggtgatccacctgccttggcctcccaaagtgctgggattataggcatgagccaccttgcccagctgcaaaggccccaccctcttaataccaccatatcgatgattaagtttcaacatgaatttagaccacaacagctgttttgaacatgcattcacaaatttttgtgtgaacatacatttttcagttctttttagtatatacctaggaatagaattgctaggtcatatggtaattcaacacttaacttcttgaggaactgtcatgcttctttccagagtagctgtaccattttacgtttctacaacagtgtatgaggatagcagtttctctacattctcacgcttattttccatcttttttattgtagccatcttaatgggtataaagagtgatatggcattctggtatttacttgtttttgctgtatgttttagttttttatgtagycaactttatcaggaatacacatacatttttttccccaaagctaaatatgctttagctctgcatatttttctttttttcttaagacagggtcttgctttgttgcccaggctggtgtgcagtggcatgatcatggcttactgcagcctgcaccctagaacccctgagctcaggtgctcctcctgagctcaagtactcctgcctcagcttcctgagtaactaggactaccaccatggcccgctaattaaaaaaattatttttgtaccaacagggtctcaatatgttacccaggctgctcttgaatgcgtgagctcaagcaatcctccctgcctcagcctcccaaagtgctgggatttcaggaatgacctactggacggagcctcctatttctttttttttttttttttttttttgagacggagtcttgctctgttgcccaggctggagtgcagtggcatgatctcagctcaccataacctccgcctctcgggttcgagtgattctcctgcctcagcttcccgagtaactgggactacaggcgcgcgccaccatgcccagctaatttttgtatttttagtagagatggggtttcactatgttggccaggctggtctcgaactcctgactgtatgatccgcctcggcctcccaatgtgctgggattacagatgtgagccactgcgcccagcccttctatttctttatagtctctttttcatcctagtagagttccttagatgtctggcaaccttttttccctcatgtttaagaataggggaataggctgggtgcggtggctcacgcctgtaatcccagcactttgggaggccgaggcaggcagatcacctgaggtcaggagttcgagaccagcctggccaaaatagtgaaaccctgtcgctactaaaaatacaaaaaaaaattagccaagtgtagtggtgggcacctgtaatcccagctacttgggaggctgaggcaagagaatggcttgaacctgggaggcggaggttgcagtgagccgagatcatgccattatacttcagcctgggtgacaagaccgagactctgtctcaaaaaaaaaaaagtggggagagggaataaaaaatgagaagctctgaccatgttaatatatggctgatttgagctagtattggtgcaaaagttattgtggttttgccatttaaaaaattttttttaaagttttgcaccaacttagtaactgactataaacttcaccataggatcccactaggccattcatttggaaaatttcccaagtccatatctttaagtctttcttcttagagtggtcaaattccctagaaacaactcttctggtatcttaactagagatctttttgctagtattttggtggcaaactggcaatatctagkcaggtatatttcacttcacttaatcttcctattttcagtttggcatccacccccatcacagctagggctcccaggtagaaattagtttttatcctttcagagaataaatctccattcttttacctagatatatggagaaagtgaagggatctgaaagtatggctgcttccagatcagactttcagcttgatttttaacttttcattttgaaataacttcagacttacaaaaaacattgctaaaatagtacaaagagtttccataaacccttcrccattcatctatgggaagctttttagaggtacaacttccctagttcctacccgaggatttaagtgggtcaactgggttaagacatagaagtgtatgtttttaaaaaggtctctaaataactaatgtgcatccagatttaggagccactttcttagacattataaatgttaggaaagcatttatttattcattcaacaagtatttattaaacaattatgtattagacaccgtgctggacaccaatgatagagattaataaatcaggatctctgttctaaagttgctttattactaaacgggtgaaagagacatagaggcgtaaaattacaattcagtgggataaatgctatgttagagctacagaggtaagggactggtttactttagcagagagaattaagaagggctttatggctaaggtaaaaatttgatctaggacttgaaatcttatcaggaatcacccaagtaaaaaagcatattctattaagaaggagcagcaagcattaaagcaagggattctgaatggttacagcatattgttggaatggtaagaagattgataaagtgtggtatatgtggttggtaatggagagaaataaggctggagaggaaggatgagggtggattttaaagtaccttgtaagaaggactttgattttaaaggaccttgtgataagtttggattttattatgaagtcagtaggaagatggtagacttattcataggggagtcatctgttcaagcatgattgattgattgattgattttttgagatggagtctcactctgttgcccgggctggagtgcagtggcacagtctcggctcactgcaacctccgcctcccgggttcaagcaattctcctgcctcagccttctgagtagctgggactacaggcatgtgccaccacacctgcctaatttttgtatttttaatagagacggggtttcaccgtgttagccaggatggtctcgatcttctgaccttgtgatccacccacttcggcctcccaaagtgctgggattacaggcatgagcccctgcacctggcctgatttattttttaaaaacggaaatatagatgacaagatgacagcaagggttatgatttgtaataaggagaatataaacagggaaacctttgaggaagatgctatattgatttgattaagaaatcataaaggtcaatattaaggcattgtcataaccagttgctagtagaagtaattatttgtaatccttttaaccttgcatttgttgtttttaggtttgaagtcctgagttttctcatgctgtgttataattctgctattgtatatatgcctgcctcatcttaccaatctctttgtcggatgggttccaggtgagaagagtgattattactaatcttcatatttatttgatagatatttattgagcacattctctaagccaagcactgttctaacttctggtattacagcagtaaacaaaactcatggagcttgcattcctgtaggagtccttatcctcatgaggctgtttttgttgttgttgttgttttggttttttatgagataggatttctctctgtcgcctaggctggagtacagtggctcaatcatagctcactgtgccctcagccttcttggctcaagggatcctcccgcctgggcctcccaagtagctgggaccacaggtgtacaccacgactctcagctaatttttgtagagaaagggtcttgctatgttgcccaggtttgtcttgaagttctggcctcaagcattcttgccacatcagccttccaaagtgctgcgagtacaggtgtgagccaccatgcctggcctcgtgcattcttgaaaatgttttcagcattaaagaaatattttctagctgaacgtggagttgtaccaagacatccaaatctagggttgtttagtgatatatcttattccctggttgccagtttttgtaaatcactttgagatctttgaaaaaaaatagtgctatatatggggaaagtcttaaggaatatgaacctcttcccatacatttcataaataactgtctctgtgttggagaaagtgattagcaatagtaccaatgatgtgtgtgtctcatttgtatgtagggggtggatattctgtatctcatggattataatctttactaaatcataatttctaataatttggacagacctaggcttaaatcttgttctgtcacccagactggagtgcagtggtgccatattggctcattcaacctttgcctctcaggttcaagtgatcttctcacctcagtctcctgagtagttaggactacaggtgcccaccaccatgctgggctattttttttttttaaaagagaccaggtttcacaatgttgcacaggcaggtcacaaactcctgggattaagtgatctgcctgccctggccttccaaagtgctaggattacaggcatgagccaccacacctggcgttaaatttctaccatagaaaaaatgtaggccagggtcagtggcccatgcctgtaatcccagcatgatgggaggccaaggcctgaggtcaggagtttgagaccagcctggccaacgtggtgaaaccctgtctctatacaaaaatacaaaaattagctgggtggtagcgcatgcctataatcccagctatttgagaggctgaggcatgtggatcacttgaacctggtaggcagggttgcagtgatctgagatcacgccactgcactccagcctgggcgacagagtgacaccttgtctcaaaaaaaaaaaaaaaaaaaaagaaaaaagaaaaatttaagtgatacaaattagttcagagacaatggatgtttagaggcacagaagttcagttatagaaggaattctgaattcagcctttcaaaatgatttttacttgaggatatcaatcccccaaaaaggttaaatgttgtgttagttttctattactgcataataaattgctacaaattgagcagggtaaaacatcacacatctattatttcacagtttttgtgggtcaggaatccagatggcttagctggggtcctctgctcctctgcttagcatcttagaagactgcagttaagatgttagctggagttgcagtctcatctgaggctcagaagttttgttggcagaattgagttcctgtggctgtaggactgagggcttcagttttttgtagctgtgtgctggaagccatcctttgctccttgtcatattggcctcccaacacaggcaacctacaacatggcagcttgcttcttcaacgtgggaggagtgagactccagcaagacctgttaccttatgtaacgtactcacgtacacataatcatggaatcccatcacctttgccttattctgctggttagaagcaagctgtagatcccacccgtgctgaaggggaagggcatgacacagtgtgaataccagaaagatcatagggatcatggctctccaagagtctgtccaccacaagtgctttgctcaaggtcacatgctattttgttactgggaagagatcctgcttataacaaaacttattaattttgcccatctaaattagctgttactttgattttatagattacttaaaaatatgtttctcttaactgtaataccatgattaacaaaattcttgtctctaatttagatgctacttaagcacttactccctatctgcagataaacttatttataattcattacttttggttcattaaaagaaaactgcttgttctcttattggcaacattattgtggccttcaatagaatttttttctttctttttttttttttttgagagagtcttcctttgtcacccaggctagaatgcagtggcacaatcattatacatagctcactgcagcctcgaactcctaggctcaagcagtccttccaccccagcctgtttattagctatgactatagggatgtgccaccatacttggctaatttttaaatttgttatagagatggggtctcaccgtgttgtccaggctggtcttgaactcctggcctcaagtgatcttcctaccttggtctcccagagtactgggattacaggcatgagtcaccacacccagcctaatagaatttcttaataacaaaaatgatggcggagtttagtggtcctcaaacttttgttcttttgttcatatatcctctacagaattttgaaaaactatgtatgtactccttgtacattgttaagttgacattaaaaaattttcatcctatcttaaataggtagaaatgatataatttctaggccaggcgcggtggctcatgcctctaatcccagcactttgggagtccaaggtgggcagatcacctgaggtcaggggtttgagaccagcctggccaacatagtgaaaccccatctctactaattagccgggagtggtggcacatgcctgtagtccactacttgggaggctactcgggaggctgaggcaggtgaattgcttgaaactgggaggcagaggttgcagtgagccgagatcaggccactgtacttccagtctgcgcggcagagcgagactccgtctccaaaaaaaaaaggaaatgatataatttctagtatggaagtatctacataattaaaaaaataactgttgggtcactgttttaaatatatgtaatgtaaataccatagtggtgtgatactcaccatcatccatttgaggaataaatgaagaaacttttctttaatggtctaacattacatttattcctttttctccttgaaattgaagaagaaatttccattcccctttccccacatggttttatcttaatataatgctatttttatttatttatttatttatttttgagacagagtctcactctgtcacccaggctggagtgaagtggcgtgatctcggctcactgcaagctccacttcccaggttcacgccattctcgtagctgggactacaggcacccgccaccatgcccggctaattttttttttttgtattttyagtagagacggggtttcaccgtgttagccaggatggtcttgatctcctgacctcgtgatccgcctgcctcagcctcccaaagtgctgggattacaggcgtgagccaccacgcctggccatataatgctatttttaaattgcaggtcttttattgtatgtctctgctataaaaaatatataaacaattaaaaaaaaatttcccaagaccataaggcactaaacactgaaagatttcttctggactcactattataattatcttactaaattaattgattaaataatgtagtatattacaactgttgatcattatcaagcataacttttttggaagcatcacttaatgagattgaatggatgttagggagttgtttatagttctttgtttaaaaatggcctcacagacaacagtattttgaaatgtccttttgttttgagatctctatacttcccagtaattcaccctgatacaatttggggtgagtaaaagttagacatttttgtgtgtatgtgtgtgaagagaaagaaggatgattgcgaaagagatgattagctatttcagaaaagttgcttttatgggcagtccactagaatgagtgctttatgagagcacagatttcggatttttattttttattttttatctttcacctgttcacaactgtatgcctaggcccagaacgatgactggtatataacaggcactcaatawatacttgaggaatgaataaattgaataaatgaatttaggaaaacaaaaactattttatttgatgaatctggaaatcacatgttaaatagtgtattttcctagggtttgtgtgagtggctttccacggcaacatgaaaaacactggaaagaactctgtggtcgaatagtattggatcctgaatttatggtgcaacttctcacaggggtttattatgccatgtaagtaggtggaatataaaattgtatgaattcttcctaatgtttagaaactttgaatatttctctttcttccttatccgacacaatactgaatcttttgttccatgatgggcttatcttgtttttctaatatggtttccttttagtacttttaaataagccaaaatataacataactagtcattaaaattggagtctagaaattgtcaggttttctgtatggaaaactatctctacatagttcataacccaggttttcatgaacgcattgaaaagattactctaaatatcagcatgtaataaaaaccaatttatgtgaagaaacatttgtaaacataatatttaaaatctgttttgtttttataaccaaaagtgggatagtttataaatgaaatgacgtaacacttggtatgaaagttttgcttcacaaccaaaatagcaggacttggaacaatttaaaaagttgtgctgaagattagatatttgctcaagagtataaatgatctgyttcttcataggtataatggacagtgggaccttggccaggaagttcttgatgatatcatttatagagcccagctagagcttttttctcaaccactattggtaagttattatcttaactctttattaaatatactggtacctaaaaaaggtactaggttaaaaatgtaagacaatccaaataattaggggaaaatttgtattccatgataacagttggttaactgttagagaaaaaacaaaataggtttaggtcctttccaccttccagtaccaaaataaagttcagataaagtgaataactaaacgttttgaaatcctttaagaaaagagagaagaaaaggttctaaatattcagatttctagagaagggaagatttctaagcataaatgataggacaagtcactaaaataagattgatttgcccacctccccccccggccccgacataaacacctaaattctaagccattaggattttgggggtttttttgtttcttgttttgtattttttttatagggacagggtctttctgtgttgccaaggctggcctcagcctcccagagtgctggaattacagatgtgtgacaccacacccagcctattccatcagtttttttaaattttttatttttattttgtttttgatacgaagtctctctctgccacccagactggagtgcagtggtgtgatcttggctcactggaacctctgcctcatgggttcaagcgatcctcccatcttagcctaccaagtagctgggattgtaggcatcaccatgcccaggtgattttttcttttttttttttttgagacggagtcttgctctgtctcctatgctggagtgcagtggcgctatctcagctcactgcaacctccgcctcctgggttcaagcgattctcctgcctcagcctcctgagtagctgggactataggcgtgtgccaccacacctggctaattttttatatttttagtagagatggggtttcactgtattagccaggatggtctcgatctcctgacctcgtgatccacccacctcggcctcccaagcgaatttttgtatttttagtagagatggagtttcactatgttgaacaggctggttttgaaatcctgatctcaagtgatctgcctgccttggcctcccagagtgctgggattataggcatgagctaccacgcctggcctccatcacgtttttaaaagcaaaattaatatatgcagggcacaaactgagaaacatattttcagcagtcatgatacaaataagcaaattaatatttcattctatgtaaaaagattttgtactctcccacaaaataaacaaatctccaactggtaagtgatcaattaaaaaacaaatgtaaggctgggtgcagtggctcatgcctgtaattccagcactttgggaggctgaggcgggtggatcacctgaggccacaagttcaagaccagcctggccaacgtggcaaaaccccgtctctacaaaaaaatacaaaatttaaggccaggggctgtggctcacacctgtaacccagcacttcgggaggccgaggcgggtgtatcacgaggtcaggagttcaagaccagactgtccaagatggtgaaaccccatctctactaaaaatacaaaaaattagctgggcgcggtggcgggcgcctgtaatcccagctacttgggaggctgaggcaaagaattgcttaaacccgggaggtggaggttgcagtgagctgaaatcatgccactgcacctcagcctgggcaacagagtgagaccccatttgaaaaaaaaaaagaaaaaaaaatttagcgggatgtggtggtgcacacttgtaattccagctgcttgggaggctgaggcatgataattgcttgaacctgggaggcagaggttgcagtrggctgagatcatgctactgcactctagcctgggtgacagagcaagaccttgtttcaaaaaacaaaacaaaaaaaaatgtaaatatccagtagtgaagtgaggaaggcattctttatgttacagtagtagtatgacacaactctgactatcccctgaagaagcagtttggtaatgtgtgtttatttctttgaccctctatcccatgtctagcaatgtattccaggaaactaaacttaaatttaataccaaaattataaataccaaagacaatgtattataagcacaacattacagttttatttctaattgcaaaggaataaaaacagtctaaatgtcccacagcagagaatgatttaagttatataatatttacttgatgagattatatatttgaggttttatattaaagggaagtgctagcttgtatgaggtagaaaaacagtatacaactattttttagatctagacaggacagaggaaacatacaaaatgctataatagttgtctcggtgatttgactatggatttttattcctttccaatttcctaagctttttgtaatattttgataacagtattcttaaaatactattttctacttgcagcattgtaagaatacagctttttattttattgtttcaaaaaattactattattttttgagacagggtctcactctgtcacctatactggagtgcagtggtgtgatcacagttcactgtaacatccaccttccgggctcaagtggtcctcctgccccagcctcctgagtagctgggactacaggtgcataccagcacacccagcaaattttcgtatttttttgtggagacgagatctcaccatgttgcccagtctggtctcaaattcctggactcaagtgatctgcctgcttcagcctctcaaagtggtgggattacaggcatgagccaccttgcctggcccagcttctcaaaagccattttatttatatcatttttaaaatactttaagctaaatataaatttattgaggtagcatttgcagtaattctccatttgaattcccatttgtttcctaatcttaccctaagagttatattaaaacaaatggataaaaagattaaaaaattatatcatcatagtagtaccttgaacttatgaatctctttaaattaatagtttatcctttcaacaatcttgtaaattaagtagaggtggcatttccaaggcaatacaggtaaagagattagtaactctagtgttactaacagtattcttttattgtcagtggtctctgagggacccagtaataataccctttttccctattcaaatctagagccacgtgataaacagaaaaatagttcgtagatggggaacaagtattttcattactgttaaaagctaaattgaaagactcaactttccttcacatctagaccttggaacagcccactggaaagaatgtttgagtgagctgatcaggcacacctatccaggctgcttaattccacatgggcttgtccaagtggagagggaaggagcaagacaatcctttagctcaagatttttgctagattagtacaacccaattaggaaacatgcatcagtcaaatggcaattaccaggtatgtcactttccttttcagggagcagaaaatggtaggacaaaatgccagaagtatttagggaacatttctcctcatgtaaacagaagagtggagaacatcctaatgtttatcagagattaaattttgcaygttatttatcatctgaagaatcagacaattctaaattgtctcataatcagagtttatatgttaattctttctttggaatgctttttctctttgaaagtcaayaattttaaggcatcagtggggtatgtgactcatattttagaaattctcatttgaaaagcctgcttaaaagaatacagaacaacaaagatatgtttattacacattataatgcaaattttaaatacatattcgaaaattatggacacatgtagtataaacaaaaactgcatattgattgtaaacttgtatagacttatattatcattgtaggttgccaatgccatgaaaaactcattaccatttgatgctcctgattctacacaagaaggccagaaagtccttaaagttgaagtcactccaacagtgccgaggatttctcggactgcaattacaacagcttcaatccgtcgtcatagatggagaagagaaggtgagtacaaaatccccatagtccacacatggagtcaagtaaatttatcactgtttttacagactgtcttagcacgtgatattaaaagaccctgtataattaaagtaattttttttgttaaaaatatcactagaaatgtgactaaatgtctaaagttattttaatatgtatttataaaatagatgtttagattgctgtataaagattaaaacaaaataagatgaggttaaattttgtctttttttgaactaaataagaacaataggaaagaagttgctttaaccttgttaccatactggaaaaaaaaaggtgcacatatgagcactgtgggaaaaactatataactggccaaactaacagtataatgcaagctattcataaaatgatttattcttgattttggatttttatctttgcctttcctttttttgtaagtgctgaatccagcagtatttcatacacatggtacttgaatagtcaagctgtcttgcctaagagatattgccattttaatgatcctgatttttctgtcttaattcatttgcaaacctcacattgttcatctgctgccttatgtgtgtgcacagcatgcacacacatgtaactatataaatagtgtttgtgtttatatcatatccatatatacattctcttatctgcctgggtcaaaatgctcagaaaataatagagcagcataaaagcactaaaatgttatatgttgaatcccagatggctttgacttctcaaacgaggctgactcgagtattcctggctccccgatccaacacggctccactgacctagggatcaaacgtgtgcaagagggggaggtgctggtgcgcaggacccctgagcatggctcgccggagcccaactcagcaacagccacaacagagggtaggacagagatgaggaggcagaagtcagtgaggcagttgctggagaaggatcctggctctctatccccaagcagagcatctttccattctaatgtgtgtttctagtaccccagggtgtattagcttctctttgcaaagcaccctccctcctcatatacatagcaccaggtcaggtgcaatctttagttactatttgtgctggcctggagtctgcatccctgtgtaatcaaggaacagcttggcatggctactaacaaggcagggtcctgtctccaaaaggtctgcaaatgcttggaatttttttattactgagcatgtttattctaacattaggaaagaaaaatgcacccagtggacatgagccttattcatcaatatgaatgattttatttatacaataatttattctttaaaattttgtgaagagagttttaaaacattagcatattatcattaagacattgaagtggagccagctgatttatctgtaattctatggtgttcaatggacaatttctcagctctttgacaaagtatgctgatattcattggctttatcatctgtagattaagttgcttaggcctaactagtaaactactgataccttctagaaatgtgctatcctgatgcacagtacattttacaatttattgtaaataatggttgtattcaattcaatggaattaaaatgtattattctatttagaggtcagatatcctagtagagccttatttctacaatgtaggtatcgcaacatggaggggttttttaatacccttcccccccgaacccccatctgtaaaagaatgcttctctttgttggaaaagtatttacttactgttttgcatgtaatgccgtaggaatttttagctttgtaaaagagggaactgtagccagtttttttaaaaattatttaatgtattgctactgtggaacctttatacttatttatgaaatcaagcaagtagctttaaaagaggttatatatttttacttaaagaccaaacatacataaagcagttaatttccaccatagggaactcttgctctttggtgcattagaaatttgagcatgctcagtaagaatctaaatctaccctctgttcccttgcccatttacccagattgaccttaattcatttaacagtgttgcatgtgcatgacctagggacccaaaaaagttggtgctgtttgagagatcctttaaatggctctgaaagatggcagcgttccctttttcccctgtatcttattacattatccctaggagtaagttttatcttgtataaacacataacaataaaaagatgaatagatgtggaacccagagttggcctaaactgaacattcctgaatgactgagccacttatctactactattgctagaatattggaagtatttatgctaaatatagtactatgttaatcaacagttgctgaaattccagaaagtgtgggattagattgaagcattccttccagtacatcgagtcatacactttgaaacaaatgaaacaaaatagtagttcctttttaatatcctataaaatattaaaatatcctattttaatatctatcactggtaaaatttcaatttgggggagggagggagagggtgtagccacaaggaaagaggaatgtttccttattttaccttttaatccagattatttgtagttttatttatttatttttttgaggcaggatctcactcacgtcgcccaggcaagagtgcagtggcacaatcaaggctcactgtagcctcaacttcctggtcttaagtgatcctcccacctcagcctctggaatagctaggactacaggcacgccaccacagccggctagtttttttgtatttttagtagagatggggttttgccatgttgtctaggctggtctcaaactcctgggctcaagcaatctgcccacctcagcctcccagggtgctgggattacaggcatgagccaccgcccctggcctatttgtagttttaaatcagtattaacagaagccaaatgtgtaagtaaagtcagccatgaatagaaaagttcattaaaaatccatttcatagcttcttggcgttcagtgtaaatacaaaaaggaataaaaaaaaataaaaaaattccatttcagatgtctcctctttggaccatgaatggtattgttatcacctttggagaaaattacaaaggaaaaatgttttgagacacaattgcctttttctttcttgagggttttttctcgacccccagatggtctcactctgttgcccaggctggagtgtagtggcacagtcatagctcactgtaacctcagactcctgggctccagcaaacctctggcctcagccttctcagtagctaggacaacaggcatgtcaccatgcccagttaatttttaaattgtttgtagagatggggtcttgctatgttgcccagactagtcttgaactcccaggctcaagcaatcctcctatcttggcctccccaggtgtgacccactgcagccagcctccttaagattcatagctcactgccacctcgaattcctggacttagtgatccttctaccattgcctcctgagtagctgggactataggtgggtgccatcacatctggctaattttttaactttttatggagataagatcttgccatttgcccaggctggtctcaaactcctcaactcaagggatctgcctgtcttggcttcccaaaatgttgggattacaggcgtaagccaccataccccaccaagctttttaaacagaagaaaggaaattactaaaacctatgaaaagtcttggtaattctgaactctgctcaagcttttggattaacatagattattgactagttttctgctatgatggctttaaataattttacaattaaaattgggtttattacatgttgaaattgaagggacaatataagcccatcacttacttttctcctgattgtcaagtacattctatttatgacttttaaagctggagttaagattattactaaactggccaggcacgatggctcatgcctataatatcagcactttgggaggcccaggcaggtggattgcttaagcccaggagtttgacaccagcctgggcaacatggcaaaaccccatctctacaaaatatacaaaaattagccaagcatggtggcagatgcctgtagtcccagctgcttaagaggctgaggtgggaggatcacttgagcctgggaggttgaggctacagtgggctgtgatcgtgccactgcactccagcctatacaacagagtgagaccttgtctcaaaaaaaaataataaaaataaataaatgtttttaaaaattattactaaactgaagataatacctgtgattaaagtacaatcagtattccattatatatactaagcatttcttagtatataaaatatcagtagattctcttgcatggtggcttttatgttatcatcttttttatggccatattgcttgggcatcagatctgcatgtagcaagattcagaagctagcactaagtctctcagtctcctttcctaataaatatacctaatgatacatttctgttcactcccagttttatatcactaatatcaattctgacccaataactatcctttcttgggcattttggagttctttatactaattgtaagtaaattactaaaatgtatcatatgaatataatttaaagtttttattttgaggtacattataaaagtacattatatacagttcttttgaagaggttgagagaagtggtgtcagctgctactgttcttagtaaatgcattttcatatggctttgcatgatgattaaagattattaaactgctggatataataaggtgccttttgctttaaggatagcttatttcattctttagaaggaagaaaataatccatatgagtaaatatagctaagtaaatagtttatttttccaggtgctatgttaaataaaagattgtgtttaaatattttgtatatattttgcttaggtaacctatatctctaatatttgtttagattctttcctaacatttttaccttacctgtaatgttgatatctgttttgtagattcagattaaactttacagaagtctggaaaatgtatttaataggtagcaaaccaatatgagttattgaaagaagcaaatgtattactttctaagagaatattsatcatactytcagtaagagaattggctttctgtaaactgcaagctcagtatattatatattcttctcttcttcctacaaaaacccaagataagaattctgttgttggccgggcgcggtggctcatgcctgtaatcccagcactttgggaggctgaggtgggcagatcacttgaggtcaggagtcggagaccagcctggccaacatggtgaaatcccatctctactaaaaatacaaaaattagctgggcgtggtgacacacgcctgtaatcccagctactcgggaggctgaggcaggagaattacttgaacctgggaggcagaggttgcagtgagctgaagatcgtgccactgcactccagtctgggtgacagagcaagactgtctcaaaaaaaataaataaataaattattttgttaactgcagtttctgcatgaaatgaaatgtgatgggacactatcgtattttgtgattatgacaatacatctcaatactaagaatctaaaatatagaaataattacataaaatattatcaaaacataccatatagaaaatataaatccttaaatacccctgctggttccctaccactgctctctgatattttcttcacattaattgatcaaaatatggaaaccagtgagtagaaaaggccatagacaaaatatgactgtgaagttacagaagcaatatagttttgagttatttaaaaaatttgctagttccatgttaaaggttctaaaaccatatagaagcagttaaccaaccactgagtaaatataaaattttattatagttaaaaagagtttggcctgtaagcataaatgggtttttggtataattctggataactggaattagaagagggtctcttttgcacatcttatggtgggttaaagaaggtatgaggggaaaagttttttttttttttttccagtaggtagatatggtcatttcagragaagaatgatagtgtattataaaaatttatgttaacaaactgttgtattttacctagtcgttttacatgcctaaatattgacagtatactagatatgtttgtggatagttgtacaaaaactggactaaataaagctaaactaacatctattagcatagtagaattctgtgtagattaagatttcccctaaattatttaggggaagtgttgatagtagggccattgacaacctatagcgaacattgcccaagagataaggtcagtgttgttattcacagctgcttcttatttaatttagctattgctgagtctgtctgatttgttttcttaggtgctgagggtgtaaatggaggagaggagtctgtaaacctgaatgatgcagatgaaggattttcatcaggggcttccctcagcagtcagccaattgggaccaaaccatcctcctcttctcagaggggaagcttaaggaaagtagcaactgggcgttcagccaaggataaagaaacagcctctgccatcaaatccagtgagagccctcgagattcagtagttcgcaagcagtatgtacagcaaccaactgatcttagtgtagattcagttgagctgacaccaatgaagaaacacctgagcctgcctgctggccaggtggtgccaaaaatcaatagcttaagtctaatccggacagccagtgcttcctcaagtaaatcatttgactatgtaaatggcagtcaagcaagtaccagcattggggttggcactgagggaggtactaatttagcagccaacaatgctaatcgatactcaactgtcagtctgcaggaagaccggctaggtcaagctggcgaaggtaaagagctcctcagcccaggagcccccttgaccaagcagtctcgatccccaagtttcaatatgcagctaatatcccaggtgtagttttgacatcctccctcatctttctgcttaccttttaaactgaacatttcattgtgcaagaagacacttcatcccacattgtgaaaatattggtcactgttatcagatttcatttagtttaggtatcttcatactgtattttgtatcaaaacagcaataaggttttctttatccctctttcctacatcttctcttcacctatcccttgtaaatgtgtttgtgaagcagtataaaatggttgccttttccatgccttcctttctccttgggtgatgtgcaatccatcgtaggctgatcggtcccatttcaacactgtgagactgagggtacattagaggaaatggtgtatatgatccctatgaaacgattctttggcttttgtttaaaaacaaaacgggtttgttctcataatctatagaactatgaagattactggatcatatttttttctcttaaccaggagtgcctcagagattctgctatgactttggacttctctgagtctgtgcaatcattttctggagaagcatggggaaaggtggtagactgctgcactttttcattaaaatgagggtagctctttctccacccccccatctcctttatcccgaagacataaatgttcaattacggaggcatttaaatcaagttgtgaccacctccattggagggcaggactcttgattgtgtaattgataatgcactttctcaatggctgtatagtcattattaacgtgtcttccctcttccccacaaggacatataaggtcatttctgtccttcaagtttggccaactaacaaatcagaatctgaggggcatgttctatttcccaggaatgattgacactttggtgctggggttttgtgggggcggggggtagtttttgtttagcttttgtggagattgtgtgtgtgagaggagatttgatttttttttcttcttttcctttgtgagctgatggctgaagtgtaacagtacatcttcaggtaaagagagggatttctcaatctactttctgttatgtcagactataagagaaaccctttcagctgctttctagatgtacctaaattcagtcagacattttggattaagaaacctaaagtcctgatacattacatactccaaggaaatatatcagggacagacaattggctgaaacactgatacttcaatgtgacacatttttatagaacatttctaccagggggtactgaccttgatttctcctacaaggaccacactgcctttgtgtttaatgtaatgcaatttgtgtaccttctaatcatatatctgcagttcctcatttttataaaactttgatatcatgccagtaagctagatgttgaatgtatgtaagtagcatttggtaactgctaagaggttacaaaaacattattggtaaaaaaaatttccttagttctgatctggttggataagattttatcataacttttctgggtctcaggctctgatgtttgaaaaagaagggaatatattgggttttaaaaaagtgtattgtgacttaaactgttataagttatccttccacagaatacatcagagctatcagtgctttgtacatttagatgtttttacttgattattgtttaagaaaaatatactgaatttatagaaagcaagtattctcctaattagcaaaagttaaaattttatctctaccattaaaattacaatagattttgataaataaccagaaaaaacgcctttttttttttcacacctagcaatcctcccgtttttattgtaaggactttcttttttccctaagagactttctgttagactctttatatatgagatgcttgtttaaatatggtggtctgtaacatttttccagctcatgtgaaaatggaaaactagaacctgaactagtatctacaacattgccaaagtccagggtaaagctaaaagttgataagtagacaatttattgttttgtgtgtgtctgtgtgtgtgtgtgtgtgtgtgtgtgtgtgtgtatggtgtgtatatgtatatatcacaaagttgtattttaaatattttaaataccctttcttttaatttaagggatgtcaaataaatgaaaggagtttaaaaatagccaaaataaatgagctataaaggcccataacatactaaaacaggcagtttcaggtatgtaaggaaaggaacattatacttacctagaaagtgagatctaaaaaaaaattaaaaataaataaaaaataaaaaagaaagtgagatcttggctatggctggaggtcagtcactttatggcataaattatttgggaggtaaaaagactgttttcaattcaaattgtgcatttattggcatctaaatctagcatgattttggttagagcacaaaagaaataccacataataccaaatcacagcaaatgttagaattaatacaacaaaattttcctttggctagaaatcttatgttatacctgaaaaattggttttaaaaaatgttcatcttggccgggcacggtggctcacgcctgtaatcccaacactctgggaggctgaggtgggtgaatcatgaggtcaggagttcgagaccagcctggccaacatggtgaaaccctgtctctactaaaaatacaaaaaattagctgggcgtggtggcaggcgcctgtaatcccagctactcgggaggctgaggcaggagaatctcttgaacctgggaggtggaggttgcagtgagccaagaatgcactactgtactccagcctaggcaacagtgcaagactccatctctgaaaaaaaaaaaaaaaaaaaaaaaaaaagttcatcttagaggattttatttatctgtatgtatatacatatatgtttgtatgtatacatacccacattaacattttatgaccctgtaacatttgttttctattcttttaggtgatgtgaattgacctcagtgaagaaacatttcatttagtctaagccttgcattcagggtcttacaacagatttcttgtgcaagaattattattagttaaaatggaaggtgttagtttaacaaactgagagtcaaattttctaagtttttaaatatgcattttaacatgcattatttttggcatttaatttaaaatagttttgtttcatgtatacaacagctgttacagatatatgccagcaatattcatacttttttaacaagcttttgttatatattttctaatctccataaaagtctaatcatctatgaaaaagatatttagggagaaaatacttgttttctgtaataaaacaattaggttggtgccatgtatgccaagttggataaaagaatacaaagaaacagctgaaggttttgggagctcgctctgacattaattactagaaagcaaactaaaatgcaaagtgaatagttaactcagaagatttgaattttttgaaatagggtctcactctgtcctctaggctagagtgcagtggcactatcacggctcactgcagcctcaacctccctgggctcaggtgatcttcccacctcagcctctggagtagctggaactccaggcatgcaccaccacacctggctaatttttgtatttttagtagagacgaggttttgccatgttgcccaggctggtctcgaactcctgggcttaagagatccacccacctggcctcccagaagtgctaggattacagacataactaccacacctggcctgaagatttttaaatgtgaaaatattttaagaagctaaggggaaaatcgttattttaaaatcctgatccccttaactttaccccttaccattccccttacctttccaattcacttttgtctatttattatagaatcagaattgtgctaagaagaaaccctggagataatctagctagtctcccactccctcaccccaaccttcatcctcaagaaacagaggctcagaggttgtggtgtgatcaagatcatatacctaaagcagagccagaatcaaacccagtctcccatgggtttggggaggcagtgggttgttaactccatttttgcagtttctttatagttctggtctagtagttggtgaatacaacacattaagaaaagtgttaaatccagaaaaaatgtagagtaatctagatggggaaatgttggaaatgttaagtatatctacagatgtaaggatcaatacattattctaatttatgccttactattttctgccacataacagttgtatgctgccattttatagttgaatacatttgttgggatttatttaaatataaaataaaccctgtgaaatggctttgatcagtgttttctagttattttaaagtaatttttgagtcagccagctttcagtcaccagtgtggcaagctaattatattgcacaatagagtattgcaaagtaaagattaaataaatttgattccattactttttaatgtagaaagagactgaatcttatgcttagagcaaatgcaagcaatatttccttatatgattgaaaaaggttctatagtgtgaagcttatgattccataatggaacagtgaccatgatgtcatttaaagtgtgtatataccatataaaatgtcttaaatgcggtagtctcagctatataagctcagtatttccagtctgtattctcagattccatctagtagctttaaattaattaaaattgtttattagacactggaatactgagaataacttctttcagattgttttgtttgcaccacttttgtgaatattttaatgaagtggagtccatttttgagtacttcagttgttgacaatcagttgtctcgtttaaatctctgcatgttcatttgtaaataaaaaatgtagtacctgtctttaggggtagtcccctatttattacaaacactggcaaggaatatctgtccatttctgaccttggattacaaagtatgttttgggtttttccttttttaatcagtatttcagttacatctttgttttcagctttaaaaagtttaacgggtcatgccaatgatcagaaaatctgtaagaattttagagcaatttttctatgtacagctatgttaaacagtctgaacatgagactttttctttcaagttgaagattattgtcatcgttttaccactaagttggttgagacacttacttgtaatactttaatttttttaaagtgtttttagaaacaagttgtttgaaaaccaattagaaattagaatatttgccagattataagcagatggaatgcagtgtaaaactgttaacaatgctaataaaattatgagtcatcagattggtacagttttccctgccaagatggtcatattgataatgtaagacaaattttagtattacttgcattatgtgtacctaataggtatatcatactggtactgagcatatatagaaaatactattcatagaggagtcatcaccacccaacctccttgcctgtgtaggcatatttcttctgaacctgaccacacaagtacaacattttggtaacttcagtcttttcagtatttttgtaatcttagccatagtcctatgagaaatgtacataagagcaaacaattcaggatagaaattagcagaaagctgggaatgatgtgaaataactggcagcatagtacagaaatgtaaggtatatgttttgcttctggatttttagaaattgtgctaatcatgtttacaaattaaggcatattcagatgtctgctattatgtttaatattgatttgataaaaaaatggaattaggtgtagcttagagtataaatgagtctttttaaaaatgtgtatctggaagtagggctaataaagaaatccttttattttcaaagaaatgaacttaattggacaactcatccccaattacagaattgatatcaatatggtttgctgtatttgagtataaacagctcagtgttaattatatcaaaggaagttctttacatcttcattgattacaaaatttaccaaagaaaatgtatctaccaaatataatttttaaagtacttgttaaggaatgaggcctctttaacatataaagtatcttaaaaatattctctgacctggaaaataggtttacagtagctacaagattccattttaggttttcttatgtcaataaatgtcaatattttacacttccagcaaaagtacccgttaaagctaaatctaaatattattcctcatagcacagtttctggtctccttaaattaaggatcctactcatcaggattgaataaaaagggggaaa

SEQ ID NO: 96710 - DNA, 69385 bp, Homo sapiens
  misc_feature (1)...(69385): n = A,T,C or G
ttcaaaattgattattatagtctctccagtgaaggtttccttctctttctttccatttttggctaaatccttcttatccttcaagactccttctaggtgtcattttctccagacagcttttattggcctccagcaatccggactaaattgcactctgcttcaaaagcccattgtgcagaacttaaattgtgcgcaaagcagtgtgttaaggagcctgtctccccctactgggccacaagatcaagaacagcgcccatgtcttcgtgtaacagtgtttaacagtatctgaaccatagtaagcaatgagtcactgttaattgaccttgttttcacaatcttgttttccctttaaaaattactgctctttgtcaaaggcctttttttttttttttgagactttaagtctcgctctgtcgcccaggcaggagtgcaatggcacgatctcagctcactgcaacctctgcctcccaggttcaagcaattctcctgtttcagcctcccgagtagcagggattacaggtgtgcgcccagctaattttttgtatttttagtagagacagggtttcaccatgttggccaggctggtcttgaactcctgacctcaagtgatccaccctcctccacctccgaaagtgctgggattataggcatgagccaccgtgctcggccagaggccttcttttaagtgtgacttccaagataaacactttttcatatattgtctaccttggtgattatgacagaaatcttgccatcctgttaataggaatgatattcctttgtaatgctgtgtcagctttctgaagtgttcacatgtgatactcctaagccacacttcctatattcggaagttaatacaaatggtttttaatccttaatatgggcctttcttgttctaagaaaaatttcatttcaatataggaaaggactaactattttctttgaatcttttgtagaagctattattttctccataattagcccagcgtgctctctccactttcatcccattgattaagaaagatgtttgagacaggatttcactctgtcacccaggctggagtgcagtggtgtgatccccagctcactacagcctcgatatcctgggcccaagtgatccttccacctcggtctcccaagtatctgggactgcaggcatgtaccaccaagcctgactaatttttgcaatttttattgagatggtgtttcactatattgcccaggctggtcttgaactcctgggctcaagcaatctacttgccttggcctcccgaagtgctaggattacaggcaagagccaccatgcccagccagaaagatgttaaatgaaatgaagtttttaggcccactgctggagtcttctcaattatcaatgaaacatgaatctctggtatttggctacagttactgaaatatttataaaacaacctaatttattgacatttcattccatttatcttatttccaaggttattgtgagaaaatgtgctgtagttatactatcaaaaatttggcataattgaaaaattcctggtcctttgtgaatagtacttttatttaattgtattgtggaaacatccttttaataatccactctagactcttgtccaagaagcatattaaattcaacagtatatagtttatattgaacctttagttaagcttatggtgtcaatagtatctagctcagactaatagaaggtctggccaggtgcagtggctcacgcctgtaatcccagcactttgggaggccaaggggggtggatcacctgagatcaggtgttcaagaccaacatggtgaaaccccgtctctactaaaaacacaaaaattagcctggcctggtggcaggcacctgtagtcccagctactcaggaggctgaggcaggagaattgcttgaacccaggaggcagaggttgcagtgagcggagatcgtgccactgcactccagcctggcaacacagcaagactccatctcaaaaaaagaaaaaatggggctgggcacggtggctcacacctgtaattccagcactttgggaggcggaggcaggcggatcacctggggtgggaagttcgagaccagcctgaccaacatggtgaaaccccatctctactaaaaaaaaaaaaaaaagaaaattagccaggcatattggcacatgcctgtaatcccagctacttgggaggctgagccaggaggattgcttgagcctgggaggcagaggtgcagtgagtgagccgagattgcaccattgcattctagcctgggtgacacagcatgactcaaaactaaattacattaatttaaatttaattaaagtattttttaaaaaatttgtagctgcaaaaaatcagaagagtttttacccctctataggggtagaataaactaaaaaatcttagccagagaagtcttagaatccatgatacaccagtagcaaggcatacacctagcacccagatttggtttcttataccatattccaataaaaggaaccagggatccttggaggaatggtgatccctgaaccggggcaagaaatatacaagatatcttggagaactgggcgcggcagctcaagcttgtaatcccgcactttgggaggccaaggcgggcggatcgcttgagctcaggagttcaaggccagcctgggtgacatagggagacctggtctcgacaaaaaatacaaaaattaggcgtgccaggcgcggtggctcacgcctgtaatgccagcactttgggaggccgagatgggcagatcatctgaggtcgggagttcaagaccagcttgaccaacatggagaaaccccttctctactaaaaatacaaaattagccaggcatggtggcgcatgcctgtaatcccagcttctcagggaggctgaggcagaagaattgcttgaacccagcaggcggaggttgcggtgagcagagatggcgccactgtactccagcctgggcaacaagagaaacttggtctcaaaaaaaaaaaaagttggacatggtggcctgcgcctgtaatcccaagttacttggatgctgaggcatcacctgagtcccgggggttgaggctgcagtgagccataatcatgtcactgcacttcaaccagggtgacacagtgagaccccatctaaaaaaaaaaaaaaaaaaaaaaaaaaagattttggaacataatgtactgccagaaaagaagaaagttcttttttttttttttttttttttttttaggtgaggtcttgctttgtcacccaggctggagtgcagtggctagatctcggctcactgcagcctcagcctcctgagctcaggcgatccttctgcctcagcctcctgagtagctgggactacagttgtgtaccaccacacctggctgatttatagagatgaggtcttgctatgttacccaggctggtcttgaactcttgggcccaagtgatcctcctgcctcagcctccagaagtactgggattaaaaagtgctgggattaaaggggtgagccaccaaactgggcagaaagttctttaaaacacacacacacacacacacacacacacacacacacacacacgccaactgaaagagctccagtggccaaaactgaaacaacttgagcaacaaaataaatacccaaagcataaaataaatatccatgaggccatactgacataacgagtttttgttttgtttatgtttttgctttttgttttttttgtaagacagtcttgctctgtcacccagactagagtgcagtagcacagtctcggctcactgcaacctccacctcctgagttcaagcgattctcctgcctcagcctcccaagtagctgggactataggcatgcgcccaccacgcccagccaattttttttatttttagtagagacgaggtttcaccatgttggccagactggtctggaactcctgacctcaagtgatccgcctgcctcggcctcccaaagtgctaggattataggtgtgagccaccacacccggccaataaatgtttgaataaataaaggagaagggataaatctgcagaatgtcaaataatttatttgaattctccactttatttattttatttatttattttttggggacagagtctggctggattctccactttcaagaagatggagcacaactccccattccttaagagtgggtggcacatagtctggtgtcttcccctaagatcgtatgaatttctggaagggtttatgttctcagggccacactggtctccagacttcttccatgtacactgccccctaattcctttctaaggtcacacaagcatgaaatcggattctacatctattgctaaaaacaagccccatttccatgaagcactgaagaattgagtaggctgaaactggaccaagatcttccatcacaataatataaaaacctgcaaatgtgatggcaggtatcaccattcccacacatccagcacccacagtaagtatttccccaaccatcatcactctccgcacctacagtccccaatgctttgcatctcgtcagttctcttcctgatcattccacctctgctttccctgctcttttatctctcgccctacttcacaggagtaagcctcctagtcctacacagagcaatttactcagctccctgaattatctaggaatttccccaaagactagagtttgtggagatactttcctttaggtttagagagcattgaggagcttaagtaccatgggttgatgacagacgtgacaggattctgggggcagtctgcccttccagatgcataatccttttggatagggcaagcagacctgtggacatattagattcctataattcatataattttagggctgaaaaggtctttatggggcacccttacgttgaagaaagtaagccctggggctctttagtgacccaccttgggtcacattgccttctacaaactctgtgcttgtagaaaatagactttcaaccaaatgttcttggaacataatctttttttttttttttttttttttgagacggagtctcgctctgtcgtccaggctggagtgcggtggcgcgatctcggctcaatgcaagctccgcctcccgggttcctgccattctcctgcctcagcctcccgagtagctaggactacaggcgcccgccaccacgccgggcaaatttttctggattttttagcagagacggggtttcaccgtgttaggcaggatgttctcgatctcctgacctcgtgatccgcccgcctcggcctcccaaagtgctgggattacaggcgtgagacaccgcgcccgtccggaacataatcttttaacgggttttcacatttggatttctagatacagtaagtagccagttattactttaacgtcagaaaaagatgtctttaatttttttgtactctgtagtagaaaaattacgaaagaaggtacttgaaaacactaactgtatatttcctagaggaaaaactggcaaaggcgatcttcacaaagggtggaccgtaccttatacatcaaacccaacgatcccatcccacactttacattcagcttaaccagaagtaaaacctcttgtcacaccgtcaccggtattccaattatggcaataacgatctccttctacggatgcggttgacagataagatctctaaaccgctgctaatcaatcggtcctgggtcaagcatttcttatctgccggattcagaaaatacagatgctggaagctcaccggcttgttcggggaaagaacgctaagcaagaataaaattttatttcaaagcgccaaaaatctggaattctgaggtccacagggaggtttcccagagcaactcagttgttcccttctgagaacgtagctccgtgaaatgcacatccctactcggtccagagaaatagatcaatggggaaaaggattgaatcaaccaagtaggctgggcgggagacagccttaacccacgggcgcgggcgagtcgtatgggcaggggcaggcgggagcgacgtggggcgacgctcacgaacgatcagagctgcgggcsacgcaacgaagcccggaggccgcaggctgcgcgctccctcgcagcagccgggcgggcaaaagcccccagtcctcggcccccgcgcaagcgacgccgggaaatgcccacatccgggaaacctgcagcggagtgcggcggcggcgacactgagtggaaggcaaaatggcggcggcggcggcggtggcctggtgttaaggggagagccaggtcctcacgacccctgggacgggccgcgctggcccgcggcagcccccccgttcgtctccccgctctgccccaccagggatacttggggttgctgggacggactctggccgcctcagcgtccgccctcaggcccgtggccgctgtccaggagctctgctctcccctccaggtaggtccggggctggcgtagcgggtgcgctcctccagtgctcgagttggcggggcggtggccgccggggcccacgcccatccccgctggcgagggtccagaggtttggactggcgggcagagccggcccgctccgggcctgacttggctggttgcattgacccgagctgagccctgccctggggaagcgagggttggccgcgcccggtgctgcaggaagagccccaggcttttcggcctcggaggtgcaggtttggctgggtagagcctgtctttctggcggcgtgtctcccaccccacccccaacacgcgagtcggcggtgtccaggagggaaggaacgggaaaggtggttctgaaggaaaattgcagtaaaagagctacagttctttggatcccagagggccttgatcctgggtataccttagagaaatcctgggagtctcttacgtctagttcagtgtgattttaggttactgttcatagttggaagaggtgggagagatggagaggtctttatggagtaggagtgtgtatataaatacagcaaatgaaggaacgacaattaagggaacagtgttttttataacctgaaatagcttgtagctcaatgaatgcctcagatgacttgatttatccccattctgacttctctgtcaatttctaagggaacaaaatttaatgtttgtcaactcatatgttaatacggcttttaaaacatgtatcatcctccagaagttattcataaatctagtgaacaataagtataatctcatgcacagaagtaatattgtataactccagttttggaaatggatttgaatgttagcgatcatgaaacttgtttgaactttatgaattatttattgaaggttaataaatttatcagtttatcagtttatcagaagtttctgataaacttaattttttatcaaatttcctccatgaggaagaaaaggtaggacattataattggagtgaatgttctgtgctacgaaaacaaagcttattatctctgacggtaaaatggggtagttgattccytaaggcagtggaggaatttgattgaacagtaaaagaagtagcattgtgttagtccaattggctgctactgcaagaaactagatcatggtccatgcttggaatggcacattctatgcctaaatattgatggaatatgccttgctgctcaccaaaaaatacttctactacatttttaatgtataatatctggctttcattgtgtaggtcgtttttatttttgttttgtttttattgcaagtccttgttctatataaatagtgttggaactgttctaaccctggttatttggttattttagatgttttatttacatcaatgggagattgttatacatcacaaaagttatttagtcattgaataacattttcrctaagtaggaacagcaatcatttttcagcatgaagatacagcgttgctttcacttttgatctgacaattattagaaagtgaactgaagaaaatgtcagtatgcagtttcctttaaagatgggaactcgctatgttgcctgcgctggattccaactcctggactcgagcaatcctcccaccacagcctctcaagtagctgggactacaggtgcactactgcacccagccagggtacctttctgataaacttaattcaacccaaattaacactttgaaatcttatgtaatggtatcattttttttttcctaagttggacaaactaatcaatgatacttgtttgttgatgtttgtatttttgatgagggtctgaactttaaaaaaaaaaaaatggcgatctgtcatacccaggcagtttgattccagagctcttactttaaccatgagattaaagtcattgaaagttatggggtaggtaggtgacatgatcagaattgtttattaagacgaatctggccccatcgtagtgtgggttaaaaaggtaagcagttttgctttgaagaattattttaaaaattctttttgcctagtaataatttgaattttcacatgtcatagcagcaaagattgttgagatttagtaatgccagtattaaccataccttgttgtggggattataaaattagtataactttctagaaggcattctgacaataagtatcagaattttaaatatgtattctctttgatccagcaattccacttctgggaatttattttaagaaaaatgctcagcaatgtgtgcacaagaatttttattgcagcaatttttttattaactaatttcgttatgtgcaaggaatatgctatatgtatattatacatatgttcattttattaaactatgaggcataataaaatgaacatccatgaacttaccacctgaactcagaacaagaatattaccagtataattgaagttaccagtttgcagtattattttacattagcaaaaaaatgaggaacaacctaaatgtccatcagtcagggatttataagtaatagtacatctagccgggcgcagtggctcacgcctgtaaccagcactttgggaggccaaggagggcggattacctgaggtctggagttcgagaccagcctggccaacatggtgaaaccccatctctactaaaaatacaaaaattagctcggtgtggtagcgcgggtctgtagtcccagctacttgtaaggctgaggcaggagaatcacttgaacccgagagacggaggttgcagtgagctgagatggcaccacggcactccagcctgcgacagtgagactctgtctcaaaaataaataaagaaataaagaaataataaataaataaataaaaaatagtacatctacatgatgaaattcaatatcggtatttaaaggaataaggttgaactatcatactttatcaattctgaaataccactaaatctaagataagccatctatttagtagcaattttttagcaggaagaaagtaaacataaagcttttattaataatagcatacatttattcattcaattgtataccattttcgtctgtcacaataaagtttgagtctcagccttattcacattcagaatctaggatccttctgaattacttcggttagttaatgcaacatcatgataacaggctgcttttcataatgctagttaattatcttaacctatattgtctttatgattgtgtgtataattttaaggtatattgaagaatactggggttttgcttgcctttcmtttttgcttacttagtttttttttcttcttcttaattgaattacctattgctggaaattaaacagcttcttctgaagataactccaaaagttttggcagacttttgagtctgtcttacctttgaaaattctgtgatcttgcttgaatttaataattacttatgcctttaattgcattgtctattgaatgacagtttgagtgcacaatactatgtcacaatggaatctttcagaacattttgtggaccaggcatggtatcatcccagtattttgggaggctgaggcaggaggaacacttgaattcaggagtttgagaccagcctgggcaacctagcaagatctccatctgtatttacaaaaataataatagctgggcgtggtagctcatgcttgtaatcccagcactttgggaggctgaggtgtgtggatcacatgaggtcaggagttcaagaccaacctggccaacgtggcaaacccctgtctctactaaaaatacaaaaattagccaggtgtggtggtgggtacctgtagtcccagctactccggaggctgaggcatgagaatcacttgaacttggaaagcagaggttgcagtgagccagaatacgacactgcactccagcctgagtgagacagtctcacaaaaaaaaaaaagtaataatgataaaagaaaaaaagaggccgtgcgcagtggttcatgcctatataatcccagcacttcgggaggccgaggcaggtggatcacctgaggttaggagttcaagaccaccctggccaacatggtgaaaccccatctctactaaaaatacaaaaattagccacacatggtggcacatgcctgtaattccagctacttgggaggctgaggcaggagaattgcttgaacccgggaggcagaggttgcagtcagctgagatcacgccattgcactccaacctgggcaacaagagagaaactccttctcaaaaaaacaaaaacaaaacagaaaaaaagaaaaaacattttgagcatcatatatggtgctgccaatgaaaatattacaattgtccgggtatggtggctcacacctgtaatcgcagcactttgagaggccaaggcgggtggatcacccgaggtcaggcattcgagaccagcctaggcaacatggagaaaccccgtctctactaaaaatacaaaaaattagccgggtgtggtggtgggctcctgtaatcccagctacttgggaggctgaggcagaagaattgcttgaacccgggaggcagaggttgcagtgagccgagatggcaccattgcactccagcctgggcaacagagggagactctgtctcaaaaaaaaaaaaagaaaataatacaattgaggtaacagagatttcgacttttatgtatggttaagttaggcatgtgcaatgactgctactctagaacttctctgctttggaggggagattggaccttgatttatttggaaggaactctcatccattgttttcattatcatactcggccacctgtgaagtgtgtgttgggtgagtattctctctttggaaggtacacatctttctcagctagcttattgctcatagaagttgggggcccaagggttgatcttaagatatactcaatttatttatttatttattttttctgggacagagttttgctctgatgcccgggctggagtgtagtggcacaatcacagctcactgcagcctcgacctcctgggctcaattgatccacccacctcagtctctccagtagctgggactgcaggtgcacaccaacataattggctgattttttctattttttgtagagttagggtctcactttgtttcccaggctagtctcaaacacctgggctcaagagatccgcccacctcagcctccaaaagttttggaattacaggcatgagccactgcacccggccctaacttttagaaatattaaaatgtagaaaagcatgcttagaatcaaacaaacatgatactggccgggcatggtggctcacacctgtaatcccagcactttgggaggctaaggtgggaggatcgcttgaggccaggagtttgagaccagcctcgtcaacatagcgagaccctcatctctattcaaaaagaaaagagagaatagaagataaaatatggctgggcgcagtggctcacacctgtaatcccagcactttgggaggccaaggtgggcggtcacctgaggtcgggagttcgagaccagcctgaccaacatggagaaactccgtctctactaaaaatagaaaattaaccgggtrtggtggcacatggcctgtaatcccagctgcttgggaggctgaggcaggagaattgcttgaacccgggaggtggaggttgcggtgagccaagatcgcgccattgcactccagcctgggcaacgagcgaaactccatctataaataaataaataaataaataaaagaaacatgacacctaactgtggaaagatgttcacggtattatgttattcttttgctaagaaattgggccctgattagtgacagaggcaagattcatgggtcctattatccacatgcccaataatctcttaatcaggtccagatatggttcctcttggtccagggacctgtgaagtaatgtgtcctgtgtgctgcgtgtgtgcgcactctctctctctctgtcactcactgtgtctcctctctatctcccttccttttcttttccccttactcactcaccgcagtacacaagggccrcagtaagcgctcttcctagaaaaagagaataatgggagataagcagcaaatgctgatctataatctgaaatctcctaggcagattctgtgtaagcaaccgggcctggaggtaggggagattggaccctgatttatttggaaggaactctcccatccattgttttaatgatcatccttgaccacctgtgaagtgtgtgttgtaccttccctttggaacgtacaaatctttttcaactagcttcttgctcatagaagtcggggacccaagggttttaaattttgaatagacaagaagatttttttagtatgaacttgagatgatttaagaaaaaaaaatttcattttgttttttgagatggagtctcaccctgtcacccaggctagagtgcagtggcacaatctccgctcactgcaacctccgcctcccaggttcaagcaattcttctgcctcagcctcctgagtagctgggactacaggcacatgccaccacgcccagctaatttttgtattttttagtagagatgaggtttcaccttattggccaggctggtctcaaactcctgacctcgtgatccgcctgtctcggcctcccaaagtgctggaattacaggtgtgaggcaccgtgcccggccaaaagatattttttttttttttaacaaaacagtttctttaaagttagtaagcctcttccgatctgtttggtttccttcagttctatgtgtcagtaaccacagtcgaagttcacatgtattggtaaactcatccaaagatttaagagcgtctattcctcctcctctcatttggttgtttgaggctattaggtttgatgggaaggctacgtctttaatatggtcttaaccacagaagcactagttagctaaggggtttcagtgggcatctgtgctcagtcttttaatcctgcctctaggggtctaggtacaagctgcttttccaatccttcaaggctttaaatttctgaactttttctattctcttctgtttttgctttcaaatctactacttccttcttgaactcatcatttacttataatacttgccaaatatctaatagcagccaatactcacttccaaaatcctctttaccaaactcctataacactacaaggtcagtagcctctttgtatgttcactgaccttgtagttgtatgaaaagttattataggcaacagcgttaccagatattttgccactataaaacatgatcctccatctttccagcctccggtatctgtttcctctcagcccttaatctgaccactaaggcagtatcactaaggcaggactgcataggtttttattgtagcagcacctcacttccaggtaccagttttctgtattaggataatgaaacactgaatatacagatggacaatggccagatcatatataaaactagaactctgacccatgacctatgtagcaataggcccagtcaggacttggtcagtaattaccagcttccctaatttttgtgccttcttccaattcgggacgactcagagaaagccaaatatgcttcccaaatcaaccacataggataccccgcttccagtgtcgacgaagagtcaaactctgtaaaatattttaagagatctattctaagccaaatatgaatggctattgccccatgacacagccctcaggagctcctgagaacatgtgcccaaggtgatcagactacagcttggttttatacattttagggagacataagacatcaatcagtatatgtaagatgtacattggttaggtccagaaaggaagacaccttgaagcagatggcttccaggtcataggtagattcacagattttctgattggcagttggtcgaaagagttgttactgtctaaagacctagaatcaatagaagggagtatctaggttaagataaggggttgtgggcaggcacagtggctcacgcctgtaatcccaacaccttgggaggccgaggcaggtggatcacgaggtcaggagttcaagaccagcttggccaacatagtgaaaccccatctctactaaaaatacaaaaattagcgaggcatggtagcgcacgcctgtaatcccagctactcaggaggctgaggcaggagaatcacttgaaaccgggaggcggagattgtggtgagccaagatcaagccactgcattccaacctgggcaacagagtgagactccatctaaaaaaaaaaaaaaaaaaaaaaaaaagataaggggttgtggagaccagggttcccattatgcagatagaatcaataggaaggaatgtctgagccaaggtaaggggttgtggagaccaaagttcccattatgtaaaggaagcctccaggtggcaggcttcagagataatacattgtaaatgtttcttatcagggttgattctytcctggatcaggcaaaaggcctgagaaaggaagggaattaacttcagaatgtagattttccgcacaagagacagctttgcaggactgtttgaagatatggcaaagaaacataatttggggtcaaatacttggatttctttcagggcctgccatctgtcatgtgatactatgctagagtcaggctggaattgggtatcttattgctacagagagtctgttttgtcagtcttaagatttgttttaatgttagtgctggtcagctgtgcctgaattccaacagggaggagggaataatgaggtatggccaaactccgcttcccatcatggctggaactagtttttcaggttaactttcaaatgctcttggctgggaggaggggttcattcagatggttgaaggacttagaattttatttttggtttacatcagttagcccacctccagtttcccatgccaacaacctacaatcagagcatacctgatgtcttccccctttttttagtataaagatttcccactcccctgcttgcctttgaatctttgccaagcacaagttgacagtggctgactccctacctatatagtaagatctaattaaatagcctttgtttgtttccatttgggcagtctttgtctattttcacaatgttattaggctgttttgtggtaacaaatccccaaatatcaatggcttaacacaacagaaatgtttctcttgctcagagttcagtgggagtcagtagggttctccatccagtggcttagggatccaccttccttccatattgtcaagccaccatctcagaatgtaacctacattgtcattaaagcaggaaaaccgaagcaaagtgacttttaactgcctcagtccagaattgagatatgttacatctgctcatccagctttggccaaatctgggaaatggagtcgagtactgtatgtgaatatagtctctgccagaatatatttaccaaaagcaattggctaaagatatacacaattcctccatttcagcgtttttgagatcagaagatttagattatcttacaattgaaattttttttttttttttttttgagatccagtctcgctctgtcgcccaggctggagtgcagtggtgcagtctcggctcactgcaacctctgcctctgtggttcaagcgattctcctgcctcagccttccgagtagctgggactacaggtgcctgccaccacgctcggctaatttttgtgtttttagtagagacggggtttcaccatattgaccagggtggtcttgtacaattaaaattgaaatgaatattcaaatgtaatgcttctgttatttcccctgataaatgaagtgacattgtttcatggaaataatagtttctttaaaatgaatcctgtgtattttaattgcatgtatttaaataagaatttgtagcagaaccattctaggatccagtcatttcctttcctttttttttcttttttaactctctattttggaaaacttcaagaatacacaaaagtaaagagaaaggccaaggcagtaggattgcttgatgccaggagttcaagactagcctgggcaacatggtgagcccctgtctctaaaaaataaataataagaagaaagagactagtacagtgaaccctcatatacccattactcagctacaacagttttcaacaaatgaaaacttctgtctcatttatatccccaaccccttcagcacacaaccaaattattttgaaataaattccagacattatttattttatccacaagtattttcaacatgtagatgatagaaatatgcttaaaataagttttcagttatttaaacctaaaacacattgttacacatataccagaactcagtcctttctctgacctttgtgcactcaatgttaggagttacatcagcctataggactagagaatgaatttctctggtccagcgttttctaatgtatactacatggaatgtaaatctcatgaaatgttatggggggaaaaggtaagataagataaatttgggcaacaatacattctcttcttgtcttgaattccttgcctcaagtgatcctcccacctgggcctctgaaagtattgggattacaggcgtaaacccccagaccccattgtcttctcataattccccatgattatgtaaaagaatgagatgtccggccgggcacagtggctcatacctgtaatcccagcactttgggaggccaaggcgggcagatcacgaggtcaggagttcgagaccagcctgacctacatggtgaaaccccatctctactaaaaatacaaaaattagcctggcgtggtggtacacacctgtgatctcggctactcaggaggctgaggcaggaaaattgcttgaaccagggaggcagaggttgcagtgagccaagatcaccccactgcactccagcctgggcaacagagcgagactccatcttcaaaaaaaaaaaaaaaaaaaaagagatgtccagttttgtgtattatgatcccattttggttaatagtagtatatgttagaatattcagtattaatagtgattattattagtttcctgtgtcttatgtaacaaatcactataaacctggtggcttaaaacaacataaatttatcctctcacagttctggaggccagacgtctaaaatcaaggcattagcaaggccagttttcttccagaggctctaggagagaagctgtcccttgccacttccagcttctgttggctgctgtcatccttggcttctgacttcatcatcacattgccttcctttttctgtgtgaatcagacctccttctgcctctcaaaaggacacttgtaattgcatgtgggacttactctgttaatccatgacaataacttaatctcagaatccttaatcacatctgcagcatccctttttccaaataagataacatttacaagttccagagaagattaggaaggggaatatctttttttttttgagacagggtctcactgtctctcctaggctggagtgcagtggtacagtcatggctcactgtagcctctacctcctgggctcaagtgatcctcccacctcagtcacctgagcagctggtaccacagtcacacacactgccacactcagctcattttttgcagtatttgtggagacggggttttgccatgttgcccacccaggctggtcttgaactcctgagctcaagtgatcctcccactttggcctcccaaagtgttgggattacaggcataagccaggaatatctttttttttttttttttttttttttttttttttttttttttgcgaccgggtttcgctcttgttgcccaggctggagtgcaatggcacgatctcggctcaccacaacctccacctcccgggttcaagcgattctcctgccttagcctcccgagtagctgagattacaggcatgtgccaccacacccagctaattttgtatttttagtagagacggggtttctccatgttggtcaggctggtctcaaactcccgacctcaggtgatccacccgccttggcctcccaaagtgctgggattataggagtgagccactgtgcctggctcaggaatatcttttgagaggccattattcagcccgctacagtgattctcactcttgaggaaggtgaattatgagggacttctactttttcctactgtatatatttatataaatacttgaatttttcaataaggatgcatgctgtatttttttaacagcagaaagaaggggcaagttacctgcatttgtaagttcaaatatttttgcgctacctactggtgaccaggtcccattatagggaaatggaagcaaatattttgacagaagcaaaactatgtttcttttctttttttcttttttttttctctctctctctctgtcagaatgatcttggaaatggtaaaataacaataataataaagtgatgattaacttagagttgaaacccaaagtaagtgagatattgaaagaatacctagatcctataaatgaattgcaatccagatactaaaagaactgacatgtaagattccacaacagtgttaatccttgatcatggagaaatggtaggtttcagaagacctaatatagaaagtatcttcacttttagaaagggccagaggtgaattctgcaaactttagactggcgagctaaatgttaagcttagaaaaactcattagtaagctattaaattaatattttgggaaagcttagaaaagaaaatgctttagggaccagcttccttcataaaaagcacatggtatgtccatcctaatttcatttacaaaataattatattattcatgtattattatgttatagatagaatatgtgcaattttcaggcaatgaaaaagttcatctttttttttttcaaagtggagaaatgtgagctgcttgtaatagagtttgattgattcatagctaatttagcaattgtgccatgagagcactgatttatgaggtgaagtcatcaggaaactacctctagtggctgctacagggcttcgtcatgtctcaggcctgctgcaaattgtgtgtgtgtgtgtgtgtgtgtgtgtgtgtgtgtgtgtataattaatttctataaatataaatttwaaaaaattaaaaatgggtatatttttaacagctttattaacatacaatttatatactataaagtttactcaggctaggtggggtggctcatgcctataatcccaccactttgggaggctgaggcaggaggcttacctgagcacttgaacccaggagttcaagaccagcctgagcaacatagggagactttgttttacaaaaaattaacaacttagctggacagggtggcatgttcctgcattcccagctacttgggaggcttaggcaggaggatgagcacaggaggttgaggctgcagtgagctgtgatcaaaccactgtactccagcctgagcaacagaatgagaccctgtctcaaaaaaaaaaacaaaaaaaaaacccctaagtttacccatttaaagtgtttttttagcatattttcacagcaataaattgtaatctaattttagaacagaaaataggttagttttgtatacagtatggtgaatttgctttttttgcttaggatacatttacttatctgtttatatctgtacattatatagaactacatcattctgccggccacagtggctcacgcctgtaatcccagcactttgggaggctgaggtgggtggatcacctgaggtcgggagtccgagaccagcctgaccaacatggataaatcctgtctctactaaaaatacaaaattagctgggcacggtggtgcatgcctgtaatcccagctattcgggaggctgaggcaggagaatcacttgaacccgggaggtagaggttgcagtgagccaagatcgtgccattgcactccagcctggggaacaagagcgaaactccatctcagaaaaaaagaactgcatcattctttttgacttaratgtatattatataaatgtactatgaattacttgaacaatcctccactgatgaacatctggactggtgtcaacttttgctgttataaatgatgttgcgaggaacagcctacatcttcacatacttgtgtgtatattcctttacttgtgttgcattgttcctcttaatcctagttcaatttattagatgttgataaccactttatgtctcaggagtcagtttcagagaattaaatgtccaagtccacattgctactaattaacagaacaagtaatttttttttttaatgtagacagggtctccctatgttgcccaggctggtctcaaattcctgagctcaagcagtcctcccttcttggcctcccaagtgttgtgattataggcctgagccaccatgcctggcccctgaacaagtacttgaatctcattttttgttgctgctttccattacaagtgctgtgcttttctagtactcagagaagtactgtatatccagctaagccattcatgagattcatccacaagatccaaccacctcccaccagaccccaccttcaagagtggggactaaagttcgacatgagatttggtggggacacagatccaaaccatatcagagtcctagttcatagcttggaaaataaactcaggcatctgtttttgaagcataaagggaccttctggaatagtggtttaaaaatctttttaaagtggaggattgcagtggctcaagcctgcaatcccagcactttgggaggccaaggcaggtgaatcacttgaggccaggagttcgagaccagcctggccaacatagtgaaaccccatctctactaaacgatacaaaaattagctgggcgtggtggcagacacctgtaatcacagctacttgggatgctgaggcatgagaatcacttgaacctgagaggcggaggttgcagtgagccaaggttgcaccactacactcctgcactctagcctgggtggtagagcaagattctgtctcaaaaaaaaaaaggctgggcrcggtggctcacacctgtaatcccagcactttgggaggctgaggtgggtggatcatgaggtcaggagttcaagaccagcctggccaacatggcgaaaccccctctctactaaaaatacaaaaaaagttagctgggcgtggtggcgggtgcctgtaatcccagctattggggaggctgaggcaggagaattgcttgaacccaggaggcagagtttgcagtgaggcaagatcgcrccactgcactccagtctgggtgacagagtgagactccatctcaaaaaataaaaataaaaaaataaaaataaatttaaagcaacaatacccttctaaagaaatcttgaagtctgatttgtaaaatttaaaatttgatcctctaggtgaagttgttaataagaggttacctgttttattgttcacttaataatccctggcatttgtataaatgcttrgtatgcttactaaggaactttttttttttttttaaatcatcatagctacgatttgaggtaaatctaggttataggctaggaagtaggcatggagagattaagtaacttgtcctgaacccggagtaatccttaatggagtcagaactataacctgaatctcttaacccctatatcaatggacttttcctctaatacatggtactgctgtattaaccactttatagctttcctttctttctttcttttacagagttaattatttatattgtaaagaattttaacagtcctggggacttccttgaagsatcattttcacttttgctcagaagaaagctctggatctatcaaataaagaagtccttcgtgtgggctacatatatagatgttttcatgaagaggagtgaaaagccagaaggatatagacaaatgaggcctaagacctttcctgccagtaactatactgtcagtagccggcaaatgttacaagaaattcgggaatcccttaggaatttatctaaaccatctgatgctgctaaggctgagcataacatgagtaaaatgtcaaccgaagatcctcgacaagtcagaaatccacccaaatttgggacgcatcataaagccttgcaggaaattcgaaactctctgcttccatttgcaaatgaaacaaattcttctcggagtacttcagaagttaatccacaaatgcttcaagacttgcaagctgctggatttgatgaggtaagaatgtttaaagacaaaagaaaggattcttcttaccttatgctacataacactttttgggtgataacatgccaaaatgtttcctttgggagaatttaaccctgtatacacatttatgtattctatcagcaaagaatgttacgtttataattccattaattactattaaaaataatatttctttagtttcttctgtgatatgtatcactaaattctggagtttctggaatttaaaaggccagatcatgaagtcataatggaagtgcagttgaagaaagccataggtgagggtaggggaaggacatctgtttgtgtgaaatacaagcttggtgaactaagtggctgttggggaaatgatagttccaaggatatgaaatttaactttatagtagggagaaagaattatagttaagagtttgtgtaagcagttgtgttctcaggcccaaatcttaaattcacaaaaactaacaaaatttcacttcaggctaactgccaagtctttaatatttctcttcagaattcattttgaagttttttcataacccatatatttaatcatttcatttaggttattaatagaattttcttcttatgataacataccttgtaagcatgaatattttaggtgtcaggagtcattttagatgggcaatgtaaaatttaagtaaatgtgaataatcaaaagttaggccaggccgggtgcagtggctcacgcctgtaatcccagccctttgggaagccaaggtgggtggatcatctgaggtcaagagttccagaccagcctaaccaacatggtgaaaccctgtctctactaaagatatcaaattagctgggcatagtggcacatgcctgtaatcccagctacctgggaggctgaagcaggataatctcttgaacccgggaggcagaggttacagtgagccgagatcgcgccattgcactccagcctggtcaacaagagggaaactccatctcaaaaaaacagttaattacatttttcaaaattatagtaatgttttttctgattgcaaaaatattacctattttctgttaacaatttaaaagtgtaaagaagaaactgaaaattatatttagcttcactgtataaagataactactcttaaaattccttcactgtttgttttttgttgttttgtgtgtttttttggtggccgaatttccatatatatctgtatttaatttaaaaaatgagaacctaagtatgcattgtagtaaaggatttgaaaagggagatttacaactaaactagaaggaaaaaaaagttttattttttatattttttgagacggagccttgctcagtcacccaaactggagtgcagtggtgcgatctcagctctctgcaacctctgcctcccgggttcaagcaattctcctgcctcagcctcccgagtagctgggactataggcgcccaccacgacgcctggctatttttgtatttttagtagagatggggtttcaccatgttggccaggctggtctcgaactcctgacctcgtgatcagcccaccttggcctcccaaagtgctgggattacaggcatgagccaccacacccagctgaaaataagaaattttatttctggcacattctrtttacttatttgattaatattattttctatcatttttacacttaagtgttctaaaaatactggatttggaccaggaaatagagagaggaggaggagggaaggacctgggataatgtttttctcgttagtatttggaggattaaagaaatggcttgagtggagattgtcccaagcactttcttcctaatcccttagccaaaaggcaaagtataattattgatcttattctttccttttacatattgctaagcaaagagaagttatgaaatcacatagctataaaggccccaagtggtaatgtgttatgtcagataagtcacccagtaatatgtatttatggagttcttactatgtgtgcaccccacccatcagtcaggatagtgacatggcctatacctttaaggtaattaaaagttctttctaataaagacagttttaggaaatctaaggcattggtcaatgctctattcattattggtaataataacaataattggtttgtattacaaagatatgtttgtgctttttttcattgaagtgctactacacaaatgatagctttattgtaattacacatttcaaattgtcacaagattgctttattgaaagtatttagacatttatcattccctgtttgtccaaataatgaagtatggtgttatttatttattttattttttttttttattaaaaagtaaactttaatgtcaaaatgcaaacttggggagggcagaaagatcacacacaaggctgtcacttcacacttggaggattgcacagcggccaggcagaggcgctcttcacttcccagactgtgaggtggctgggcagaggtgcacctcacttcccagacagtgcagaagtatggtattatttataccaatggtgatataaagattctggcagtccacttctacttccttgaatcactcattctggtagcatcctattatattgtagagtttatcttgttcaagatcctaacttggtatttcaaaattattatctagttttcacttcattcttttttatcatttcagaaaccctaacctactctttttattagctatgccaagttcaagatagtgccttttttttttttgagaatgtgtttctggtgaccctgtaaaatgaaaagctcaaatatttcaagattaattttctcataggaataaatgttaaataggattgatgcattcttggagcacataatacaatcactggggtatatttttgcttataagcatgaaaaacaaaggcataattatgtggacatattttcttatcacataagacttctggctaggcatggtggctcacgcctgtatcctagcactttgggaggccaaggcgggtggatcacttgaggccaggtgttcgagaccagcctggccaatatggtgaaactccgactctacaaaatatatgaaaaaaaaaacattagctgggcctagtggcacatgcttgtagtcccagctacttgggtggctgaggtaggagaatcatcacttgaacctgggcggcggaggttgcagtgggccgagatcacaccattgtactccagcctgggcgacagagtgagactctgcctcaaaaaaaaaaaaaaaagacttctggctgggtgtgatggttcactcttgtaattccagtgctctgggatgccaaagcaggaggattgcttgaggccaggagttcaagtccagcctgggcaacatagtgagaccctgtctctacaaaaaaaagttaaaaatcagccaggtgtggtggcatgttcttgtagtccccaaccacttaggagggtgaggtgggaggatcactcaaacccaggagattgggtcgcaatgagttgtggttgcaccactgcactccagcctgggcaacagagcaagaccctgtctctaatgggaaaaaaaaaaaaaaagactcccattccaaagttactgatttgagcgttctttttcacactggcactaacacctccacttaatgaatgcttggttgatgtttttacagctataagaaatattgtaaaacatagcaataaatattaaaatataaaggttagcatagtaatcaccagaatcacaaggctgaaattctagtgcatttaacaagaatatgggccgggtgtggtggctcacaccggtaatgccagcacttcaggaggccaaggtgggtagatcacttgaggtcaggagttcgagaccaacctggccaacaaggcaaaaccttttatatatttactaaaaaatataaattagccaggcgtgtttttgggcgcctgtaaatgccagcttctctggaggctgaggcaggagaactgcttgaacccgggaggtggagattgtcgtgagctgagatcacgccactgcactccaaccccaggcgacagcgagtctccatctcaaaaacaaaaaaaagaaaagaaaaatgattcccacaatattggaaaagggtagtgggtgctaattttcttaccaatggagatgttactgctgtgtaataatagcataaatacatatagagttcacttgacttaaccagttttaaaattaaacactccctgatgaattttaatgggtgatttctattattttacatttacacatatttggttttaacaaaaatctaaataataatgcttttagcaagatagtgattcagttaattacgattagctcaacgtcttaaagatttcagagcctaggactcttatgaatatcttaaattttacttcttggtggcaacatgctctagcacaggtgtcatatctgttgcctaggaaacggggtcgaggaaggaccagtacctagataaggcaggcatggcaaaatttttatggcaacccttgctgcttccaacaaaatcagtaactttttctaagaaagggagaaatgaccttaggtaggcaataagttcttaccacatcctttctttggttggtctcacattcttctcttatcatttcatataggaggatcatctgtcagtagcctgttcacccattagtcttactaagccatttctcatttaaaaatgtcgtttgaaatactgaatcctctaggacaagtaagtagttgcctccctcttgaaaaatgcatgtcaacatactttctgcatgatagtgagtgatttatgtttatataaaacataaagtacaaggagtggaagagagcagccaacattttagctccaggcactgtgcttggtagtttacatgttttcttatttaatcctcacatcaaccctatgagcctattacaggcaaagacactgagcctctgaaatgtgaaataatttgccaggtgtcactctactttacagagctgctggaactcaaactcacatctgtctgattccaaatcctctgtttttttcatcgtactatatagcctcctaaagtctttatcacataatcatatatagtctaagtatcttcttttgtcttatatttgtattcctgtaatatagttctctgaaaacgtaatctctaagaggataagagccagaactactatrcacaatggcaatgtgcttaataaaataccaagatactcatataaaaaagtagttctttttttttttttttttttttttttttaagacggagttttactcttgttgcccaggctggagtgtagtgacgtgatctgtactcactgcaacctccacctcctgggttctcctgcctcagcctcccaaacagctgggattatagacacgtaccactacacccagacaattttatatttttagtagagatggggttttaccatgttggtcaggctggtctggagctcctgacctcaggtgatctatccgcctcggcctcccagagtgctgggattacaggtgtgagccaccgcactcagcccaaaagagttgtttctgatattttgattgctacctttttaacaatctgatagtctctgattgtttatataagaattaggaagctgggagcagtggctcacacctgtaatcccagcactttgggaggccgaggtgggtggatcacctgaggtcaggagtttgagaccagcctggccaacatggtaaaatgctgtctctactaaaagtataaaaaataagccaggcctggtagagcgtgcctgtaatcccagctacttgggaggctgaggcaggagaatcgcttgagcccaggaggtagaagttgctagtgagccaagatcgcaccattgcactccaacttgagcaacaagagcgaaactccatctcagaaaaaaaaaagtaaaaagaattagaagtaatcagaatcatgttgctatgattgtacccagagaagttgttaatcctaattcaagccaacaatggtgtgttgaaaaaaataaaaatttaaaaatactttaaaaaaagacgttaatcctaggaggaaatagaaatatgttacataaagatgaaaatgctaaagaaacatttggaagatttgagggttttgttttctttcttttttttttttttttccaagacagcatctcgctctgttgcccaggctggaatacagtggtcatctcagcttgctgcaacatccacctcccaggttcaaacaattctcatgtctcagcctcctgagtagctggaattacaagcgtgcgccagcacacccagctaatttttgtgtttttttgcagagactgggttttttaccatgttggtcaggctggtcttgaactcctggtcttaagtgatctgaccacctcggcctcccaaagtggcttgagccactgcgccctgcctgttttagttgagattttgtgcggggtttttagtagctacaaacagaacattaatatcatggtttggggctgtgttcttcataattatggatttctctagtggaactcatagtgttctttcccttgtattattgtaagatttaaattttgtttctttttttttaaacttcaattcatatcaggatatggttatacaagctcttcagaaaactaacaacagaagtatagaagcagcaattgaattcattagtaaaatgagttaccaagatcctcgacgagagcagatggctgcagcagctgccagacctattaatgccagcatgaaaccaggtgattaatcaaatattttattttctcatctcttcttttactgtgtagtttaaaaatactgaagtctatcaaatcttccttcttagaaattgtaaaagcatcccagtaaatgaaagtctcaaattaagataacattataatgttataccaaaatgaatttaaggatggggtcctcacatttaaaagttaatagataattctggtaagcagcagtctagattgagatctatttgattggtaatactgcagctgaaatatgtctattttccctccaaatcccatcattcagactactcttttttctttttatatatttttttcatattatgggagtaaaatatgatcaacatagaatatttagaaagcaaatacaaacatcgctgttaataacaatattttggtgtattttgtttcccagtcttttttcctgtgggaaaccagaataggtttatctatgcgtattttgattcttgttgtttaagcaaaaaatgggaacatactaaaacctacttttttcacttaatataccatgtacaattttacttgttattaaattttctacagaataattttactagccacattaaaatagacttatttgctgactgcagtggctcacacctataagctcaatactatgggagactgatgcgggaggcttacctaagcccgggtgatcctgccactgcactccagcctgggcaacagagccagaccctgtctcaaaacaaacaacccaacaaaaaagatgtatcatatacttcatttaactaatctcccatttttgggcatcggctttatttcctttattatttgccattatagacagcactgcagtaattacccttatagctaaatctttgtacatacctaatgatttcctaaaagtaagttttagaaaacttaaaaaacgttaaggcttttcatagatattgctgtctagaaagatagyaccaatttattattttatttttttatttttttgagatggagtttcactctgttgcccaggctggagtacagtggtatgttctcagctcactgcaacctctgcatcccaggttcaagcagttctcctgccccagcccacaagtagctgggattacaggtgcccgccactatgcccggctaattttttgtatttttagtagagacggggtttcaccatgttggccagactggtcttgaactcctgacctcaagtgatctgcctgtctcagcctcccaaagtgctgggattacaggcgtgagccaccgcgcccagctagtagtaccaatttatattctccctatccgtttactatgagaatgcctatgtttgtaaagcctcggtattattatttttgtctgtttaatggttatggaaacaccatcttattttacatttgcatttctttgatcactgcatttgtttattggtttgttttggtgtttgtttgtttgtttgtttgtttgtttgtttttgagatggagtctcactctgtcacccaggccggagtgcagtggcgcaatcttggctcactgcaacctccaccccctgggttcaagtgattctcctgccacagcctgagtagtagctgggattataggcacctgccaccgtgcccagctaatttttgtatttttagtagagatggggtttcaccatcttggccatgctggtcttgaactcctgacctcgtgatctgcctgccttggcctcccaaagtgctgggattacaggtatgagccaccgcgcctggcctattggttatttttcattgccactttacctcttttaatttttttttttttttctctttgagacagagtcttgtcacccaggctggagtgcagtggcacaatcttggcttactgcaacctccacctcccaacctccgcctcccgggttcaagcagttctccagcgtcagcctccagagtagctggggttacaggtgcacaccaccatgcttggctaatttttgtatttttagtagagatagggtttcaccatgtagatcaggctggtctcgaactcctgaccttgttatctgcctgcctcagcctcccgaagtgctgggattataggcgtgagccaccacacctggcctgtctttgtgtcctggtgcagtggcttatgcctgtaatcccagcactttgggaggccaaggcgggcagatcacctgaggtcgggagttagagaccagccagaccaacatgaagaaacctcgtctctactaaaaatacaaaattagctgggtgtggtggcgcgtgtctctaatctcagctacttgagaggctcaggcaggagaattgtttgaacccaggaggcggaggtttcggtaagctgagatcgcaccattgcactccagcctgggcaacaagatcgaaactccctctcaaaaaaaaaaaaaagaaagaaaaagaaaaagaattgatttataagagggctgtagtcattcttcctattcaacaaatttttattggtcaaccactgtttcaggctctttgttctgcattgggtaagttcttgcccttttgtggagcttagctagtaagggagattaaataatcacccagatacatgtagaattacagctatatatggtgtgaatgaagagaggagagttacatggtactgtggactcatataatagtgggattttttttttaaccgcatcaagaagttcagaaaaacccttcctaacaaactgataataaagctgatatctgaagaagtacagagttaatgggaatgggtttagtgagtgtccctttgcatggctgctttggcagattctgatgccacaaaaaaatgaaaatgtttggagcactgaacacaggattgtgaaatgtgactggaaaagtccataggggcctgactctgcagaactgtttattaattttatgctaagagcagcagaaaggtatagaagtgtttcaagcagggtaataacattattagatttgtatttcagaaagatggctgcaatggatgagaatgggttagagaggtgtgaggatagatatgaggacaggtgtgataggaaacacagtagtttgtgagggtaatttgggcttgggcgatagcagtgaagaaaataaatgaattaagagggatgggagtggtaaaattgacaaggacttggtaatagattacatatggtgcgtgatggtagaaggggataacttaggtttttggcttagaaaaatagatggatgataataccctacattaagaaagggaatgttaagagagaatggaattgggtgggaaagatcataaatctggctatagttttccaagtgaagatgtcaagtagggaggtggggatgtatgtatgagccatacatatgaaataggtcacctaagggatgttacatagacaaaataataagatggcctgcaaccaagcttattatttaatagctagtaggaaggggtaaacctgcaaaggggacagagaagaaataggtgaaaaggaagaaaaccaataaggttttcagtgttttggaagccacagtaagagagtgtttcaagaaggggagggaatggtcaaaatgccaaatactgctaagaaagagatactgaccaagatgagagctaaaaaataatcttgttgactttagtgacatggtgtattagtttgctagggctgccataacaaaataacacagactgggtggcttaaacaatgaagatttatttgagtgctggagactagaagtccaagattagttactggcaggtctagtttcttctgaggccattctccttggcttgcagatggcggccgccttgctgtgtcctcatatgtttgtccctctgcatgtgcatgtgtctggggtctccatctccatgtccarattttctcttacagggatacaggtcatactgcattaggacccaccctaatgacctaatttaatcttaattaccaaatacagtcacatcttgtggtactggtggttaggacttcagcatatggattgggggttcagcaaatgaggtaacttgtcatgtcctgggagcataattcagattggagtgggttgaggactaaataggatatgtagtagtaaaaaaaaacaaggtataccttcaagaagtgtttctggaggagagagtgaggatgttagcaagagtagtgcttctcaaaccatctatggtgatttttcaaatttccagttcatcatgacttcaattcataattttataacatacaataaattattagaaaatgaaaatttaagtgccacacatggtagctcacgcttgtgatcacagcactttgggagactgaggcaggaggatcacttgagctcagaagttttagaccagcctgagcatcatggtgaaaccctggctctacaaaaaattatccaggtttggtgacatgtgcctgtagtcccacctactcaggaggctgagttggggggattgcttgtacccagaaagttgaggctgcagtgagctgtgattgcgccgctgcactccagcctgagcaatagagtgagcccctttctcaaaaaaaaaaaaagaaagttaaaattttaaatgacataaaaatataagttgaggctgggcacagtggctcacacctgtaatcccagcactttgggaggctggggcgggtggatcacctgaggttgggagttcgagaccagcctgaccaacatggagaaaccccgtgtctaataaaaataccaaattagctgggcgtggtggtgcatgcctgtaatcccagctactggggaggctgaggcaggagaatcacttgaacctgggaggcagagattgcggtgagccgagatcgcgccattgcactccagcctggtcaacgagaacaaaactccgtctcaaaaaaaaaaaaaaaaagaaaaaaagaaaagaatacatatatgtatatgtttaaatagtttatcattgtatttaacagacrtaagtttattctgtcaaatttctataaatgtttctcaatcctcactctccatttccatacttaatctcatgtcagtttgtaatatatcttatgtcagtttgtggaccagcaccagataacactttgaggtagagctctatatatgggagtggaaggagagtcttatttttttttttttaagtaaagacttaaacatgtttaaaagataattggaagactccagttaagaggatgaaattaaatattcaagagatacttgaggatcaagtaagcttcctgagaaactgggaggaataggatccaaagcatagcatgagggactattagccttagatagaggaacagtcatttttctctaacagcagcagacgggcctaggttatgtaaggaagctaagggagtactttctgatgcctgctgttttctctgaaatagaaaaccaagtcattttctaagagtgatgagtgaggactagagcaggcagtttgaggagactgaggactggcaatagtggagactatagaaagagtttcctggtggtgctgaggccattgaaggatgctgatcttgaattatagtaaaatcagtctgcccactgcatcactttttcttttaagttaaaaacaacaacaaaaaaagatagctggaattatccctgactggagtttcactaaacaagtacaaaataagatcgataatattgctaaaagggtaattttttttttttttttgagacaggcatgagccaccgtgcccagcctgaaaggataatttaaatccttaatcagagcgtactcctcctctacctttatcggcttcttattcttccaaattccttgtccatggcctggctacctcttagatcccatccaataccactttcccccttcatttactgttctacagccgtactgggtttattttgttcttggaaaataccaagctcccacctcaggacctttatgcagtcttttttttttttgagacaaagttttgctctgtcgcccagactggagtgcagtggcgctatctcagctcactgcaacctccgccccctgagttccagtgattcttctgcctcagcctcccaggtagctgggattacaggcatgtgccaccatacccagctaatttttgtatttttagtagagacagggtttcaccatgttggccaggctggtcttgaactcctgacctcaggtgatccgcccacctcggcctcctaaagtgctaggattacaggcttgagccaccgcgcctggcctgtgctgtctgaactcatatattatccctcagaggagcccttatccctttctagcctcctgttactctctatcatttgatgccatttatgtttcattcacagagcatttatcataccctgaagttacctcatttatttattcacctgctttgtgtctggcttctccttcgagaatgtaggttcatgggccacggatgttctgttgtttaccaatgtcattggattgcttagagcagtgcctggcatatagttgatgcacaataaatatttaatgaacggcccgggtgcagtggctcacgcctgtaatcccagcactttgggaggccgaggtgggcgggtcacgacgtcaggaattcaagaccagcctggccagcatagtgaaaccccatctctactaaaaatacaaaaaattagccaggcgtggtggtgggcgcctgtaatcccagctacttgggaggctgaggcaggagaatcatttaaacccgggaggcagaggttgcggtgagctgagattgcgccattgcattccagcctaggtgacaaagcgaagactccatgtcaaaaaacaaacaaacaaacaaaaaacccaaatatttaatgaatgaataaaaaggaggtgatctcagagaaaaagaatagagagggaagaacaaagtgatagaccatggatttaagttggataaaatgtgtcataaagaaagaggaaggccaggctaggcaaggtggctcatgcctggaatcccagcactttgggaggccaagacgggcagatcatgaggtcaggagatcgagaccatcctggctaacacggtgaaaccctgtctctactaaaaatacaaaaaccttagctgggcgtggtggtgggcgcctgtagtcctagctactcaggaggctgaggcaggagaatggcgtgaacccgggaggcggagcttgcagtgagccgagatcgcaccactgcactcccagcctgggcgacagagcgagactccgcctcaaaaaaaaaaaaaaaaaagaggagggtcaagtacggtggctcacgcctgtaatcccagcactttggaggccaaggtgggaggattgcttgaagccaggagttcgagaccagcctgggtatattagggagaccccgtctctacaaaaagttttaaaaataggctaggcttagtgtctcctgcctataatcctagcattttgggaggctgaggaaggaggatcacttgagcccaggagtttgagaccagcctggacaacttagataccatctctacaataataaataaataaaataattagctgggcatggtgatgcatgcctgtaatcccaactacttggaaggctgaggtgggaggattgcttgagcccaggggttcaaggctgcagtgattcatgatcatgccactgccctccagcctgggtgacatcaagactgtctcaaaagaataaaaataagaaaaaggaggactgataaagtaggggattaaccttggagatgttggctggatgcggtagctcatgcctgtaatcccaacactttgggatgctgaggtgggcggatcacctgaggtcaggagttcaagaccagcctgaccaacatggtgaaaccccatttctactgaaaatacaaaaattagctgggtgtggtggcacctgcctgtaatcccagctacacagggggctgaggcaggagaatcgcctaaacccaggaggcagaggtttcgctgagccgagatcatgccaccgcgctccagcctgggcgacagagcaagtctctgtctcaaaaaaaaaaaaataaaaatcttggagatcttggtgaggttgctacttaataaagtttaaaaacttttgcagtaggagtaaacagaagaagtagttgtggtctgggagtataagcgtataaaccttaaagtagttattctgaaacaagagcagatatgagtaataccaaagtttgaaatacaatcatgagaatgatacttgatgtggagtggaagaggggacgtcaagaagctgagatatgagggcaatagatggtttatcctcgtggttattgaggttacaggatgaaggcagggcttagggtagactgaatgctgaagctgtggctgaatgaaatagagcaaataggcaggagctcattaggtgagaggaattagtgtggcctcccacatagcatgaagttcaaaagagctggctttttaaaaggaataatatcaacctgtaagaacaaatgttagaaccccatctttaggccaggttatttttaaaggaaaccttaatttcaaagggctgaaaggaaagtagtatcagcagaagaaaaccagcttcaaggaggtggcaggaaagcttggaggagaggttactgataaggcacatttgctggctgtggagccgagtggatccggagggcatggtggaaaggttcgggaagtggaagaacatggagagctctgtgggaggcgcagaacaacaggggtgactgtatactctaaaagctgaatgagtgacatggtgtatttggcctcagctggcctctgaggaaagtgagaaagagcctgatggccagaggacttgtccagtttatccggaatgataatgttccccaaacattatttactcacttgcttttcgtctggctcctgcttcgagaatgtagacccaaaatgctgtccagcctagatgaaagggagtgttaaactgaacattatgaacatttaccacattttaccactttttttctcagatgtattgttagatatatttttgcccaggatgatgttgacctttcaaatttattagtattcttttttgttttgtttttaatggtaatgagtgtttgtatttagatctctacttttgtcatgcctgggaagacattcgcaagaggtaccccaatactattgaatggtcttttgtttttttctagtgcttacatgatttcatctttaatatttaaacctttagtctttctagaatgtatatatgtattgtctttataccagtgtatcttgtatatttttcctaagtggctggactattctattttaaatacttctctttttttggtattgtatttttttttttgcttgttttattgatttggaaattccgttaaagacagtttctgtaaaatctatactttatttaatattcagctaattatagcctactatctttttctgttttaaaaaccatattaaaaggccaggtgcagtggctcacacctgtaatcccagcactttggaaggcttaggagggcagatcacttgaggtcgggagtttaagaccagcctcgctaacatggcgaaaccccgtctctactaaaaatacaaaagttagctgggcgtggtggcgtgcgcctgtagtcccagctactcaggaggctgaggaaggagaattacttgaacccgggagacggaggttgcagtgagtctgtgccactgcactccagcctgggtgacagagtgagactttgtctcaatttaaaaatatagatatatattaaaatatatttaaaatcagtagagctatgaaaattacaaatagatacgccctttggcctaataatgctacctctaataatttatctacaaatatacatgcatatatatgaaattatatctcttcaaaaatatatatatattttttttgagatggagtcttgcactgtcacccaggctggagtgcagtggcacgatctcagttcactgcagcgttggccttcttggttcatgcaattctcctgcctcagcctcccgagtggctgggactacaggtgcacaccaccacgcctggctaatttttttgtatttttagtagaaatggagtttcaccatgttggccaggctggtctcgaactcctggcctcaagtgatctgcctacctcagcctcccaaagtgctgggattacaggcgtgagccaccacgcctggtcaaaaataaataaaattctaaaaggtaaaaggaaaccacttagtgaaattttatttttataactcttttttttctttttttgctaaattgagccaaataacatgtattattacctcacatatcatttttttgtagtgagaatacttcaaatttactctcggcaattttcaggagtacaatacgttgttattaactacagtcaccattttgtacaagagatcacttgaacttttttatatttttataattcttgaaagagaattgagtatcatttgtaatatcagaattgcaagctaaggttttcaaaaattagaggttaaaaacatgattcttttttctctttatctctcttataaccatagggaatgtgcagcaatcagttaaccgcaaacagagctggaaaggttctaaagaatccttagttcctcagaggcatggcccgccactaggagaaagtgtggcctatcattctgagagtcccaactcacagacagatgtaggaagacctttgtctggatctggtatatcagcatttgttcaagctcaccctagcaacggacagagagtgaaccccccaccaccacctcaagtaaggagtgttactcctccaccacctccaagaggccagactccccctccaagaggtacaactccacctcccccttcatgggaaccaaactctcaaacaaagcgctattctggaaacatggaatacgtaatctcccgaatctctcctgtcccacctggggcatggcaagagggctatcctccaccacctctcaacacttcccccatgaatcctcctaatcaaggacagagaggcattagttctgttcctgttggcagacaaccaatcatcatgcagagttctagcaaatttaactttccatcagggagacctggaatgcagaatggtactggacaaactgatttcatgatacaccaaaatgttgtccctgctggcactgtgaatcggcagccaccacctccatatcctctgacagcagctaatggacaaagcccttctgctttacaaacagggggatctgctgctccttcgtcatatacaaatggaagtattcctcagtctatgatggtgccaaacagaaatagtcataacatggaactatataacattagtgtacctggactgcaaacaaattggcctcagtcatcttctgctccagcccagtcatccccgagcagtgggcatgaaatccctacatggcaacctaacataccagtgaggtcaaattcttttaataacccattaggaaatagagcaagtcactctgctaattctcagccttcygctacaacagtcactgcaattacaccagctcctattcaacagcctgtgaaaagtatgcgtgtattaaaaccagagctacagactgctttagcacctacacacccttcttggataccacagccaattcaaactgttcaacccagtccttttcctgagggaaccgcttcaaatgtgactgtgatgccacctgttgctgaagctccaaactatcaaggaccaccaccaccctacccaaaacatctgctgcaccaaaacccatctgttcctccatacgagtcaatcagtaagcctagcaaagaggatcagccaagcttgcccaaggaagatgagagtgaaaagagttatgaaaatgttgatagtggggataaagaaaagaaacagattacaacttcacctattactgttaggaaaaacaagaaagatgaagagcgaagggaatctcgtattcaaagttattctcctcaagcatttaaattctttatggagcaacatgtagaaaatgtactcaaatctcatcagcagcgtctacatcgtaaaaaacaattagagaatgaaatgatgcgggtaaaaccttttaaaatgtccatttttatacttaatcatctgtttgcttggtgtttattttraaatattgtgtccagtatttttctttctttttatagctaaataaaatatattatcagttatggaatttaaaagtgaataaatattaaagtacttttgattgtagcattttattttagtatttcaakatttattcagaatttcctataataaaatctcgtgtaaattaagaaaaatataatttgcggtatacagtttaggtgtacataatacctttatatgaaaattggaggaagggttgtcttctaggcttcatacaatatcttacaacatttaaaaataaactagaaatatgtgggtctcaggctggggcatgggggctcacgcctgtaatcaaagcactttggaaggctgaggcaggcagatcatgaggtcaggagatcgagaccatcctgcctaacacagtgaaaccccgtctctactaaaaataccaaaaaaaattagctgggcatggtggcgggcgcctgtagtcccagctacttggaaggctgaggcaggagaatggcgtgaaccccggaggcggaggttgcagtgagccgagatcgcgccactgcactccagtgtgggcgacagtgagactccgtctcaaaaaaaaaaaaaaaagaaaaaagaaatacgtgggtctcatctcttgatatacttataaaacatttacttttagaaaatttggagtttataggtttattcatcacatatatcttattaaaaagtgtaaagaagtttccttcagttatatctcccttctcatttcatttttataatatactggagaaaaatgtgctaaaattatttagtgaaactatactaaaagggagatcagagtaagtaaacacactttaatctgtgttgtcattccacatagatctctagatattaaggtagtacgatcatcatttttttttttttttgagacgacatctcactctgtcgccaggctggagtgcagtggcgccatctcagctcactgcaacctccgcctcccgggttcaagcagttctcctgcctcagcctccccactagctgggactacaagcgcccgtcagcacgctgagctaattttttatttttagtagaggcggggtttcaccatgttggccaggccggtcttgatctcttgacgccatgacccacccgcgtctgcctcccaaagcactgggattacaggcatgagccactgtgcctggccattattgtttttatcatatgcttagagttcaaagatttgactcctaatcttacatctgtcactcacaatccaagaggcttaaccttgtgattaaacacctttatatacttgaaccattcttttaaaatgattttaataaatctgattttacagtattgttatttctattttatattttattaaatgagaaataccataataatttctatgacttatccatattttaattcttaggatttcttactaaagtctgcctatgtgtattttcttagtttatttttcctttttcctcttcactttcactaatagctgatttaaacttttatggtgttggaagctttgctgacttctgtagtctccattactgtgtaggcaagtaagattttaagagaaacagttctgaactaagtctggcatgccatccttcttaaaagattttgcatgcaaatgtgaatcctaacagaagcatgtggttgttctattttagtcttgtatttctagaattagaccccacttttccaactggatttcttttctatttaaaccctttaattaattctttattaattagccaaaatgtttctcccttctaaatccaggcattccatatctataatacttagaagttagtttttgtttttaatctattttttgatattttcatgagtcacactgaagtattcctaagtatccaaaggatatcttgtaaacaaccaggttgttcttttcgaagtaggagaaaccctttgcaatttgtgttagtggtagactgtgagtcgcacctttactctgatgccctgaaaaatagaaaaggaaagattattaatgactgttgtatatttattgagaatagggaaaggattggtgggttagaaaaggcattgttttgttgttctttggtacattaattttttagaataaatgagcctggagtggaagaattttttttcatgaaagacaaaataggaagaatatttgaggcctaggcattccaccaagagaagcatatacagagagataaatgaatatgcatgttaacatgttaacagatgtttgttgcacattgagaacctttttttttttttttttcggagtgcattagagaagagtagaaagcttactcatctggtaccctcttcttgcactccacagctgaatttgcataggtactcactttgaatatccttttaactaccccttaggctgcacttttgatcattaatttcctttgaaatgttttctagatttctaacatgctttattaaaaattatgcatttaacctttaaatatatgcctgaatttttcccaagctatttcttaatattcaatattgaagaagataattcttatttaacatctagtttatttgcctaggttggattatctcaagatgcccaggatcaaatgagaaagatgctttgccaaaaagaatctaattacatccgtcttaaaagggctaaaatggacaagtctatgtttgtgaagataaagacactaggaataggagcatttggtgaagtctgtctagcaagaaaagtagatactaaggctttgtatgcaacaaaaactcttcgaaagaaagatgttcttcttcgaaatcaagtcgctcatgttaaggctgagagagatatcctggctgaagctgacaatgaatgggtagttcgtctatattattcattccaagataaggacaatttatactttgtaatggactacattcctgggggtgatatgatgagcctattaattagaatgggcatctttccagaaagtctggcacgattctacatagcagaacttacctgtgcagttgaaagtgttcataaaatgggttttattcatagagatattaaacctgataatattttgattgatcgtgatggtcatattaaattgactgactttggcctctgcactggcttcagatggacacacgattctaagtactatcagagtggtaagtaaactcataaaatttattttagtttgttcataataatgtaatttattgatgtagtaaaatataagatggtatcatcactggatgagagccagaagatgtgggtcaggtcttgattctgttggataaacttgggtgactccattaggcacttagacttatgaaatgaaagaatgtgctagacttgattgtttagacttatgaaatgaaagaatgtgctagacttgattgtttctaaatattattaacatttttgagtcacaccttttacattttatttgaaaatatgccagacaaacaatttttttttttttttttttttgatggagtctcgctctgtcgcccaggctggagtgcagtggcacsatcttggctcactgcaatatccccctcctgggttcaagtgattctcctgcctcagcctcccgagtagctgggattataagcacctgccagtacgcccggctaatttttgtatttttaatagagatggggtttcaccatgttggccaggctgatctcgaactcctgacctcaggtgatccacctgtctcagccacccaaagtgctgagattataggtgtgagccccctgcgcctggccaaaaacatttttaaaataattttttaatgaatcctcatatccaacattcagttaaagaactagattatcagtactttagaagcccttaaacaatcacttccccttttctcctccacaaagataattattatttcagaactttataatcggttctttacttttatcgatccttttatcacaaatgtgtatatctttaaataatatattatttcattttgcctactctttaacctttatttaaatataatctatatatattctttgtgttgacttgtttgaggttcctccatgttattgcttgtaacatttattttcactactatttaggatttcattacatgactgttacacaacttatataaccctaaacactttatgatccttgatcctattttatcctcacaatgtcactgtgaggcaggatgaagaaactgagacctagttagatgaagtaacttgcccaaggtcagacagaaatcaagtgtaagggctaggctttgaacccaggtttgtctgatttcagggcccatgttatttctactacaccacactgcctcaccaagatccctccaagcgctaatggaagtgtaagtcaatctaacatttgttaaatactatgtactaggtgcttaaccatatattctaatatgctcgcaacaattctctgaggtaagtattattagcctcctgtgcttctgtgaacacaagtagattgacattaaaatgggtagaactgagacaattgaacctactttaatgttcgacatagtggaatttagtgtcttcccagattcgactgaattattacctggaaagcttcttaaaaatatgattcctaggctctattcccatcttttgatcaaaaatcttcactggggcatagaaatctttttgttgttttttgtttgtttgtttgtttgtttttgagacggagtctcgctctgttgcccaggctggagtgcagtggcgcaatctcggctcactgctagctctgcctcccaggttcacgccattctcttgcctcagcttcccgagtagttgggactacagccgccggcaaccacgcccggctatttttttttttttttttttttttttttttttggatttttagtagagaccaggtttcaccgtgttagccaggacggtctcaatcttctgacctcatgatttgcctgcctcygcctcccaaagtggctgggattacaggcgtgagcgaccacgcccagcctgtttgtttttttttttttgagacggagttttggtctgttgccaggctggagtgcagtggcgcgatctcggcccactgcaacctccatctcctgggctcaagcgattctcctgcttcagcctcccaagtagctggaattacaagtgtgctccaccacacccagctaatttttgtatttttagtagagatggggtttcaccatgttggccaggatggtctcaatctcttgacctcatgatccaccctccctggcctcccaaagggaaatcatattttaatcaaacatcccagataaatattacagttaggttaatttcttatattctaggtgacttcatgccatctatatgtcaatgaattccaaatctctctctccagaaatggcctttctctgaaattcgtaatttctctatccagctgcttcctggctatcttcacatggatttcaaataggcctttcaaacttcacatgacccataaagaacttttttttttaagcataaatcagatactgttatcttcttgcttcgaactctgcaatatcttctcactttacttgaggtaaaaggcagaccattyctattgcttgcaaaacccacrtgtattcctgccgcatttcttacagttcttgccccatttcctacagttctcccctttatcagctgcgctggtcttctctctgttgctgttatttctgtgtggaatacctaatcctgatttataaatggttgagtccttcttgtttttttacggtttagctgaagtcaccttcttaactggtcttccctagccattcagtcttatgtagctatccagtcacatttgttacatcaccctgtgttgattctctgtgtagggtatgtcactgttccttatatgtgtaattgttttgtttcttttcctactagaatgtaaccagagctttgtcttattatcactgtcatttattgaatgaaagatggatctaatttgtttgaaagtttgtccagagtagtaacagggagtgggctaaataacaaactcttaatctccccatgactcatattgttgttatttaacattgcataaattactaaatcttaggctaattttttttaagtgtaaaatccttcctattgacatctcagaaaataggctctaattggtaataaacaccatcagtgatttggcatacattgtgtcttagtttgtcacaagggagaatgttgttaaccctaaaccacgatgtcagaagattaaatagacttcaggtttactgttgtcattgttgactttatttacttattcttttgttgtgcaggtgaccatccacggcaagatagcatggatttcagtaatgaatggggggatccctcaagctgtcgatgtggagacagactgaagccattagagcggagagctgcacgccagcaccagcgatgtctagcacattctttggttgggactcccaattatattgcacctgaagtgttgctacgaacaggtaaagcacttctttcatatatattctcagtagacctttagaccagccaaaacgacactagaatatgccttatttttcaggcttataataaaagtattaattttaaagtataaattggtgatttaatgttaatttttattgtattctgagcatttttaaagtgcttataaataactttgttattttaggatacacacagttgtgtgattggtggagtgttggtgttattctttttgaaatgttggtgggacaacctcctttcttggcacaaacaccattagaaacacaaatgaaggtaaggtatggcatctatatcaaaagaattctcacaaagttgctacatcattgacttttatttattagtacgtagagcattttagtctggagttaaagaatgaacttgggccgggtgcagtggctcacacccataatgccagttctttgggaggctgaggcaggaggattgcttgagcctaggagttcaagatcagcctggcaacaatgtgagaccacatctctacaaacaaatattttttaatttaaaaaaggaaaagaatgaacttgtaagggtataggaactcaccagaattgcatgcgtgaactccagtctccatgatgccatatccccataatcttgtatcccccctcactcatacagcatactcatatatcatatatcattctcaaaaaggtctttaggccaggcayggtggctcatgcctgtaatcctaccactttgggaggtgtaggcgggtggatcacctgaggtcaggagtttgagatcagcctggccaacatggcgaaaccccgtctctactgaaaatacaaaaattagcggggtgtggtggcrggcgcctgtaatcccagctacttgggaagctgaggcgggaaaatcccttgaactcagaaggcggaggttgcagtgagccaagatcttgccatcgcactccaccctgggtgaaagggygaaactcctcaaacaaaacaaaacaaaacaaaaaggtctttagtccattttgaagatttagtccagtttactctttgtcacctactgcctcctggccttgtctccttctatgcaaactacaaacaaatgtttatatccccacttgaaaatacctctggcacttaaatgagaagttacccacaattttgaccatacactgtctgatttaatactctttagtgattgtccgtgggttaaagttgaaatttgccctctgttcataccgttccctctgtctggaatgtcctacttccatctctctcttctataacccttcctcctttctgaagtctaattaactcttggtcattctctctttttttttttttttttgatacagagtcttgctctgtcatcaggctagagtgcagtggcgtgatctcagttcactacaacttctgcctcctgggttcaagcaattctcgtgcctcagcctcccgagtagctgggattacaggcatgcgccatcatacccagctagtttttgtatttttagtagagacgaggtttcaccgtgttggccaggatggtctcaatctcctgaacttgtgatctgcccgcctcggcctcctgatcattcttaattattctttgagggccagacatgatggctcatgtctgtaatcccagcactttatttattttgagataaggtcaaaacatttcacctagggtgtaatgcagtggcgtgatctcctctcatgcaacctctgtctcctggctcaaatgacctatctcagcctcctgggtagatgggaccgcaggtgcatttttttttgtattttttgtagatacagggttttgccatgttgcccaggctggtctcaaactcctgggctcaagtgatccacccacctcagcctcccaaagtgctgggatgggtgcagtggttcacacctgtaatcccaacactttgcaaggtcgtggcagacagatcacttgagcccaggagtttgagaccagcctgggcaacatggtgaaaccccctctgtacaaaaaatacaaaaaacttagccaggcatggtaatgcatatttgtggtcctagctacctgggaggctaaggttggagggtcactggagcctaggagacgttgcagtgagccatatttgtgccactgcactccagcctaggtgacagagtgagatcccatctcaaaaaataaaaaatttggctgggtgtggtggctcacacctattataatcccagcactttgggaggccaaggcaggtggatcacctgaggtcaggagtttgagaccagcctggccaacatggtgaaaccctgtctctactaacaatacaaatattagctgggtgtggtggcgcgcccctgtaatcccagctacttgggaggctgaggcacggggattgcttgaacccaggaggcagaggttgcagtgagctgagatcacaccattgcactccagcctgggcaataagagcaaaactctgtctaaaaaaaacaaattattctttgagagtttcctgagattccatcgtttctttgatttccacctttcttaagctataacttcttcagtcattgcatttaatatagaaatggttttacattagccgggtgtggtggctcatgcctgtaatcccagcactttgggaggctgaggcgggtggatcacctgaagtcgggagttcgagaccagcctgaccaacatggtgaaaccccgtctctactaaaaatacaaaaattagccgtgcatggtggctggtacctgtagtcccagctatatggaggccctgaggcaggagaactccttgaacctgggaggcagaggttgcagtgagccgagatcgcgccattgcactccagcctgggcgacagagtgagactctatctcaaaaaaaaaaaaaggaaaaaaaagaaatggttttacattttaaaacttcttttaggattttttatagtataggtctgctgataaggcattctctcaggtttgtctcaggtatgtctgaaattatctttattttgtcttcatttgaatatatttgtgtgtaggtgtatgagagagagaaaaaaaattgtatgctttctccctaaggttgagaacaaggcaggaatgtccattctcatcaattctatgttctggaatcttagccagcataatacagcaatgaaaagaaataaaagggctgggcgcggtagctcatgcctgtaatcctagcactttggtaagccaaggcgggtggattgcttgagccaagaattggagaccagcctgggcaacatggcgcaaccgtgtctctacaaaaaaaatagaaaaattagccgagcatggcagtgtgcacctgtagtcccagctactcacgaggctgaggtgggaggatcacctgagcctggggaggtcaaggctgcagtgagccatgattataccactgcactccagcctgggtaatagagtaagatcctatctcaaaaaaaaaaaaaaaaaagaaaagaaaagaaaaggaagaagtaaaaaataaaaacttcccctattcaaaaatgatataattttctatatagaaaatcccagggaatctataggtgtaaagtacaagaataacacataaaatctatccatttcttcgttgttgttttttttgaaacagagtttcactcttgttgcccagactggagtgcaatggtgctatcttggctcactgcaacctctgcctcctgggttcaagtgagcctcctgcctcagtctcctgagtagctgagactacaggcatgcgccaccatcccagttaattttgtatttttagtaaagactgggttttaccatgttggtcaggctggtcttgaactcctgacctcaggtggtccacccacctcggcctcccaaagtgctgggattacaggcgtgagccactgcgcccggccaaaatccatctatttctatatttaagcaatgaaaactggaaactaaaatttaaaagcaataccattcacaatagctcctctgacataaaatactttgttataaatctagaacatgagcaagatttgtatgcaaattgctactgaaagaaatcataggctgggcatggtgactcacacctgtaatcccagcactttgggaggccagggcaggcagatcacctgaggtcaggagtttgagaccagcctggccaaattgtgaaaccctgtctctactaaaaataaaaaattagccaggcatgatggcaggcacctataaactccagctactcaggaggctgagggaggagaatcacttgaacctgggaggtaaagattgcagtgagctaagattgtgccactgcactccagcctgggtgacagagcgagactccatgtcaaaaaaaaaaagaaaagaaaagaaatcatagatcttggccaggtatggtggctcacgcctgtaatcccagcactttgggaggtcaggtgggcggatcacttgaggtcaggagtttgagaccagcctggccaacttggcgaaaccccatctctactaaaaatacaaaaaaaaattagctgggtgtggctgcacacacctgtaatcccagctactcgggaggtggagacaggaaaatagcttgaatctgggaggaggaggttgcagtgagcccgtacagtgccactgtactccagcctgggcaacagagtgagactctgtctcaaaaaaaaaaagaaagaaatcatagatctaaataagtggagacacataccatgttcattgattggaagagttaatgtagtaaagctgtaacttctcctgtaattaatgtgtaggtttaactcacctccagtcaaaatctcaacaggattttttgtagatataggtgagtcaattttaaaatttatatggatggacaaagaaagtagaatagcaaaatcgatttttaacaagaaaagttggagggttcaactacctgattttaaaatgtactgtgaagcttcaataatgtagacagtaagatagtggcaaacagatacacacttagatcaatggaasagaatatagaatgcagacataagaccacaccactatggccatttgatctttgacaaaggtgcaaatggaaaaatgatagttttccaacaaatggtattgaaaaaactggtcagccgtatacaaaaaaactgaacatcaggccaggtgcggtggctcacgcctgtaatcctagcactttgggaggccaaggtgggtggatcacctgaggttaggggtttgagaccagcctagtcaacatggcgaaaccccgtctctgctaaaactacaaaaattagccaagtgtggtggtgcatgcctgtaatcccagctacttgggagcctgaggcaggagratctcttgaacccaggaggcagagcttgcagtgagccaagatcatgccactgcactccagcctgggaygacagagcgagactctgtctcaaaamaaacaaacaaacaaacaaaaaaacaactgaacctcaagtgacctcacacctttacaaagattaactcaaactgagtcacatatatatagataaagcttaaagctatagtacttttagaagaaaacataggagaaaatctctgtgggctggagttaggtaaagagttcctagaaatgaccccagaatcatgacccatagaaaaaaaaattcatcaaaactaagaactttccctctaccacagataacagtcaagagaaaagacaagctacaggctgggagaaaatatttacaaatcacatagctaagaaaggttttttaaaactataatatataaagaaccctcaaaactcaacagtaaggaaacaaataacccaagccagtgacctgacatgtttctttaaatgtctgggtcaaaaaaagaaatggatctctgtctctttaaatctgccagagcaggtcaaagaaaggcaggcatctgtgctagtccctcagggaatcactaacaccaaccaagatagacaacctcaaatttttggagggcagagttcttactgcccaccttggcactaacgagctgctccaggaaggcaagctgtggttttcatgactgctgcaggactgaggaatggtagatgtagtgggttcacacacgctgctgcctgaaccaaattttagcagcctctcccttcatgaagcactctcctggctgctgtaagtatctgatcaggttccaaagttccaaaatagtttatcctgatagtctttttccagtttaattatttttagggaagggtggacctctgatgcttcctactctgctattttctgtgatgtctccttctactgtggtttttactattatctctttgtatggtttttgtttgtggttgctctagtgactacaaaatatatattaagttttcttttcttttcttttcttttcttttcttttttttttttttttttttttgagatgcaatttcactctgttgcccaggctggcgtgtagtggtacaacctcatctcactgcaacctccacctcccaggttcaagcgattctcctgcctcagcctcctgagtagctgggattacaggtgccctccccaacacctggctaatttttgtatttttagtagagacagggtttcactgtgttggccaggctggtctcaaactcctgacctcaagtgatccacctgcctcggcctcccaaagtgttgggattacaggcatgagccatcacgcccagcctaagttttcactatctacctagaatttatactttaccacttcaagttcaatgtagaaccatactgccatataggtccctttattctctactatttatgttgtagttatttgatttttcttcttttttccttttgacaaggtcttgctctgtcgcccacgctggagtgcagggtcgtgatctcagctcactgcaacctctgcctcccgggttcaagattctcccgtgtcatcctcccaagtagcctggattacaggcacatgccatcacgcttggctaattttattattattttgtaatcaagactagtcactatgttgcccaggctggtcttgaacttctgggctgaagcaatcctcccacgttggcctcccaaaatgttgggattgcaagcatgagcctgcacctggcttgtagttattttatacattacatctacatacgyttaaaacctcatccagccaggcacggtggctcacacctgtaatcccagcactttgggaggccaaggcaggtagatcatgaggtcaggagatcgagaccatcctggctaacacggtgaaaccccgtctctactaaaagtacaaaaaattagctgggtgtggtggcaggtgcctgtagtgccagctactcaggaggctgaggcaggagaatggcgtgaacctgggaggcagagcttgaagtgagccgagatggcgccactgcactccagcctgggtaacagagagacgccgtctcaatcaatcaatcaatcaatcaatccttatccagccaggtatggtggctcacacctgtaatcccagcgctttggaaggccacagcaggaagaacactggaacccaggagtttgagatcggcttgggcaacatagtaagaccctgtctctacaaaaaaatttttttaattagcctagcatgctggtgtgtggcagtacatgcctacagtcccagctacttggggcgggggcaccagtaagtgggaggatcccttaagtccaggaggtcaaggctgcagtaagagctaagagtgtaccactgcacaccagcctgggcaacaaaatgtgaccctgtctcaaaacctacctcatccaacaatgtaacaattttgctttcaaccatcaagttcttttaaagaactcaaggtgacaggctgaatgcagtggcttatgcctgcaatcccagcactttgggaggctgacgcaagaggattgcttgaagtcaggagttcaagaccagcgtgagtaacaaatcatagacrgtgtctctaccaaaaaaaaaaaaaaatagctgggcatggtggatggtggcacatgcctgtggtcccagctactccagacacaagaggatcacttgagcccaggagtttgaggctgtagtgagctataatcataccactatgctgtagcctgagcaacagaatgagaccctgtctcttaaaaaaaaaaaaaatcaagatgagaagaatagtcatttatgtttacctggatatttagcgttttccttgctcttcatgctttcctggtgtttcaagattccttctctatcatgtctcttccatctgaacaacttcctaaagcagatactttagagcaagtgtgttgacaacagagtctcttaatttctcttcatatgagaatgtctttattttgccttccttagaatattatcacttgaggccgggcgcagtggctcatgcctgtaatcccagcactttgggaggccaaggcaggtggatcacctgaggtcaggagtttgagaccagcctggccaacatgttgaaaccccgtctctactaaaatataaaaattatctgggctggtggcgtgcacctgtaatcccagctacttgggaagctgaggcaggagaattgcttgaacccaggaggcggaggttgtagggagacaagatgacaccactgcactccagccggggcgacagcccgagactccatctcaaaaaatatrtgtattatcacttgatacaaaattctgggttttagttcttacagcactttaaaatgtctacttccttctgtcgttcataatttgatgagacatctgcaattattcagatctctcaaataatgcattatgtttctctagttgctttcaataattttttttctgtatcgtaattatgataggtctgggcatggatttctcaggctttattccgtttggtattcaccaggcatcttaaatctgtaggtttatgtgtttgatcaaatttggggtgtgttcagccatcatgtcttcaaatatttatctgtaccacacattttcttttgtgatgttaatcacaggaatgttaggccttttggtgtggtcccacagattcctgaagttctacttatattttaagtttttgttttttctgctgttcagaatgagcagttgattgaattgcataattagtatccacctcctttttttttttttttttttttttttttttgagatacagtcttgttttgttgcccaggctggagtgcggaggcatgatttcagctcactgcaacctccagctcaagctcctggttcaagtgatccttccacctcagcctcctgagtcgctgggactgtaggcacaccaccacacccagctaattttctgtatttttattaagacagggttctcaccatgttggccaggctggtctccagcttctggcctcaagtgatccacctgcctcggcctcccaaagtgctggcattacaggagtgacaccaccgtgcacagccagtatcaacctatcttcaagttcactgattttttttcctctgacatcttcactctgctattgagactatccattgagttttttattttggttatttttccattataaaatttctttttgatactttatatcttcaatttctttgctgagacctatctttcatttcatgagtgttcatccttatttggagcatttttttttttttttttgagacagagtctcactctgttgcccaggctggagtgcagtggctcaatctctgctcactgcaagctccgcctcctgagtttacaccattctcctgcctcagcctcccgggagtaggtgggactacaggcgcccaccaccacgcccggctaattttttgtatttttagtagaggtggggtttcaccgtgttagccaggatggtctcgatctcctgacctcgtgatctgcccacctcggcctcccaaagtgctgggattacaggcgtgagccaccatgcccaacctggagcatttttataatggctacttttttttttttttgagacagagtcttgccctgttgcccaagctggggtgcagtggcactatctcggctcactgcagcctccgccaccgcctcccgggttcaagcaattgttccgcctcagcctcccaggtagctgggactacagttgctcgccaccacacccgggtaatttttttgtgtttttagtagagacggggtttcacygcattggccaggctgatctcgaactcctgaccttgtgatctgcccgcctcagcctcccaaagtgctgggattacaggcatgagccaccgcacccggcctataatggctactttcaagtttttgtcagaaaattctagcatctatgtcatatcaatactgactttttctatgttgaaattttctgtttttgttttttgtttgtttgttttgtatactaagttattttggattgtatcctggacattttgaataatatgttatgagactctggattttttttttttttttttttttttggagacggagtctctctctgtcacccaggctggagtgagtgcagtggtgcgatctcggctcactacaccacccaggttcaagcgactgtcctgcctcagcctcccaggtagctaggactacaggcgtgtgctaccatgcccagctaatttttgtatttttagtagagacggggtttcactatgttggccaggctggtctcaaactcctgacctcaggtgatctgcctaccttggcctcccaaagtgctgggattacagcgtgagccaccgtgcccagccaagattctggatcttatggagaattttgaccttgttttgacaagcattaaacccggttgggttcaggccacaagttccaaccagtcttttttgatttcaatgtcagtttcaaaggcttttcctttctaggcagatagatctctttgtaggctgtggtcttttccttagttcagttctcaaagtctttggtatgctccttaggattagatccacatagttacagtttggagggggagcccagcagttcataagcaacttaatggggtcacttgcccaatctcctccctctctgtgatgtccccagtactttcctgttccctggggctccctatttagttctctgaccagaaagtgaggctttacttatccaactctgccaatatctcataactgcatctgaatccaggacaaggtggcaaaaggacacagagagaaaacgagcaacagagattcaacccatcttcttgggaccccatgctttattaatttatatatttatgagatattgtctcactctgtcacccaggctggagtgcagtggcacaatcttggctcactgcaacctctgccacctgggttcaagtgattctcctgcctcagcctcccggagtagctgggattacaggtatgcaccaccacaccccactaatttttgtattttaatagagacggggcttcaccattttggccaagctggtctcgaactcctgacctcaagtgatccacccgcctcggcctcccaaagtgctgggattacaggcgtgatgagccactgcacccagccccatgctttgttattttatttacaattggagaggaaggtttggctgtcagttttaggtgcatactggctcttattgccacctccgttgctaccaggaaactccttttctactccctgagcctgaactagagggaattctcctagagctctctgtgctcagcttcttccaagttttgggctaccttgagtccagcctgcagactactagagacaaaaaaatggagctgggtgtgctggcagaggcctgtagtcccagttactcgggaggctgaggtgggaggattgcttgaggctaggagttcaagaccagcgtggacaacatagtgagaattaattttttaaaaaaataattttttttaaatggtcaccaggtttaatggtacttcaaatttacatcttctcccctaatctacctgttattatttacttttcaggatcttgaagtagctgcttcctgcatcctgaccaggttttatagctgccttctgtgggagggagacaggagagtatatgtagtacatcttcctcaaaactgggacctctctggttgcttttagggttttcttctctttaactttggttttcttcagtttgaccatggtgtgcctatgtgtagttttctttgtatttttcttggttgagattcactcagtttcttgaaatgtacattaatgactttcatcgatttggggaaattctctgtcattatcccttcaaagatttattttgctttcttaccttttgagactctaatgattatacatgtgctattcctttgatactgtcctccatttctcttatgctttattctttcttttattctacatgttttctctctgtgcttcagtttatataattttattcatccatctttgaattatctgaatcttttgctgtgctcttttttttttttttgccttaaactgaaaaatcctaaatataccttaaaataaaaaatattaaacttggccaggcacagtgactcacgcctgtaattatagcactttaggaggccaaggtggacagatcacttgaggtcaggagtttgaaaccagccaggccaacatggtgaaaccccgtctctactaaaaatacaaaaaaattagctgtgcgaggtggcgggcacctgtaatcccagctactcaggaggctgaggcaggagaatcgcttgaaaccaggaggcagaggttgcaatgagccgagatcacgccactgcactccatcctgggcgacagagcaagactgtttcaaaaaaaaaaaaaaattgttcatctcattgtgtatattttttatttctcctgtttgaaataagtgatgaaactggaagcataaataactattattaactgtatcattttttttttccaaaaagggtttttaaaatattctattattagttgaagcctctccattttctaatctgggataagactttaaaaggaacaaataatagacgagggagtatatttttcttccctctatagtagctgactagctcctctacaaataaggaagattatactgttcatttattcagctttttaaaaaatatttattgactgcctaccatgcaacaagttgaagattttttttccctcttttgagacagggtcttgctctgtcgcccaggctggagtgcagtggcacaatcacggctcactctagcctcgacctccctgggctcaggtcatcctcccacctcaagtagctgggaccacaggtgtacaccaccaacctggctaacttttgtattttttgtagatatggggtttcaccatgttgcccaggctggtcttgaacttctgggctcaagcaattcatctacctcggcctcccaaagtgctaggattacaggtgtgagccacagtgcctgcccaagttaaaggtatctaaacttggttaaatgacaatgcattctaccacttaacagagtttgccccaaatccatttaatatcgtacttggagttgtataccaattcccctgcctccaagagttcagcgggagagactaggtagtcttaggtagtctggcttcacttggcattcctttcttcatcatttcattttattcataaccagagatttttcttttttyttttttttttttttggagacagtgtctcgctctgtcacacaggctggagtgcagtggtgcagtcatggctcactgcagcctcaaactcctgggctccaggaatccttctgcttcaacctcctgagtagctaggactacagatgcatgccaccatacctggctaatttttaaagtttttttgtagagagggggtctcgctttgttgcccaggtttgtcttgaaccttcccggcttcaagcagtcctcccacctccgcctcccagggtgctgggattacaggcaaaagccaccacgcttggcaccagaaaaagttttatcaaacatgtattaagtatgtgccaggcaatttactgagcactaggagatacaaagaccactaaaacataatccctagccttaatggatatatttcagtaggacataaacataaataggtaccacaagctattagaaatatgatagaaataaatatatggtacaggggaggcagagtagaagtagtcacttctaccataggccaaaaggtttactaggggagattaaaactgacagtgagtcttataatgtgagtagaagttgcttggagaggatgggataggagaaaaaattattttccagcaaaatatcatgtaatttatttaaaatacaaaaatagcccagtgagacttttggtataaaacttgaaggaaatctttatttttctaatttatctcttccccctaattttaaaaaatctttaaaggttatcaactggcaaacatctcttcacattccaccacaagctaaactcagtcctgaagcttctgatcttattattaaactttgccgaggacccgaagatcgcttaggcaagaatggtgctgatgaaataaaagctcatccattttttaaaacaattgayttctccagtgacctgagacagcagtctgcttcatacattcctaaaatcacacacccaacagatacatcaaattttgatcctgttgatcctgataaattatggagtgatgataacgaggaagaaaatgtaaatgacactctcaatggatggtataaaaatggaaagcatcctgaacatgcattctatgaatttaccttccgaaggttttttgatgacaatggctacccatataattatccgaagcctattgaatatgaatacattaattcacaaggctcagagcagcagtcggatgaagatgatcaaaacacaggctcagagattaaaaatcgcgatctagtatatgtttaacacactagtaaataaatgtaatgaggatttgtaaaagggcctgaaatgcgaggtgttttgaggttctgagagtaaaattatgcaaatatgacagagctatatatgtgtgctctgtgtacaatattttattttcctaaattatgggaaatccttttaaaatgttaatttattccagccgtttaaatcagtatttagaaaaaaattgttataaggaaagtaaattatgaactgaatattatagtcagttcttggtacttaaagtacttaaaataagtagtgctttgtttaaaaggagaaacctggtatctatttgtatatatgctaaataattttaaaatacaagagtttttgaaatttttttgaaagacagttttagttttatcttgctttaaccaaatatgaaacataccccctattttacagagctcttttttcccctcataacctygtttttggtagaaaataagctagagaaattaagccatcgtgttggtgagtgttcctaggctaatgataatctgtataattcacatcctgaaactaaggaatacagggttgaaaaaatattaatatgtttgtcagaaggaaaaataatgcatttatcttccccccccaccccccgccccatggaatatttaatctatttaatcttcttgcatttatttctcaagaattactggctttaaaagaagccaaagcactactagctttttttccatattggtatttttgatgctgcttccaattttaaaagggaacaaagctgccataaatcgaaatgttcaatactaaaagctaaaatatttctcaccatcctaagcagataattattttaattttcatatacttttcctgtatagtaactattttgattatatcatcaatgttacctgtttcctctttcagaacagtgctgcatatacagattgttattggcaaaggaaaatctggctatctggcaatattttacctaagcgcagattaattggtgaaaaaattaactcttaagatggccattaataattaggaaagtttacagagtggtcttagtagaaaattcaagtcctcctaatttatttaaggttcaataatgcgttcaacatgcctgttatgtataacgcttaggttctaaggaagattaaggtttcataccaaaatacatgtagcttatcttttaggaaggggaaaaaggctccattttgaccatagtaaaatttgtgttgtgttttatttccttttcttaagctccactgataagggattgtttttatcaaaagttactatttgtagattggaggcataattttagtgattttcatacttttagctttcttcgcataaaagctaattgaaaccgtatatgtagtaaaattaaaggcagagctgttgcagttgaattggagagttagggcaaagaacacttattagcccacacttcccacctttctacaggtggtcctttcagagctcagcctgaaaacccactactgtgttatcgtgcgtcttttggggttagtggttcttttgagaatctgaaggaagctgtggactcttcctagaaaaaaaaaccacacatacacatacaatgttgcatgcagtttcaagggattttggacatattgaaacctatcacaggctgtaggttatggacctctgtgccatgagaaaattgatacattaaactaagaactttgtttttaacttaccaatcactactcagcacatcttatataagctgataatttgtgatggaaaaggtctgtagcatgtgatataaggtgaccttatgaatgcctctcttgctggtacattaagttgttttaatatatcatttggaggggactgaaatgttaggctcattacaagcttgatacagaaatatttctgaaggatttctaatcagaattgtaaaacaatgtgctatcatgaaatcgcagtcttcacctcatggttcatggaacatttggttagtcccataaaatcctatgcaaaacaaagtagttcaagaatttttaggtgggtagtcacatttataaggtattcctcttactctttgggctttttcagtctgatttatttaaattttcatttagttgttttacttttggactaaggtgcaatacagtagaagataactttgttacatttatgttgtaggaaaactaaggtgctgtctcctcccccttcccttcccacaaaatctgtattccccctattgctgaaatgtaacagacactacaaattttgtattctttttttgttttttgttttgagacagggtctcactctgtcacccaggctggagggcagtggcgcttcacagctcactgcatcctcaaccttgggggctcacgcagtcctcccgcctcagcctcccaagtagctgggcatgcgccaccaagcccagctaatttttgtatctttagtagagatggggtttcgccatgttgcccaggttggtgtggaattcctgggctccagttatatgcccacctcagcctcccaaagtgctgggattacagacgtgacccaccgcgcctggcgcaaatatgtattcttttaaaatttcctctgatactataagctttttgcatttatctgaagcagtatacatgcctttggtatcagcaattttaacagtttggatatacttatcagctatcttattccaaaactacatctacttcttccagtatagaatctggtgcttcctgaccaaaaagatgagaaaaacaatgttaaaaatatagatgctttccattgaaatggagtgaaaacattggttctatatgttttcttttaaaataattttcttattaaaaacttgctgtctttattatacttaccctttttatgcatatcaatagtatttataagatgtgttctataattatgtaattgtagatactgttatgcattgtccagtgacatcataaggcaggccctactgctgtatcttttctaccttcttatttgtaatagaaactatagaatgtatgactaaaaagtcactttgagattgacttttttaaaaagttattaccttctgctgttgcaaagtgcaaaactgtgagtggaattgttttattctgacttaatgtgttagaaattagagaatacagtgggaggatttttagacattgctgctgctgttacccaaggtattttagataaaaaatttttaataaacatccctttggtatttaaagtggaacatttagcctgttcattttaatctaaagcaaaaagtaatttgggtcaaaatattggtatatttgtaaagcgccttaatatatccctttgtggaaggcactacacagtttacttttatattgtattgtgtatataagtattttgtattaaaattgaatcagtggcaacattaaagttttataaaatcatgctttgttagaaaaagaattacagctttgcaatataactaattgtttcgcataattctgaatgtaatagatatgaataatcagcctgtgtttttaatgaacttatttgtattttcccaatcattttctctagtgtaatgtttgctgggataataaaaaaaattcaaatctttcaattatgtgtggaaagctaatttttacactgcttaactatgttgttttctgattcaaaaatttatgtaaatctttttattctctgagaaagttatgattaaaattttgatgctttggaattaaaataactaatgatagtacttaggttaaggcaaactgagtatcatgtaaatgtcaaatgttttcatttaaatgttttcattttgtccaatataagtacaatatttcctgttaaaggcttccattagattacaggtttagaatttaatgattaagttctacattcagtaccatttgattatggtatataatttttaaatgtaaaattgttggttagtctgttttcctttataatcctttttgtttgttttatttcttagagatggtcttgctctgtcacccaggctggagtgcagtggcaagatcaaagctcactttaacctcgaactctgggctcaagctgtcctcctgcttttgtctcccaagtagctaggactacaggagtgtgccaccacacgcaactaattttttatttttatatttgtagagatggagtcttgctaagttgcccagtctgatctcaaactcctggatgcaagcgatcctcccgcctctgcctcccgaagtattgggattacagacctgaaccagtgtcaaaatatatatgttgatattatatcttatatcaactttatatggataaacaagtactgtttttcatcctcttttcaagctttaccatcattagatcttcttttatcctcttgtttgcactcccttgtaagtttgtatttgttctacataaggctgttgtacagctgacacaaattgcattattcctatgatttattgtgctacattgtgggcccacatttggtgtacttaaaattgtgactatactttgctacacacacacacacgcgtgcacatctgcttgtgtatgtgaagagtagagggaggttgccaaacagacagttattgtccagtttttcctcctttctttcagtaacggagctacccagagattccaaacattttgctggatttaggctatgaatggaactttgggttgtttcccttgaggaagggttaaatttgttctgcaggagaaaaaaaagactctcatgaatacctagttcacagaggggttgacaaatgacagaggccactcttgctccccagtatccactctcccatttttccttttactaatagagccaatatccctttctaagttttgactaccccagtagagtccatgtttctcctattcccttgtaattagttttgggcacatgactaggttttggccattgggacatgagcagacgtggtatgtgcaaattatacatataattaaagttgacattgcttgcccaccacttgctttttacctcttcccacaggatggaacacgtacatagtggtgactttatattgaccatgaaaattagaaaaacactctagtggctgggtgcagtggctcacgcctgtaatcccagcactttgggaggccaaggcgggcggatcacgaggtcaagagattgagaccatcctggccaactaacatggtgaaacccgtctctactaaaaatacaaaaattagctgggcgtagtggcgaacgcctgtagtcccagctactctggaggctgaggcaggagaatcgcttgaacccaggaggcggaggttgcaatgagcctagatcacgccactacactccagcctgggcaacagggcgagactccatctcaaaaaaaaaacaaaaaacaaacactctagtgatggtgaatcaaccaaatgaatacaatctgattacctgagagactgtgtgaagcagggtcatctttctactctggactgactgcagaatgtgagagaggggagaaaaatcaaattatatctataatatccatttgttactgctgctgagcctataccttaagtaatacagcatgcaatttgtattagtgtataatctgatttgcagaacaatttaacaaagtcattttgtactttggccatctcctatggactcaaccataaaattcagttattttacctcttaggtttttctctaattcatcatctttattctcgttgttaactaatttggttaaggtcctcatcagcctgaattaatgtaataattttctaacacgagtcttactttattctggtacctcaagtttattatccaacctgtcaaccaaaatgaccgtaaaaggtaattccagattctgcttctagtacaaccaatcagatcctaatggatttactgtatgacagctaacaactataaagtctgggggaaaatacccaactacccaaagatattggaatggaacaaaaccaggcaaattctggaacggagctgatccttggaagagaggaagggcactagatgagtattctgtttttatgacatcttgcctgagaaaggcccaaatctttggctgaatcatgaatcaaatatgtagggaaggctgggtgcggtggctcacgcctgtaatcccaacactttgggaggctgaggtaggcagatcacttgaggtcaggagtttgagatcaggctggccaacatggtgaaaccccgtctctactaaaaatacaaaaattagcaggtgtggtggtgcatgcctgtagtcctagctactcaggaggctgaggcaggagaatcacttgaatcccggaggcagaggttgcagtgagccgagatcaccactgcactccagcctgggagacagacagagactccaaaaggagaagagaagtgagcagagaggaggagaagggaggggagggaagattactcaagaaaatctactaaaatttggtgtgagttttgagagtctgtgatatttgaaccaatattcacttttaagggtttttctgtcgcccatgttaagcaatttaattacgatgtgcctggtgtcattttgtttatttttacttgtgcttggggttcattgagcttcttaaatactgtgaagcaatggttttcattaatgcaagattttttttagccaccatnnnnnnnnnnnnnnnnnnnnnnnnnnnnnnnnnnnnnnnnnnnnnnnnnnnnnnnnnnnnnnnnnnnnnnnnnnnnnnnnnnnnnnnnnnnnnnnnnnnnnnnnnnnnnnnnnnnnnnnnnnnnnnnnnnnnnnnnnnnnnnnnnnnnnnnnnnnnnnnnnnnnnnnnnnnnnnnnnnnnnnnnnnnnnnnnnnnnnnnnnnnnnnnnnnnnnnnnnnnnnnnnnnnnnnnnnnnnnnnnnnnnnnnnnnnnnnn

SEQ ID NO: 96711 - DNA, 738017 bp, Homo sapiens
  misc_feature (1)...(738017): n = A,T,C or G
tattgtgaggatatgagatatttatgccaagcacattgcacattgcctgccagataagagtttcataaatgaggccgggcacggtggctcacgcctgtaatcccagcactttgggaggccgagacgggcggatcacttgggctcaggagttccagactagcctgggcaacgtagggaaaccctgcctctacaaaaaaatttacaaaaattagccgggcatgatgggaggctgaagtgggacgttggcttgagcccaggaggaagaggatccacagtgagccaagatcgcaccactgcgcttcagcctgggccacagagcaagaccctgtctcaaaaaaaaaaaaaaagataaaaaaaagttttgtaaatggtagttaccatcgtgttattttgaaggaagagttatgaaggtctaaccaagtagctggttcttagttgtgctaaataagtatagttattttttccctccatagcctgtgagctagaaagcccaggtgagacatgacactatggagtcctataacacgggaaggagaagaaactctttatggtactggtgggggatcaaaacccttgagaggtgctggcttttgtgcaaagtggagtgattggatcacccaaccggaacaccgttagccaggacataagctggaattgtaccaggaaagtaaagctatatggtcaccttaccctgaggctgtacaagtagcatgtgacagaatttgtccattctgtctcaaattgccttctcacactttctttaatcctaatgatagccctatgaaatgattatccttatataataactgaaaatatggaaggcaagtaattagggagtgatggagcagggactctgtcctaaactttttttttttttttttgagatagggtctcacactgttgcccaggctggagtctagcctgcactttttttttttttttttgagacggagtcttgctcttgttgcccaggctggagtgcagtggcacgatctctgctcactgtagcctctgcctcccaggttcaagtgattctcctgcctcagcctcccgagtagctgggattacaggcgcccaccaccacgcccggctaatttttgtattattattattatttttagtagagacggggttttgccatgttggccagggtggtgtcaaactcctgacctcgtgatccacctgcctcggcctcccaaagtgctgggattacaggtatgagccaccgtacctgtcccagcctgtacttttaactcacagctgtgataattgtcaacctcagcaagccttgtggggcattagtcccatatatagattatatatatattatatgtgtgtgtgtgtatgtgtgtgtgtatatatatttagacagagtttcactctttgctctgtctcccaggctggagtgcagtggcacgatcgagctgactatagccttgactttctgagctcaagcaatcctctcacctcagcatcccaagtagctgggactacaggtgtgcacaatcgtgccggctattttttaaattttgtgtggagatggggtctagctatgttgcttgggctcatctctagctcctgggatcaaacaatcctccctccttggcctctcaaaatgctgggattacagacatgagataccgaggccagcttggtcctatttcttgagaccccttgactggatgtttcagggaagcatattctggctgagtttactggataattttcttgtagagcttgttatgaactgaatgttcatgttcttcccaaattcatatgtttaaatttattccccaatatgatcatatatggatgtggggcctttgggaggtaattaggtcataagggcagaacccccatgaatgggattagtgcgcttctaagaagagaccaggctggacacggtggctcatgcctgtaatcccagcactttgggaggctgaggcaggtggatcacctgaggtcaggagttcgagaccagcctggccaacatggtgaaactgtgcctctacttaaaatacaaaattaggccgggtgcggtggctcatgcctgtaatcccagcacttcgggaggctgaggcaggcgaatcacctgaggtcgggagtttgagagcagcctgaccaacatggagaaaccctgtctctactaaaaaatacaaaaaattagctgggtgtggaggtgcatgcctgtaatcccaagtactcaggaggctgaggcaggagaatcgcttgaacccaggaggtggaggttgtggtgagctgagattgcgccactgcactccagcctgggcaacaagagtgagactctatcttaaaaaaaaaaaaaaaaaagagaccagacagctagtttgctctctatctgtcatgtgaaaatacaagaagccagccatctgccattcagaagatgaccttcatcacaccctacccatgctggcgccctgatctcagtgttgttctagtaatttcttatatctgcccaaaccaactaagacaaatagccacatcatcaaagcattctgcctgttaggacttttgtagaggggagagagtgtgagtatgaggttggacctggttattttagaaattccttccaaccttagatgtctgtaaattccttgagggcaggttttgtatgtttgaattgtcacccttcagaggagatgcttaggaaatgttaaagatgctaaaggagcacagccccaggacctagacagtacggggactgctttggatgttctcatttgatcattgtgggctgggctgtggcaggctcttacactctctgagcctccgttttctcattggtaaaaatgcagagtaataataccagcactttgggaggccgaggtgggaggatcatgaggtcaggagttcgagaccagcctgaccaacacggtgaaaccccgtctctactaaaaatacaaaaattagccgagtgtggtggcgcgcacctgtaatctcagctactcaggaggctgaggcaggagaatcgcgtgaacccgggaggtggaggttgcagtgagctgagatcgtgccactatactccagcctgggtgacagagtgagactctgtctcaaaaaagtaaataaataaatttaaaaaaaagcagaataatagtccccgctctccttcccccacagatttgctgagacagcaacataaattgattgaagtgtgtacattgcaaataagcaatgtttccttttgccagctttcaatcttgctttccaagttgcttgccttatccacttacagacagaataagaaaagacctatgcaaaaagtagagtctgtggggtctgacagccctggatttgaatccctaaatagcaccagccatttgtgtgaccccagccaagtagggtatcctttctggacttcagcactaaaaatagctcccttgcttggatcttatgaggtaagcttggagcctagtttctgcactcagacctccattagcagtggccttttaaatgtatcttttctgtattctctgttaagcccatacgctcttttgtttatttattcatttaaaaaaaataaaaaaaaccactttttttttgagacagggtcttgctgtctctcccaggctagagtgatcatggtttactgcagcctcgacctggctggactcaagcgatcctcttgcctcagtctcctgagtagctgtggctacaggtttgtgccatcctgcccagctaattttggtattttttccaagagacagagtttccctgtgttgcccaggctggtcttaaactcctgggctcaagcaatccgtctgcttcggcctcccaaagtgctgggattacagctgtgagccactgcacggcctccatgcggtcgtaacaccatgaggtagccacgttgggcagcttgtgcgttgtcagggagacactcttcctcagcccctgggcacctctgttgaaaacttcctggctgtctggcaggctggaaatcagctctatttgttttgccctgaagatatgttttatttataactcattctgactctgtagaaaataattcaataaaaactcaattggttttccactagccctgagcagggatgagggatagtatcttattttataacacatgtgataataaaacagccctggtcacatagcccagagcgggtaagtgcctgctggctgaaaggaaaaatgctggctcagaccatttctcccttgctgctgtatgtgctgagaaaaccactcctgtcctctttacttttccattttaggattttttttttttttttttttgagatgggctctctctgtcacccaggctggagtgcagtggtgtgatcttggtttactgcagcccccgcctcccgggttcaagagattctcctgcctcagactgcctagtagctgggattacaggcatgtaccaccacgctcaactaatttttgtatttttagtggagactggagtttcaccatgttgcccaggatgatcttgaactcctgacctcaggtgatccacccgccttggcttcccgaagtgctgagattacaggtgtgagccaccacacccagccctttttagtgtttgttgttgttgttgtttgagatagagttttgcagttgttgcccaggctggagtgcaatcgcatgatctcggctcactgaaacctctgtcttccaggttcaagcgattctcctgcctcagcctgctgagtagctgggattacaggcgcgcgccaccacatctggctaattttgtatttttagtagagacggggtttcaccatgttggccaggctggtcttgaactcctaacctcaagtgatccacccgcctcagtctcccaaagtgttgggattacaggtgtgagccatttctcctggccaggattttttaattgaaaaagaaatacatgtacatgttaaaagattcaaacagaacattaaacatacataacggagagcggctctctgttttcaattttccctgcggatgccactgttaattcatgtgctgggcatcttaagtctgtaagcctcccccatctcctgctttattttattttatttttgaacccagaggggtttaaatccttaaatggcttctgcccgcacttagcaagcttggcgccttggcactgaactaacgacagctgtcctagcccctgtcgcctctttggaaccttttatgtggatggattgttggggccctcaaagtcgggagtgccatggtgccagctggggatcaagaccgcgcgccacacagggggaagccggcccaggctggggctcgcacctcacgtgcctcccgggccctgcgatcctggaggcgctcccaggccgcgcgcgccacggtcacccacccacgtggggggcacgaccgtgggagtcacggggggtaccgtgagggtcacagggggtgccgcagggatccacagtgggcttccgcggggcctccacccctgagcttcacagaggaagtgaaatttgagctgcgcgccctgaaggactggtaagcggcggggacagaactgggcctccttccagctgcgccgccccaggtgcagaagctttcctcctagtctctgttctcttgctccggtccctccctccctcctcgctccatctccctccatctccctccttccctcctcctcttcctccctcctttcacccctcctttttccctccctcctccctcctccaccctctccctgtcccccgcttctctctctcgctgcccctccctccttctttcacccctcctcctcctactctcctcctcctccctccccgtccccgcttctctccctcgctcctcctccctccttctttcaccccacctttttctctccctcctccctcctcctcctccctccccatgtcccctccctccctgtcccctcttctctccctcgctcctccttcctcttttctccctcgctcctacccccttgcttccctcgcgtctcttgcaaaacccgggacggatcgggggcccaggcctggcctccgcgcacgcgcaggagcagcgccggctcggccgccagtmggaagcgccagcccagagcctgggaagtggccgcagaggctgctcggccccgctgcccgccaggtcgtgggctcccgctccgggcccggggccaccggctgtgtaagtgcaaagcgggggggctcccggtcaggcaattcggaccggctgcggggagggctgcgcggctggccgtggagtcggcgcgtcccgcggaggggctcgcccggccctcacctgtccgggcggagcccgccacacctgtccgggtccgctgccgggccggggttcagcgtgcacctgctcgaggcgcccttgctcctgttggcgctctgcttacatctgtccaaggccgtgtcccacacccgctgaagactcggcggacacctgtccgggacccggcccacacctgctgcccgggccggctctgctctcccgagctcgcggcgggggtccccttcccctctgtgcctccgagctgtctccgcctggcttcccctcccgggccgtccgcggcgctggagccccccgcccctgggcctggctaagcccactggagcccgcggggtctgggacgcgcggctggggcctggggcccagcacagcccacgcccccggcgctttccccgccctgagttcccggacttctcccctagccctttccctcctgtctcctggattcaaagtgcctgcgatctagctgggcggcatcaggcggtgctctctgggataagcgcgctgtcaactccaacttatcccagggaaccctggggagaggaagtcaggctactggcctgtggtcttctccctgtcagcccaccccaatcccctccacccctgcrraccttcccaacgtgaatgtctgttaaccgaaagttttcccgtgttaggatgcgttgtctgtcttcaaatgtttctatagagagaggaattaaaacgctggaagcaaggcccagttgaaaggtatgggggagtgacttcccttccatccctcacggccccagtttaaactggtgactgtcccgtgtttctaaggtagtcatagctacctatgacatctttatttgttaacctgaaacaaagcaccgggtggatgatgttggaggcccaggaacattgccgtcctaaagatctggctaggttttgttgtgtgtgtttgttcgtttttttaattgtgtggaggactagtagtgtagagggaaaaacagttgtccggaaacatgtaaacaataaatgtttcagaaatctagtgtgtcaaaaataacagcttcattgagcctcgattacctgccataaaatccactgctttaaagtgtacaattcagtgatttttctttttttttttttttgagacggagtctcgcactgtcgcctgggctggagtgcaatggcacgatcttggctcactgcaccctccgcctcctgggttcaagcgattctcctgcctcagcctcctgagtagctgggattacaggtgcctgccaccacgcccggctacattttttttgtatttttagtagagacggggtttcactatgttggccaggctgctctcgaactcctgacctcgtgatccacccgccttggcctcccaaagtactgggattacaggcgtgagccaccatgcctggccaattcagtaatttttagtatattcacacttgtgttaccattgtcattccagaacattttcatcaccccagaaagaaactccatacccattagcagtcactcctcattcccccctcccacagcccctggcggccaccggtttactttcgatatatatagatttgcatattcagggcatttcctattaatggaatcatacaacatgtggccttttgtatttagcttctttcattcagcacagtgctctaaagttattcatgttgtggcttacatcagcactttgttcctttctgtggctgaataatattccattgtatagatttaacattttgtgtatcaggcagttgatggacatttgtgttgttttcactccttagctattaagaataatgctgtgcctggccaggcatggtggctcacgcctgtaatcccagcactttgggaggccgaggcgggcagatcacgaggtcaagagatcgagaccatcccggccaacatggtgaaaccccctctctactaaaaatacaaaaattagctgggcatggtggtgggcgcctgtagtcccagctactcgggaggctgaggcagtagaatcccttgaacctgggaggcggagtttgcagtgagccgagatcgcgccactgctttccagcctggcgacagagtgagactccatctcaaaacaacaaacaaacaaaaaacaagaataatgttgtgcctgtaatcccagcactttgggaggctgaggcgggtggatcacctgagatcatgagttcgagaccagcctggacaacatggcaaaaccctatctccacggaaaatacaaaaattagccgagcatggtggctcacgcctgtagtcccagctacccgggaggccgaggcatgagaatcgcttgaacctgggaggcagaggttgaggtgagctgaaatcctgccactgtactccagcctgggtgacagagcgaaactccatctcagaaaaagaggaataatactgctatgtacattcctgtacatgtttctggtgtggacacatgttttcagatctcttggattgctggttttatagtagctctatggaggaactaccaagttgaagatacatatttttgctgttttaatacctgtattagcttagtctcagataccagaactggctcagtggcaggtgtctttttttttttttttttaaagagtcttactttgtcacccaggctggagtgcagtggtgtgatctcagttcactgtaacctcctcctccctgggttcaagcgattcccgtgcctcagcctcccaagtagctggaattataggtgcatgccaccaagcctggctaatttttgtatttttagtagagaaagggttttgccatgttggccaggctggtctcgaactcctgacctcaggcgatccactcgacttggcctcccaaagtgttgagatcacaggtgtgaggtcaggttgtgtttttttttttttttttttttgagagggagtcttactcttattgcccaggctggagtgcagtggcgtgatctcagctcactgcaacccccatctcctgggttcaagcgattctcctgcctcagcctcctgagtagctgggatcacaggcatgcgccaccacgcctggctaattttttgtatttttattagagaccgggtttctccatgttggtcaggctggtctccaactcctgacctcaagtgatctgcctgcctccgcctcccaaagtgctgggattacaggtgtgagccaccacacccggctgattatgctgctttttagatgagacgatagtttttatttttaaatcatttttatttattaatttttttgagatggagtctcgctctgttacccargctggagtgcagtgttgtgatcttggctcactgcctcctccacctcctgagttcaagcaattctcctgcctcagcctctggagtagctgggactgcgggtgtgtgctaccactcctggctaatttttgtatttttaatagagatggggttttgtcatgttgaccaggctggtctctaactgctgacctcaagtgatcctcccgcctctgtctcccaaagtgttgggattacaggtgtgagccaccgtgtctggccgagatgatacttctaaaataaggccctttsttacctgcggtgggccgcrctctcctcctctgtagaatgaaggcttcggtgtttctcagcttctgttaaacctgtgcctacttttgagaaacatkagcgctccagtctcccccgctcagtattttgatatgtcctccgaggggttttatgcctctttgttggaaggtgatgtsattttggttctttcgaaggtggtttttgtgtgcagaaaagactctttagggaatcgttgtggggaaagggcaggagagagtggggcgtcgtccttgagagcgtgagcactggagtcagggacttgggctgagtcacacacatgtaatatacttgtgaaccgtttagatcctgggcagaagcaagacatgttgggaggctagggtttcctttttttaaaatttaattttgttcatacttctctatccatgtgtatttttgaagtctgtagaggtggggttgtgatgtatagtccaggggctctgcatatgcagaatgggatagcccccgacacacagtcctcctcctctccgtgcaggtgagaagcttgccattagaatttcacagaggtcttatagcaatgtcactttaatcttagtgtcacctgggagggttttactgccacgatctctgcagtcaggctttggtgacctgaaggttatgcagttttgggcttcctatttaagaaaaagaaaacaaaattaaaaatgcaaaattagatagagggccatggaaggggcctgaagctgaaccccattagctcatggtacagctgcctctggccatggggaccatggccaaatcccctcaggaagtgtcagcccactgatggggacagtggaggtgtgtatcgaggcatctttttcttatttgatacagagagctcatttaatctccctaacctttaaaaaaattagactttttatttgagactatagtagttgtagctccatgtgcatttgtcagaaataatactgagggatcctatataccttttgcccagtttccccccgtggtgccatgttacaaaaccacagtatgttatcacaaccagaatgttgacttgctgacaccttgaggtatgtgttactatcctcatttttattcacaatgaaactagggttcagggaagcacacaggcttgctccaggtcacccagatcgtgcgtgtagagctgggagttgaatatcggccctgacttccaggcagtgggatttccatcatgaccgtctgtaggctgggggcagcattcattggattgttcatttgtttgtttgttcactaatcccttcaacaaacatgtattgaggatctcctatgagccagattctttcacgtgggtcatctaatttaatttttccccagctctggggaatcaggtaataacgttttctttttatatctgacaaaattggctcagagaggttatggcaactctcccatttataaaggaaaggtggtatatttgtgtaatctctccttttatgttaggcacaatgctaggccctttacattcgcaacctcctcaatctagatacagttttataaggcaagttctttttcttttaattctttttttttttttttttttttgagatgcagtctggctctgtcgcccaggctggagtgcagtggcgccatctgggctcactgcaagctctgcctccctggttcatgccattctcctgcctcagcctcccaagtagctgggactacaggtgcctgccaccacgccgggctaattttttgtatttttagtaaagatggggtttcaccatgttagccaggatgatctcgatcttctgaccttgtgatctgcctgcctcagcttcccaaagtgctgggattacaggtgtgagccactgcgccccgcctcttttttttttttttttgagacggagtctcactctgtcacccaggctggagtgcagtggcgcaatctyggctcactgcagcttycacctcccgggttccagygattttcctgcctcagcctcctgggtaactgggattacaggcacgtgccaccacacccggctaatttttgtatttttagtataggtggggtttcaccatgttggccaggctggtctcgaattcctgacctcaagtgatccgccagcytcggccttccaaagtgttaggattacaggcatgagccaccatgcccggccaagacaagttctattatcaccactattttgtagctgaggagttccagggagcccggaattcaaatccagatgtgattgcatggtggatttttcttaatatcctgttgaggggatgggggagcaattacacacgtgtttattcattcactcaacagacatttttgagcactgactcttactactcctggttaggtggtgagaatagaaagacaagaaacagccccatttctgtagaagctccatgctgaggccaagggactgaaggtcaacagttacagcattatgatcagagctgcgacagccacgtgtagagccctaagacctgttgatgccacggctttccttggggcttcccctgcctctgggtagtgaaggtcacagtcactgcctcccagggtaggctctcagcactcaggactctgtgtctcayagcctcatttcttctctctgaacagggacttcaaaatgagcgtccctgactacatgcagtgtgctgaggaccaccagacgctgctcgtggtggtccagcctgtgggcatcgtctccgaggagaacttcttcaggatctataagaggatttgctctgtgagtcagatcagcgtgcgggactcccagcgagtcctctacatccgctacaggcaccactacccacccgagaacaacgagtggggygacttccagacccaccgcaaagtcgtgggcctcatcaccatcacagactgcttctcggccaaggactggccacagaccttygagaagttccacgtgcagaaggagatctacggctccacactgtatgactcccggctctttgtcttcggrctgcagggggagatcgtggagcagccgcgcaccgacgtggcyttctaccccaaytacgaggactgccagacggtggagaagagaatcgaggacttcatygagtcactgttcatcgtgctggagtccaagcgtctggacagagccacagacaagtctggggataagatcccccttctctgtgtcccgtttgagaaaaargactttgtaggactggacacagacagcaggtaagcttacctagagacccaggccccttggcttccctgcrtcagaaagggaaagcacagggcagaatttcattgcagcaaggagtagaaaggtgttgtccattggtttttaaaactaatgactttctgtcagaatctgtttgagtgctgctaaaaaaaccaaccaaacaaaaaccagtgacttttaaagacagagacagcctttggttgggggagtcctttagagttgtcttgtacactcccctctttttagtggggctcccctcgtgggactcctggagctctgtcccatacagcagccacagccagttgtggcttttgggcactagacacgaggctagttttagttgagatgggctgtgaataaaacccacgccagattttgagacttacttctgaaaaaataaactttcttgctaatttttttttgagacagagtcttactctgtctctcaggctggagtgcagtggcgcgatcttggctcagtgcaacctgcacctcccgggttcaagtgattctcatgcctcagcctcccaagtagctgggactacaggcaggtgccaccatgcctggctaagttttgtatctttaatagagacaggatcttgccacgttggccaggctggtcttgaactcctggccttgagtgatctgcctgccttggcctcccaaagtgctgggattacaggtgtgagcctctgtgcctggccaactttcttgctaatatgttttatacagattacatgttgaaatgatagtattttacatatcttaggttaaataaactatattttaaaaatcagtatcaactgtttcattcttacttttaaaaatgtggcaactagaaactgaaatgtacttacgtggcttgcattttatttctgttggacagcactgtgctagagcacagtttgaacasttttattcagtctcgtccctttggttcacagatgagagggtgaatctggagaggtaagggctaggtcctagctgagctagaagtagagcccacgtctccggattgccrggctgtgcaccctgcgtatgtggctactttttccctcctgatggccacagtgtcgaattcctcacttacaragcagccaagcatggatatcaggatgccagaaataccacctgggagctcctaaacagctaccktatacaaatgaaaagtatgtctgttctctctgtgtacaaggaktgttggatagagcaggaaaaggtcagcttcccatcttgcctgttattaagtcaaaaactttatttcaaatcaaaattgcagatgagctcttccttgccacttccttccactctctgcttgctgctgtgtcttgccatggtggctgttctgcagagctggatgagatgcaagcctaggcagcagctgtttgccaagagggcgtccccatttgccagggaaagtgatgtgtcactgtgtcagtcactggcctcctggcttggacagggctctccctcctcctgtataggattggctgatgagccacaggtgaggattcagtgatgtaaggtgcatgccaccatagtgcctgctgcaaagtaggtgctcagtatgtttctgaaatttatctaaggtcacacggtgtcgttctggttgttggtaagtatgaggagagatgatcacagaattgagacacagtagtcttaaatccagccctcagagttggaagcatggaatagcctcagtcgcacctgcctgtggtgctttgcagggtctggaaggaaggaattttcatttcttcacccaaatgtgcatatttggcttaaggaaaggaaaaggcatgctgtagacctgctctgtgtttaatcctcacggcagccctgtgatctacacggggttgctgtgctggctgatgtggggctgaggcagcaaggtttagagacccgggcagccaccaagcagcagagctgatataagcaccaggtctgtctctgaggcccggggcctttctacctcacctcgttgccttctgctgcgcctcctgtgcctcgtgaatagcgcacactgctgtccagccagcaggcactgtgggagtcatccctgataaggtgttgctgtatggtgtgcacagcttggcggccacctgccaggtyggcagggagtggcctgcccctgctttacagagaaggggtgaggggttgaagctcacaggcagcatgggtcaggaatcctgctctgaccccttgactcatgccttcctcctttgccacatgggcatcagtgacatttttcagtcatccacttcttggctgtgaggttgcagatccaccttcaaatgccaggtcttttttgccttttgaaatctgagctcacaactctgcaggaggagcgggagtgtgctgtgacgcagtgcgtcacgcatagtggataatgactgacaagtgtttgttagagccttcatatgccaggcatggctccaggcactgaaaatacagtggcacataaagctgcttgctcactgtagtgggacagccgcaattagacatcagttagcatttgaacttcagtgagataatgacaccagtgaactcaaatcaaatacatcctcctctcataatgggtaacctgttgttgcttttgtttctccatggttctctaatttttttttttttttttttttgagatggtgtcttgctctgtcacccaggctggagtgtggtggtgcagtctcggctcactgcaacctccacctcctgggctcaagcgattctttgtgcctcagcctcctgagtagctgggattacaggcgtgcgccaccacactcagctaatttttgtatttttagtagagacagggtttcaccatgttggccaggctggtctcgaactcctgacctcaagtgatccacctgcctcggcctcccaaagtgctgggattacaggtgtgagccacagtgcctggccggttctctaatttttgaaggaatgctttggtgcaggaacaaagccttgtctcccctgcagctcttggtaggagtgaggaagtgtccaacctgaaatggggtggtattttgtagctcaacaggaaatgtccagatgtaaggccagttttggtttgacacattgaccatactgataggcctcctgacaggtcattctaccttcgggacctggagttccccggtacacgaggtgtaggtgtaatttacttaccagctcacatgtgcccctcatgaaaacccatggcccattcttgtccatgtagtgttgtagttatcaaaattatttctgttcttatatgtttctaatttttgcttgttcctctttcttttctttttctttttctttttttctgtcatactgccctgtgagtgtgttattgggtctgaaaaggtaggctgtcaacatgttgcattaaaaatagctagatttccctatgtgctgccttctcatagccttcactgctttaaaaaacaaacactgctgtctaaatctatatgttaactggatagtcttttcatttttttaaaatatgttttttaattttagcttttttttagcaggtaacccattggcgtttggtgtttgctaaaatatttgctctgggggatcttgttcagtctgtagcatttagtgacacaccagcctttattctttggtttgtttgttttgaggaagtgaattgctaattgatttaggcggctttagggggttttcctgggatagcttaactgcaaaagtcccaggctgcagcgccatgcttgatcctgggcttctgagcgaacgtttctggcctgtgattcccggctgtggctgtgggccgtgcatgaaggcaaggaatgctggagctggagtgtgctggtggccaggggagctgcgggagggtgcggctgtcttttcttttgcttctgcctggagcatgccatttcccatttccttcacctcagcgactttccaccataaaggagacacaggccattctaaaacccacaccaggctgggcgcggtggttcacatctgaaatcccagcactttggaaggcggaggtgggtggatcacctgaggtcaacatggtgaaaccctgtctgtaccaaaaataaaaaagttagccgggcgtggtgtcatgtgcctgtagtcccagcttacttgagaggctgaggcaagagaattacttgaatctgggaggcagaagttgcagtgagccgagctcatgccattgcactctagcctgggcgacaagagcgaaactccatctcaaaataaaaaacaaaaaaacccacaccagtcttttgcgccccttatgagggctcaagggcaatttgtttaagtgtcagggaaatacggccttctagttcacttgcatcttgcagacacaaggccctgtataagtgaccactttcctttttgcttctgccaatgagcattcagaaccagagaggcagttcaaccttagctattgtacagactttccatttaacctcatgtaggtaagacatagaaataactgtgtctgcttttttttttttttttttttgagacagagtcttactctytcgcccaggctggagtgcagtggcgcgatcctggctcactgcaaactccacctcctgggttgaagcaattctcctgcttcagcctctcaagtagctgggattacaggcatgtgccaccacaccaggctagttttttgtatttttagtacagacagggtttcactatgttggccaggctggtctcgaactcctgacctcaagtgatccacctgccttggcctcccaaagtgctgggattataggcatgagccactgcaccaagccagtgtctgcatttgttgacgctaatgtccctcactggtggcacatcatttgtttgcattactgatctagagtctccaacaccaagggcagccctgcaggacactctttggctggcctagtcccctgtggtttcatccccctcagggaaaggttctcgctctgtgacctgctgccaccacctcactgcccaggggccttgtttcttcctcagtgctctggtccaagtaccaacactttctttcttcatttgctttgtcccagttgagacaggctgggctttctgaaagatttcatcacattctagggtggtggaacagaagagacatgaatgtattaagtacaggaagtcgtagctgtccagcttggaaaatgcagggcagggatccagtggtggctggtttaaccctgggttgtgggccttttctgccgccactggctcccaggatccatggggacagcctggcccgggctccctcctcccctgctctcctggcagccgagtctcggagttcacaacccaggtgctctcctggaccgcaggcccttcagagttcagaccacaggagagtcttgagtccttgtcctgggctgtcctctccacctcctgtgtgagagacaagcgcctttcctaagtgacctgtgccaggagagacctccctcattagcaggtgacctccagaggtgactcagcacacatttacgggaagcttgccatgtgctgtgctaggtgctggggcacgaagctgtgatatactttagagacagaggtggggaagagatgatggacagaaaggagaaatctgtctgagagtgtgactcgaacagagtagccggtgggctgtttcttaccatgggggaaactgggaggccatgggggaagtgtttttgagatgcctgttgggcattcaaacggagagattaaagaggcaatcggatgtgagtccggagctcaggggcaggaggtggactagagagacacatggttgttggcagtatgtagcctgtgttgaaaaccctgaaggtggatgagctgagcgagggagaatgcagatggaggtaggaggaaggccccgggctgacccctgggtgcttgctgtgaccaggagactggaggacagcccagatcctgttttttttttttttcctgagattggagtttcactcttgttgcccgtgctggaatgcagtggtaccatctcagctcactgcaacctccgcctccccggttcaagtgattctccagccttgcctcctaagtagctaggattacaagcatctgcaaccatgccccactaattttgtatttttagtagagatggggggggtctcaccatgttggctaggctggtcttgaacgcctgacctcaggtgatcctcctgcttcagtctcccaaagtgttgaggttacaggcgtgagccactgctcctgactggggttttctatattattccacggagttaggggttttaggtgcagctgccacttcttctaaaggtactgggggtggggctgctactaaagaaatccgaagggaatgatgtggccagatttgcccttcaccgcctccgtcctggcagcaggatggagtcccagctgaacagactgtctttcccatggacccagaagggcagatcaggaagggcatcttgaggagagaggtgctggggaattgggggagggactgttggatagttctggaatagctctttttaacaaaagataaaaaacacaaaacaaaaccctcttatgaacattgtagttactattgaggaagcagttcttttttttttttttttttgagacagagtctcactctgttgcccaggctggagggcagtggcatgttctctgctcactgcaacctctgcatcccaggttcaagcaattcttttgcctcagcctcctgagtagctgggactacaggtgtgtgccaccatgcccggctaatctttttttttttttttttttttttttgagatggagtctagctctgtcgcccaggctggagtgcagtggcgtgatcttggctcactgcaagctccgcctccccggttcaggccattctcctgcctcagtctcccgagtagctgggattacaggagcccgccaccacgcctggctaattttgtgtttttagtagagatggggtttcaccatgttggccaggctggtctcaaactcctgacctcaggtgatctgcccgcctcggcctcccagaatgctggtattacaggcgtgagccaccatgcccggcctaattttagtatttttagtagagacagggttttgctatgttggacaggctgttctcgaactcctggcttcaaatgatctgcctgcctcggcttcccaaagtgctgagatttcaggtgtgagccactgcgcccagctgctctggcatcttaagtttgtctgctttggtgctttagctctaccatgtgggcaccttttagtatacttactgtatttacatcaggcacgtagtcaaaaggctccccaccccaaaacattgtagtgcaaaattatgggctgtagccattatttaagtatacaaagacttctttttttttttttgagatggagtcttgctctgtcgcccacgctggagtgcagtggcgcgatcttggctcactgcaagctccgcctcccgggttcacaccattctcctgcctcagcctcctgattagctgggactacaggcgcccaccaccacgcctggctaattttttgtattttttagtagagacggggtttcatcatgttagccaggatggtctcgatctcctgactttgtgatctgcccgcctcggcctcccaaagtgctgggattacaggtgtgagccaccgcgcctggctttttttttttttttttttttttgagatggagtctcgctccgttgccaggccagagtgcagtggtgccatctcagctcactgcaacctctgccttccgggttcaagcgattctcctgcctcagcctcctgagtagctgggactacaggcacgtgccaccatgcccagctaattcttgtatttttagtagagatggggtttcaccatgttggccaggatggtctctatctcttaactttgtgatccgcctgcctcggcctcccatagtgctgggattacaggcatgagccacctcgccaggcccaaagacttcttaaactgtgtaataccatccccgaccctgcaaaagagattctctctatccaggttcccttggattttaattgcaaactgttgttgttgagcagctttagcttttctttggatttgaatgtagaaatttatttgccagataaattgttttttggactagaataccaagctcttgttttccataagccatataaatagtaccaaaatcagaaaaatattaagcattttcttcttttttttttttttttgacagaggctcgctctgtcgaccaggytggagtgcagtggygcaatcttagctcactgcaagctccgcctcccaggttcacaccattctcctgcctcagcctcccgagtagctgggactacggcgcctgccaccacgcccggctaattttttgtattttcagtagacacggggttttgccgtgttagccaggatggtctcaatctcctgaccttgtgatccacccgcctcggcctcccaaagtgctgggattacaggtgtaagccactgtgcctggcctcattttgtttttatacaatttaaaatatttgtatggttttattgtattatgactttcatatgaaaaactataagagtatttatatgactttttgtaaaagtcctatgttttcaaaacaaattgtttatcataatgtttgcacttttaaaaacaagttatgtatttagaagatgctactagaaaaatatttttgaaattttgtgggttatattttgctacagcaggtgtacacttttgtgaagttcatgtgaagatgtaataatttactcctttctttttttaagggacaggatcttggtctgttgcccagattagagagcagtggcaaaatcatggctcactgcagtctcgaattccagggctcaagtgatcctcctgcctctgcctcctgagtagctgggactacaggtgggagccaccatgccaagctamttaaaacaattttttttgtaggctgggcacagtggctgactcctataaatctagcactgtgggaggccaaggcaggtggattgcttgggcccaggagttccagaccagcctgggcaacatggtgagaccttgtctctacaaaaaatataaatattagctgagcaaggggttgtgtgcctgtagtcccagttacttgggaggctgaggtgggaggatcacctgagcctttgtagagacatggtcttgctctgttgcccagccgtctcgaagtcctagccttaagtgatcctcctgccttggcctcccaaagtggtggtattacaggtatgagccaccatgcctgacctaatttacttctttaggatgctttaaagcaaatcttttctaattggttaggagtaaagttttgttgttgctttaaagtctaatttaaaatatattaaactaatatacagtagtatttgtaaacttattcatgtattaagagttgacagttatgttactggtggaggaaaatgtccatttggatactgagtttttttttcccatttggaacaggataacataccaaggaagtgagcaaaacactgtctacctttgagagtaagagctggctgggcaaagaactgtaatcccagctctttgggaggctgaggcaagaggatcacttgagcccaggagttcgagaccagcttgagcaacataaggagaccctatctctacaaaaaataaaaaacaattagccaggtgttgtggtgcacacctgtggtcccagttactggggaggctgaggtgggaggatctcttgagcccaggacttggaggttgcagtgagctgtgattgtgccactgggctccagcctgggcagcagaataagaccttgtctccaaaaaaaaaaaaaaaaaaaaaaagtaacagtgttctagaaacacatcaaggacacttaacccaaagtgcagaggttggagtcagggaaggcttccttgagaacctggtcattgagatgagcctaaaagagagtggaagttgtgaggcggatagagcctgaggttgggggacttcagcgttgcagcaaggttgcctgtggagtgcaaagccacagtggtaggaggggaagccagagccgtgggaggggctagctatggactgcatgcctctccctacgactgaattgagcmtcctgtgaaaggtttgcagtgggggagggacacagactgatttgtgctttgggaaggacactctggctgtgtgtgtatagaagcaatgaaggggaagggggtgcagggtgaggagtcagagactaggcggaggctgctgaggtgactgctgttgggatgggaagagcagctcagatgcctttcttttcttttcttttttttttgggagtctcaccctgtcccccaggctggagtgcagtggcatgatctcggctcactgcaacctccgcctcccgggttcaagtgattctcctgcctcagcctcctgagtagctgggactacaggcgcgtgccaccacgcccggctaattttttgtatttttagtagagatggggtttcaycgtgttagccaggatggtctcgatctcctgaccttgtgatccgcccgcctcggtctcccaaagtgctgggattacaggcgtgagccactgcaccctgctagatgctgtattttcttatggggagggtctgttagcaggggccatcctgacactgccttgtggccaggaaggagacaaacgaaggctggcgtttctttttctttctgcgtctgccttacgttgtgatctttgtttaaaacttattcagaatggaaatgctaaattccagagtaacaaagagtttgttgaactcgttagagttacacatgataggatttaacattgtattgagatgtgtcaataacattcatttacttagaaacgtcacatcttctggatttccagaggagttttattcttgataagtttgctttcttgatgagggaaagtttaatccagctgcagtttttctttaaaaaaaaaatcatctatcttaagaaatataacatttaaaggttagatgtatttaaaaatgataaaaggaatactttggtacagtttctttggtttctgagttgattagggactcagaagcctttgcattatttagtggtatatccttgccaatatttaaagagctgttagtgagcaccccaggccctgctctctggaagctttcctaaagcttgccctgaaatagcgaggatgaacgtcttgtttgctaaagccaaatggttggctaataagactcagcatagctgtctttataaaataataagaggtttgatgttaagaagtggaagataattgatttttttaaaaagctgaaacataaacttccttatgctaatgttacaactggaaaatctaaaaagaaaaatccaactgtaacattgcctacgtgaaagacatggtagaagtccttacgtaccgatcacctttaaacaaattgcttggcagtacatttttgaaattaagaccactccagctcacataactggcaatgattattgctgacttaaaattatagagcctacagttgccttcttagcatttttagtagtgagagaattgaatagtgcttagtcagagtgctttctgggtgggagttgtatagtaataaagatacattttcatgtattttctagacaytacaagaagcggtgccaaggccgcatgcggaagcacgtgggggacctgtgcctgcaggcagggatgctgcaggactccctggtgcattaccacatgtcggtggagctgctgcgttctgtgaatgactttctgtggcttggaggtaagatgagctgatgaagatgatctgatatgtaattgtttcaactgttaattaaaatgagaggctgggtgcggtggctcacgcctgtaatcccagcactttgggaggctacggcaggccaaatrtgaggtcaagagattgagaccatcctggccaacatggygaaaccacgtctctactaaaaatacamaaattagctgggcgtggtggcacgcgcctatagtcccagctactygggaggcggaggcagcagaatttcttgaaccaggaggcagaagttgcagtgagcagaggttgyrcaactgcactccagcctggcaacagagcgagactccatctcaaaaaaaaataaaataaaataaaaaaagaaatgagaggaaacggcagaagaaattccccaaaaagaagggatgagggaggaaaagcagccagcctgtgctggttgccacgagcagtggcctgggatgcttccctgctgtatctgctgccctcctcccaccctgccatgcgtcctctgaaggaggccctgcccacactttcccttttcctctgttcttagtataccttgccctctgctttggatgccgttccccatgatcttcacctcttagactcctccctcaaaacctcctccatgtgtcacatgatgaatggataaacgaaatgtggtatgggcatacagcggaatattattcagccatgaaaagsagtgaaattgtgataccactgcagcacggatgaaccttgacaactttgtgctaagtgagagaaggcaggcatgaaaaaggccgcagattgtatgattctatatatatgaagtggctagaataggcaaatctatagaagcagaaagtagacaactggttctaggggctgggaggagggggaatgggaagtgacagttaacgggcataaggtttctttctggggtgatgaaaatgttccagagtcagttagtggtgatggttgcacagttgtgaatatactaaaaactgctgacttgcacactttaagtgggtgaattatatggtatgtgaactctatgtcaatcttaaaaattaaaagaaagggaagaagaaatcctacttcaaagcacagccatctctgatcccccgcagcagtyggcagagcgggtgccctgcctgagatgttgctgacacttcgtggtggaatcggatgtctgtgtgtggtcttccctttggggactgcgcctcctggaggtggtcctgggaggatggactggctgagtccattgtgtgggtaaggactaaaacagggttctttcgttgaggttgacagtttagcaaggacacctgtcagccacttatgataatacaagtcggaatgaagtaatgaggtgagttctgtaacagaagtttaacgaggtgccgtagaacatattaaatataacaaattctttcgttcttggggacggagtctcgctctgttgcccaggctggagtgcagtggcatgatcttggctcactgcaatctccgcctcctgggttcaagcgattctcctgcctcagccttccgagtagctgggacttacaggcatgcactaccacacccggctaaattttctatttttagtagagacggggttttgcgatgttggccgagctgctcttgaactcgacctcagctgatatgcctgccttggcctcccagagtgctgggattacaggcataagccactgtgcccagccaaatataagaaatacttcaaacggccaggcatggtggctcatgcctgtaatcccaacacttctacaaaaaataaaaaataaaaaaatcttacttcacctcacttctacaaaacaaaattaaaaaacattaactgggtggagaccagcctgagcaacatagggagacctcacttctaccaaaawaaaaataaaataaaataaaataaaaagacattagctgggcttggtggtctgtgcctgtagtcccagctacttgtgagggtgaggcaggaggatcgcttgggctcaggaggtcaaggctgcagtgagccacgatcgcaccactgcactccatcctgagcaagagtgagactttgtctcttaagaaaaaaccaaaataaaacttaaaatggacttaaatttagttttttaaagaggctagggaaatagaagtggggaaagaaagggagtaagaattagggatggaaaagaaaagagaatcagataaaggattatgcaggctgagaaagacatagttttacttggttttcttgaaagagcrttgtctccctaagtactccttattgtatcaattagagaatctgtgcatctcccagtgggctctgagactagggcatgtgcagcaggtgcttctccagaaagactggtactgcccatatgccttccccatgcggcgctggactggatgaggagggctcctaaagggcacacagagaaggacggtgctgtgtgccgtgggcctcttccatgctcagcctctcagaagtggacagtggagttgtccacaagctacttaggcctgacatcacagcagactgaatgtagaagctgatagaagatccagctgacttgtattaactctgatattaaagaaatgtgtgaacatgtcaaataatgccattcytccagtactttatttttgttttggaaaacaattatttttcataaaactgttaacacatgacaagcttattattttattttttatttttatttttttgagtcagtctcactctgtcgcccaggctggagtgcaatggcgtgatttcagctcactgaaacttccatttcccaggttcaagcgattmtcttgcctcagcctcccgagtagctggggctacaggtgtgtkttatcatgcctggccaatttttgtatttttagtagagtcagggtttcaccatgttggccaggctggtcttgaactcctgacctcaagtgatccacccaccttggcttcccaaagtgctgggattactggcatgagccactgcgtctggcctattttaagaggaattaatacataaatacttaaatccttttctcagttttattttccaatatggtaaatatctacaggtgtaacccacatcacaaaaaaagctctttgtgatcctaagtcatttttaagagcatcaaggagtttttagaccaaaagtttaaggagcactgagttaatggataaagatgatagagatgaatactgtggcacaccttctaaggcatgtggcatagctggagattattaggttgttacgtcatgagagaagaacggactgtgtagcgagttaatatggctgtttttgaggaagagggaggactacarcctcaaaaggagcagatgcctatggggtgcatggtctggaaaggcattctggtcttgctttggtgctattactgtgaaatattttcaatccagggcactttctgttatacatctctgtagctccagaacctggcgcagtctgccacacagtttgtgcaggaatgccggccacgtgaatggatgaacgcagaggctggcctgttttacgtgtgcagtcagccctgcagggaaaccttgagtgtggtgagagtgttctgcattgcctgcctggacatgggcatgggaaagacaggtggcaagttcccatttgcaaaaaactagtgatctttaggtttgatctttgttttgggagaaaaattggcatttccaaataatccacctgtttaaatcattgttagttactgcagtttgagctaatgaagggtcactgacttgactaatgatgctggtttttgttttttgttttcttaatgcccagctgccctggaaggattgtgttcagcttctgtcatctatcactatcctggtggaactggtgggaagagtggagctcggaggttccagggcagcacccttcctgctgaagcagccaatagacaccggccaggtgagctctgccctttttccggcctctgctcacttgcagtctttaaataaagcagactcatttgttactttttcctttgagttaggactaatatttaaataaactgtaaaatctgttgagtcagtaatttttttttttttttgagacagagtcttgcactgttgcccgggctggagtgcagtggcgcaatctcggctcaccacagcctccacctcccaggttcaagcaattctcctccctcagcctcctgactagttgggattacaggcgcccgccaccacacatggctaattttttgtatttttaatagaggcggggtttcactatgttggccaggctggtctcgaatgcttgacctcgtgatccacccgcctcggcctcccaaagtgctgggattacaggcgtgagccaccatgccctgcccagaaatcttgtatgagacattttgttctgattttattgaatactttcaatcttactgaataccactaatgggttagaatgattggttgatttctggaatacttgtgtaaaatttcctggtagaacagacttgaggttctgtgtctaagtcttttttataattttatgtattaggagaagctagtcccagaggtcaattttaataagctgattcagggcctgggagcagtttcttattttattggctgatgacattctctcaatgagttgtttgatttgcttatgcttggtagaaccaatgaagagtgagaaaacttcttgggtagagcagacccacgaatgctgaatgaacatgaacgttttggtccttgatgaatgaacctgcctttaatggctcaggatttagtcatcatgttgcataggtcacaaagaaggaagcaacaaaataatgaaagcagggatttattgaaaacgaaagtacactccacagtgtgggagtgggccgagcagcgggctcaagggcacggatacagaatcttcttgggtctaaatacccactagaagtttcccattggccacttcatgctcacctcttgtaaatgaagtggtagcctgcagttagtctgattggttgcggaaagcagccactcagaggctaaggtgaagttacaaagttatgcttctatgcaaatgaaaagtagacaaagttatacttctctgcaaactaagactccaccagcaatcagtctgagtggttcyggacagccagtttcccacctgccatgcagaaaaggtcaaagggagcagcctctggtccttttgttacttagtcatggaaagttagggttttcctttcaatgtagttgtaggaagtctgtgtgaaacaaccttaagttctttgcctctagatcctattcttctgcctcaggcttatcttttttgtgattgagaaaattttgatttttttcctgtatctgtaatagatgagaaaagtaaaaacgttgatttgacatcagttacttttcctttatagattgactacaaggggacattgttgaatagattatgtgtgtttttgttgttgttgttgttgttttttgagacagagtctcgctctgtcacctgggctggagtgcagtggctcaatctcggctcactgcaacttctacttcttgggttttagtggttctcctgcctcagcctcccgagtagctgggattacaggtgcccgtcaccacacctggctaatttttgtaaatttcagtagagatgcggtttcaccatgttggccaggctggtcttgaactccagaccataagtgatctgcctgcctcggcctcccaaagtgttgggattacaggtgtgagccaccgctcctggcctgtgtgttgttttttgagacagagtcttgctctgttgcccaggctgaagtgcagcagcatgatctcggctcactataacctctgcctcccgggctcaagtgattcttgtgtctcagcctcctgagtaacaggattacaagtgtgtgctaccatgcccagctaatttttgtagagacgaggtttcgccatgttggccaggctagtctccaactcctgactcaagtgatccacccgcttcggcctcccaaagtgctgggattacaggtgtgagcactgtgcttggccgattatgctgttttaatatataaataaatgtgtttgtatttcaacaaaattgtatgattaatagttggcagtcctttgggaagtatttttttgtaagacacttaggctatttactgactgaaatatagagacatgactttttttttttttgatacagagtcttgctctgttgcccaggctggagtgcagtggcgcgatctcggctcactgcaacctccgcctcccgggttcacgtcattctcctgcctcagcctcccgagtagctgggactacaggcgtccgccaccacgcctggctaattttttgtatttttagtagagacaggatttcaccgtgttagccaggatggtatcgatctcctgacttcatgatctgcccgcctcggcctcccaaagtgctgggattacaggcgtgagccactgtgcccggccagacgtgacttttatgattatagggttggtatagattaaggtggcttttggtatagtgcaaaatccaaggactaggagaaagctttgccactgattgctagaagaacaaattctctgggtctcaacctcactacctgtagaatgaagagagtgggccagatgctcgagttttcttcctgttctaagattagtttctatgagcctgtgtcttctgtttatatttaggggtgttaaagtttttggattaaatactgaatactgttcccttccttgaagcagatttcagtatgtgctagttacacttttagttatggtctctgagcatcgtattttaaaaagccctgttgatcatttcttattatgccaacaattaaatttgttacctttttttttcagcaacctggaaagacctttctggccataggtggcgctgttgtacacatatatttttaatgtcctaatttccctgttggtgaaagaagacttagacaaggcttccttcatttgaattttgctgttgttgttgtttaatgctttagaatagcactatgcccattatatttggatacctggaaaagtattctagttatttttattatgtcatttcagcatgaaaatttcagatgtgcaatgtggacagtggtgaaattggacttttcttccaatgtcagaaggcagtcagccatgatttataaaagagatagaaacygtctggagcaccttaaagctgaaaagaatctggaactccctgagtattgcacccagttttgcatgtttgctagtgggtggtgttgtggtgtcatggaaaagcctcgttcagctggcttgtgtctgaatgcaagtcctacagttctttctcaggtgccccccacctcctcgctctgcatctatgagcaggggctcctaatttctgctttgtagaattgtgagaattagagagaatgtgtgcaaaatgtttagcgtggcagtcatctcataaaatatctcacgaccattagctattattttatatgaagtcatcattttatagtgtttggaaattactaaggcattgaaataggaaaaatgttttcgtgaagagagactcaggaaatgaaggaaatatttgaggtgggtcagtagtttttatttttatttttttttttgagacagagtctcactctgtcgccgaggccggagtgcagtagctcactgcaacctctgtctcctgggttcaagcaattctcctgcctcagcctcccgagtagctgggattacaggcacccaccactacgcccggctagtttttatatttttagtagagacggggtttcaccatgttggccaggctggtcttgaactcctgacctcaggtgatccgcctgccttggcctcccaaagtgctgggattacaggcgtgagccaccgcgcccggcgaggagggtcagtagttcttatacccataatttagctgcaggtttagagacatggccgttatgtagccatcttgacctacccaagccacagaattatttgtggattagtatatgttggggcttaaaggggcccaataaaaacacccctgttttcttcaacaaccaactgagagacgagacaagagtaaggtagagaataaaaattccgcccttattagtgatgaaaccacattctctgccgggcatggtggctcacacctgtaatcctagcactttgggaggccacagtgcatggatcgcttgagcccaggaatttgagaccagcctgggcaacatggtgaaatcctatctctacaaaaaatacaaaaaattagcctgggatgttggcgcgtgcctgtagtcccagctactcaagaggctgagttgggaggattgcttgagcccaggaggcagaggttgcagtgagctgagattctgccactgcactccagcctgggctacagggcaagaccttgtcttaaaaaacaaaaaacaacccccacattttccatgaacttgagggatgcagaaaaatgggcatcctactactgtgtgtccaagatctggtggctctgggccacagcagaccttcctacgaggggccctctccctgtcagccataggcatggcggagcagaacatcccgtgtgcttcctgagtgcagcacccaagggcaaaagaaggggttcacatgcccagcttgtctcccaaactcatcttacacctcactccacttgggtgggggaggaatgggggtgggcaagaggtcagtggtgcttaggacaaagcctttattatggaaaccagaggagtgaagagcaagtgccatcttccccctcagtttaaataggtcatggggtgacagttctttctttgtaacacagaaataaggatatcctttgctatttagactagtaaggaaatacaaaggatgattagaagggacatttgtaaaatcactgtaacagataacattttttttttttttttgggatggagtctcactctgtcatccaggctggagtgcaatgtcgtgatctcggctcactgcaacctctgcgtcccgggttcgagtgattctcctgcctcagcctcccaagtagctgggattacaggcgcctgccacctcgcccagctaatttttgtatgtttagtggagacacggtttcgctatgttggccaagctggtctcgaactcctgacatcaggtgatctgcccacctcggcctcccaaagtgctggaattacaggcgtgagccaccacacctggctgataacatctgttgaacatttaaaatgtgctacacacattttatttatttttatttttttgagatagagtctcactctgttgccaggctggagtgcaatggcacaatcttggctcactgcaaccgctgcctcccgggttcaagcaattctcgtgcctcagcctccccagtagctgggattacaggtgtgcaccaccatgaccagctaattttcgtatttttagtagagatgtgggttcaccatgttggccaggctggtcgcaaactcctgacctcaagtgatccacccacctcggcctctacacacattttatatacaccaatttaaccctttaatcttcacaacaaccagataaggtaggttggattattatcccagttttacagatgtggaaactgaggcatagacaggttgaggaacttgaccaaggttatggagctagtaagtggcagagctgggatttaaatcctggcagttggccaggtgcagtggctcacacctgtaatcccagcactgggaggccamggtgggcagatcacgaggtcaggagttcaagaccagcctggccaatatggtaaaaccccgtgtctactgaaaatacaacaacaacaaaaaattagctggacgtggtggtgcgcacctgtagtcccagccacttgggaggctgaggcagaagaattgcttgaacccgggaagcggaggttgcagtgagccaggattgtgccactgcactccagcctgggcgacagagtgagactctgtctcaaaaaaaaaaaaacaaaaacagaaaaacaaaaaacaaaacaaaaaacccctggcagtcgggctgagcttcagtagattggcttccggggtttagaggtatcagcatatctacagttccatgtatacatctatacatcagtcagggggttggccagtgtggaaagggtgggacagagagagttatgcagcgctggcatttgtgtcttggccactgtccacagagagtgcactgcggtttgcattaatcatttgtgtaggcagcaggtttctccctgtaacagaactttagtccatcaaattcatctagaaaactcctgttcagagaaagtggagttttctagatgaacttgatttgtatttcaacaaaatacaactactgaattctgtttcagggaagggagtggtattcagttccccatctgaacactttaatgcccctaaatataaacaaaagatgaggctcacagaggcttaccttagaacaggaacaaactgaagcatcggcccactctcttcattttacaggcaggggtgatggtgtgaggctttgttattcaggtgtcaggatcctgctgtagaggtgacaaccactaggaaagggcctagaaaccagcatttggtgtgtgagggcatcctctgtaatggtcccaaatgagacgtatggacctgatttctacttatctcctgcctgtgatttggcctttgaagagaaaatgtgctgatcgttgaaccctgatattttggtctgattgataattttgtgtctcccgttacattaatagttaaacctccagttttcctacactggtctcttacaagtttggttaatgtgaaatcagtccactagaggctgatgatactaatagtcaaatgattgatgattgtgataataactctggggcatcaaaagtttaactcatatcccctacctaaaggacatggcatagtataatatatttggccaggttcttcacagaacaaaacgtttctaggttatctggaaatccagacttcctcaaggtctgtgcagctgaacgtctgctcagtgcagaccttggacctggtgttgtggcgtgtgtggcggtggggcttcccttggctcctctgggcttcagtctccccataggcagggagggttaatatctgtttattttgtagggttgctctgaaggtcatacatgatatttgttaagcatcatgcttggcagaaaggtgttattcaatggaaaacacctgttttttattttaatggtggcgtcaagattgcagtgatttttagtctgcgtttacaaacagatggctgtacacaaaatagctcttaaatagcaccataatcatggggcctcttctctgtgtagacaattgaatacatgtgctatttccataagattattgggacatacctttttgaatcttcttaacatgtttaaaaatgaaaatagctaatgataaacatgactcttggaaccagtaccccttgaggtgtgttttgccatgatgggaaattgcattctatagagaagttgaattggatcacacagatgtttgggtagtttagcagaccaccaaggctttcaaaagtttcttcataatagtgaagttaatagttttgtattttaagctaactacaaagctaccttctaaaagctggaaatctttaacttgatgaagtgtccaattattctgtgtgtgtatgtgtgtgtgtgtgtgtgtgtgtgtgagagagagatatatatatagagagatgtattttaggggggttgtgaaaagttccacagagccactggcaccttttctcccccattctaggctgctgacatacatttgcacaaataataatcctttgtcacttggcttatttgtggaaataaggaattgtcatacttgtttaagaagagctggcaggccgggcatggtgggtcatgcctgtaatcccagcagtttgagaccagcctggctaacatggtgaaacccgtctctactaaaaatacaaaaaaaaaaaaaaaattagccggtcgtggtggcgcacgcctgtagtcccagctacttgggaggctgaggcaggagaattgctggaacctgggaggcagaggatgaagtgagctgagatcacgccactgcactccagcctgggcaacagagcaagactctgtctcagaaaagaaaaaaaaaaaaagaactgggagcatgaacatagaaagtgggaaggcagagaggtgaggaggcacttaacaatttgtttagggtatgagtaatagtagcttttcttttctcttttcctgtctgaagcaaaaaggcaccaaacttgtaacatactgttcctcagaattgcttttctgatcagatacaagtcagatttttctctaggctatrtgaattatgaaatgtgttttagtagttatttttaaaagtagttttgttttccaaataaaataccataatctgttctttcttccaggggcacaggaagttctcattgatccaggtacatgatctatgtgtttagtttcttttggttatttttttaagtgcttgtttcatggtgatgtgaatgaatggttaaaatttctggatgatgatctttggaacattctgatttaagtaactttaaatcagaactgttaaaagcttgatgattgattggtgggtccttgcttgatgggcaccccgttgctttatgttgtctgttgaagaggaggcttcttcctctagcatggctaagtgaatgatttgagaattgtgcctttaattctttgaatgcattgagcatgtttgtcctgttaattttgaattcatttgtaatcacgactttgctctgatttgtggcttgtgctcccttccacgtgagttaattctctactgcatttcgtctgtgtgttcttaacagggaaagaaatctcgtagtttttacaaaggcaggtttttcttccccttgtaatatcttctgtaattaatacagcaaaaacctcttttattacagtgcttaattatttcatgatgagctctattattttctgacttaatgagaaacaatgacagggtaaataatacaaaatgaaaacagtctagaattgaaatcagatggctgtgcttacacagcctttgtgactaacacattcgctttcatcgcctcgtgcatcttggctytgaaatgaagttgccccaggtttgcaggcgttggttttaacatttgcgttcactcctttctctaggccgtggctaagtttcctgatggagtttgtggaatgtgtagagaaaggacaacaaatgcttagttttggtttcaggagacctgagttgctgatgagaaggcatctgggggacagtcaggcgggcagactttatgccactgaagagctgaaagccccgccaacactgatgacaaatgaaatggatgttgaatgtactggtatttgaccagtatgagttgctgagccccagtttggctggttatgcctgctataaaatactgaattgcagtgtgtcaatcacattagttgtaggagaattagatgtgtacaccatatagaagtagcttagagctataagaaaaatcaggcgtttgttgagataaggcattttaaaaagatttccgacgcttttcaagataaggttgtgtagaggtgaaattgagtttagagtgttgggaggaaaagtgaggagattctgtggggctttgttattcaagggtgcatcaaggttctgctgtagaggtgaaaactgccaggaaggacccagaaaccagtgtttggtatgtgaggacatcctctgtaatggtcccaaatgagaaacgtgtggacctgacttctctttaccaatgggagagcgagtaaagagaatgagatgccgtcctggccccacattctggttcctgccttccaggccacgccagttcctgctaatgccttctggcctctgctcttggggacctttgtatcaggactgactcgctactgaaatcatatctgtctttcaagcgttggtcctttctaaacccttgcaaatgtgttagcagtgacagtgctggtagggaatcttcctagctcctaggagcaatgcaatttgattcttcacagcctctctatctgaatagctaacactctctcaggggttgtaaaattgttcagctcccggaaaacccattcatgtgaagctatcacaaaattacatcactttcatttgatttttgagttttaaatggacataatgtttgaagcaaactgtttccaaatttttttcctacccgctttcctcaccaccgtttccaaaaccggaagaagagtttcacggttttcgggggctcctccatctctcatcctaagaactaagcttcccctcccagcatttctagcagctaggcctttgtgttctttatctgcatttttaaagtggaatgattcttaaaactcttttttcttgtgtttttttctttcatttctttcattttttttttttttttggagacaggttctcactctgccgccaaggctggagtgcagtggctattcacaggcgcgatcctagctcactgcgcccttgaactccaggcaattctgccacctcagtctctggagtagctgggactacaggtgtgtgccaccatgcccagctaattttttaattttttcatagagatggagtctctctctgtgttgacccagctggtcctggcctcaagcaatcctctcacctttgcctcccaaagtgattacaaacatgagccactgtgcctggcatcttttttttttttaatttaatttctaaacatttcgtgtacattcagcaactactttacgtaaaatgatcttttggataattttagttgactcataattgctttttccgttttcatgtggaggagagtttcttcttcctgtaataaaaatgagcagtttgcacttattatgtgagagacactgttctaaggtgcttttttttaaaaaaacaaacaaacaaacaaacaaactagttttaatgcagtttacctatttaaagggtaaaatccagtcatttttagtatatttacaaagttgtgcaaccctcaccacaatcagttttaggacattctcataaccccagcaggaagccatatacctgttagcagtcactctcctttgcctatgtccttcccttacccccaagcaactagtaagctattttctttctctattatttgcctgttctggacatctcatataaatggcatcatacatataatggtatgtggtttttgtgactggcctctttcacttactgtatgtttcaagcttcatgcgtatagcacgtgtcagtatgcatttctttttcttcttgcagaataatattccattctgtgtatatatatatgtatatatatgtgtgtatatgtatatatgtgtatatatgtatatatgtgtatayatgtgtatatgtgtatatatgtgtatatgtgtatatatgtgtgtatgtatatgtgttatatatgtgtatgtatatgtgtatatatgtgatgtgtgtgtgtgtgtgtgtgtgtgtgtgtgtatgccacattttgtttttccatattccatcagttgatggacatttgtatcatttgtaccttttggctattatgaataatgatgttataagcatttgtgtggacatgtgtttgtttkatttatttatttatttgttttttgagatggagtttcattcttgttgcccaggctggagtgcaatggtgcggtcttggctcactgcaacctccgcctcctgggttcaagcgattctcctgcttcagcctcccaaatagctgggattacaggtgcccaccaccatgcctggctaattttttttgtatttttagtagagaaggggtttcaccatgttggccaggctggtcctgaactcctgacctcaggtgatcctgcctcagcctcccaaagtgctagtattataggtgtgagccactgtgcctggcccatatgttttaaattctattatgtgtatgtctaggaaggggagttgctgggtcatgtggtaactcaacgtttaactttttcagaaactgccagattgttttccaaagtggctgtaccactttacattactactagcaatgaatgcaagttctaatttctctgcatccttgtcaatacttgttacctttttgattgtggccatcctggtggatgtgacctggtgtctcattgtagttttggtttgcatgtccctcgtagctaatgatgtgcatctcttcatgtgattattgtcatctctatattttctttgaaaaaatatctatttagatagttaccaatttttaaattgggttgtctttttgtctttttattgttgagttgtaacagtttttttttttttttttgagacagaatcttgctttgtcgcccaggctggagtgcagtggtgtgatctcggctcactgcaacccctgccacccgggttcgagcgattctcttgcctcagcctcctgagcagctgggattatagacacatgccaccacgcccggctaatttttgtatttttagtagagatgaggtttcaccattttgaccaggctggtctcaaactcctgacctcaggtgatccgcccacctcggcctcccaaagtgttgggattacaggcgtgagccactgcacctggctagtaacagttttttatatattctatatatgagtcctttgatatatgattcgcaaaatttttctttcattctgtgtgttatcttttcattttcttgatatggtgtcctttgaagccaatacaagttttaaatttggatgaaatccagtttatgttttctttgttcctgtgcttttgatgtcatatctacgacttaaggtgctctatataaactttacacctaaagcaatttaatcttcacgattctaggagacaggtactgttgttatccctagtctataaatggggaaactgagatgcaggaaggttttctgactcgctgagggtcatagctagtaagtggtgatgtgggcattcaaactcatgagtttgcacccaggatttatcctcttaaccaccatactctattgctttttttagggaatcatttactgaaaactatttgcttgtttgatttcttgcccgttttttttttttttttttttttttgkcatgagggaccttatctcttcattcaccttgcagagttcggcgtaggtttatttttggtcgaatgtaggcagaatcattgctatcagttaatttctgcattacttactctgcagtggtgatcactgctagttgagctaacaaagtcatttaaggcttttctggtcatcacactaataaaggtagtgtcatgactacagaaagttcaaaaacagtatttgattgattccatttcgttaactaaaggaaaaaaatccccagtgttgacacagattgtaagcctttccagaatacggtcgttgtcttcctttttttcctgttgttccctcgcacagtgcctggcatagtgcctcattgtccagcggattagctagagtatggcggtcttcagtcactgtgtacaatgacagaattttgacaacagtatctgttgtttgtttcacaaggtaaaaatcatatagaaatatctctcagatgtatagaaaaagcctggaattttgtaaagacttccagaaaacaaaaacatacaaaggtattttcactgcttttagatgtcttagacgtattatggttacacaacagagtaaattcgttaactagatttgacaagtcatgtaatattgattacctgtcataatttaaaatattctggctccattaaagtaattagtgcccatgagtaagcaaaaataagctaacatttatatgcagcatgggggtagactttatatatatgtgtgttcatgcatgtatttccgtctttcagaggctttggcagcttttcaacaatattctaactttagaattctatttaaaaaatcatcactgtggctagtgcactttgggctgagtttatcctgtcttatgcacagaattccactgtctcctagggaaaggtttccttccattatattgagttaatatctgaattacaggagctgtgatttcttgaactcctggccttaagtgagcctcttgcctcaacctcccaaaacgctaggaatttaggcgtgatccacattacctggctggggctgtaatttctaggccttttcctctccatgtgtttaaagttgactatcaaatgtgattttccctttgtttgttgggttttcattggtcaactagaacttttgaaaatgaatttgtttttatatgttatacaaatttccctaggaacttgatgggtttttgcttttaagttttcaatttatgaaaaacttaaatatactcttatttataagttatttttcactagatatttgtttatctctttatacatttttttaagcagtaggtgtgcatgtttaaaaaataacttatacatgtaasaaacctgcacatgtaccccttgaacataaaagttggaaagaaaaaaaaatgtaaaaacaaaatcatgttttttccttattgtaaaagtcatcttcattatagagaatttagaaaataaaggtaaagaaaataaataaatttaaaaattacccatacctcccccaccccaggtaggttgtagtaaattttgaaattgggaagtgtaagtcttctgaatttgttcttttcttctcaagatagttttggttattctggatcctttgaatttccgtatgaattttaggatcagatggtcattttctaccaagaatccagctgggattttgatagagatttgatagagattctccaaactgttgatcagtttggagaatattgccattttaagaagattatatcttgtaatccatggacatggatgtcttttcaacatttaccttctttaattttttttagccaatgttttgagttttcagaacatcattttatactttttatgggggttaaattttttgggttaaataaaaagtattttattctttttcatgctattgtaaatggaattgttttcttaatttcattgtcacatggttcattgcaagtatatggaaacacaattttttgtgtattggttttatatccttcaaatttgtggaactcatttcttagctctaaaagttttttagtggattttttaggattttctagaggcaggatcatgtcatctgaaaagagacagagtttttcatcgtttctcttttttttttgagacggagtctcactctgtcccccgatctggagtgcagtggcgcaatctcggctcactgcaagctccgccttccgggttcacgccattctcttgcctcagcctcccgagtagctgggactataggcgcccgccaccacgcccggctaatttttttgtatttttagtagagacggggtttcaccgtgttagccaggatggttttgatctcctgacctcgtgatctccttgcctcggcctcccaaagtgttggaattacaagcgtgagccaccgcacccggcctcttcctttctaatttggatgacttgtcttatccttgattgtagggagagtcttttatcatgaagcatgatggtagctgtgggtttttcacagatgccctttatcaggttgagaacattcccttctatgcctcgttttttgttttgttttgttttttttttttttttttttttttgagacggagtctcactctgtcgcccaggctggagtgcagtggtgcgatctcagctcactgcaagctccacctccgaggttcacgccattctcctgcctcagcctcccgagtagctgggactacaggtgcccgccaccacgcgcggctaatttttttgtattttcagtagagacggggtttcaccgtgttagccaggatggtctcaatctcctgacctcctgatccacccgcctcggcctcccaaagtgctgggattacaggcgcgagtcaccgcgcccggccaattttgttgtatttttagtagagacggggtttcaccgtgttagccaggatgatctcgatctcctgaccttgtgatccacccgcctccgcctcccaaagtgttgggattacaggcgtgagccaccgcgcctggttagcctagtttgttgagtgccatcacgaaagggtgttgaatttatcaaatgctttctttgtgtctgttgagatgatcatgtggttttgtcctttattctactaattttcagacattaaactaaccttagattcctgagctgaatcccacttgatcatgttgtataaacctttttatatcatgctggattcagtgtgctaatattttattgaggatatttgcatctgtctgtctgtctrtctrtctatctatctatctatctatctatctatctatctatctatctatctttttgagatggagtctcgctttgtcgcccaggctggagtgcagttgcatatctcggctcactgcaacctctgcctcccaggttcaagcgattctactgcctcagcctcccgagtagctgggactacaggcatgtgccactgctcccagctaatttttgtatttttagtagagacagggttttatcatgttggctaggctgctcttgaactcctgacctcagtcagtccacctgccttggcctcccaaagtgctgggattacaggcgtgagccactgcgcccggccttgcgtctatattcataagaaatgtggatctgtagttttcttttgatgtctgtttctggttttggtattagggcaacattagcctcatataatgaattggttaacgttccttcctcttatgttttctggaatagtttatgaagaattggtgttaatttgtccttaaatatttggtagaattcaccattgaagacagctgtacctggcctttctttatttttattttttattwtactttaagttctgggatacacgtgcagaatgtgcaggtttgttatataggtatacacgtgccatggtggtttgctgcacccatcaacccgtcatctacattaagtatttctcctaatgctgtccttcccctagccccccattccctgacaggccctggtgtgtgatgttcccctccctgtgtccatgtgttaccattgttcagctcccacttatgagtgagaacatgtggtgtttggttttctgttcctgtgttagtttgctgagaatgatggtttctagctkcatccatgtccctgcaaaggacatgaagtcatccttttttatggctgcatagtattccatggtgtatatgtgccacattttcttaatccagtctatcattgttggacatttgggttggttccaagtctttgctattgtgaacagtgctgcaataaacatacatgtgcatgtgtctttatagtagaatgatttataatcctttgggtatatacccagtaatgggattgctgggtcaaatgatatttctggttctagatccttgaggaatcgctacactgtcttccacaatagttgaactaatttacactcccaccaacagtataaaggcattcctatttctccacatcctctccagcatctgttgtttcctgactttttaatgatcgccaktctaactagcgtgagatggtatctcattgtggttttgatttgcatttctctaatgaccagtgatgatgagcttttttcgtatgtttgttggccgcataaatgtcttctcttgagaagtgtctgttcatatccttcgcctttgcttactttttgatggggttgtttttttcttgtaaatttgtttaagttctttatagattctggatattagccctttgtcagatagattgcaaaaattttctcccattctgtaggttgcctgttgactctgaagatagtttcttttcctgtgtagaagctctttagtttaattagatcccatttctcaaktttggcttttgttgccactgctgttttagttatgaagtctttgcccatgcctgtgtcctgaatggtattgtctaggttttcttctaagatttttatgattttaggtcctacgtttaagtctttaatccatcttgagttaatttttgtataaggtgtaaggaagaggtccagtttcagttttctgcatatggctagccagttttcccaacaccatttattaaatagggaatcttttcctcattgcttgtttttgtcaggtttgtcaaaaatcagatggttgtagatgtgtggcgttatttctgaggcctctgttctgttccattggtctatatatctgttttggtaccagtaccatgctgttttggttactgtagacttgtagtatagtttgaagtcaggtagcgtgatgcctccagctttgttctttttgtttaggattgtcttggctatttgggctcttttttggttccatatgaaatttaaagtagttttttaaaattttgtgaagaaagttaatggtagcttgatggggatagcattgaatctataaattacttggggcagtatgaccattttcatgatattgattcttcctatccatgagcatgggatgtttttccatttgtttgtgtcctcttttattttgttgagcagtggtttatagttctccttgaagaggtccttcacatcccttgtaagttgtattcctaggtattttattctctttgaagcaattgtgaatgggagttcactcatgatttggctctctgtctattattgtgtccctggcttttctttctgggagattttttgattattgattcaatcactttacttgttatgggtctatttagattttctagatcttcttgagttgggtttagtagtttgtgtctttctgggaatttgcccaactcatctaaattagataattcattggtgtataattgttcataatattgtcttacaatttatttatgtaaggttggtagtaatgtctattctttaagctctgattttagtaacttgattcttctctcttcttagctagttcataattttgtggttgttttaagaatgaactttggtttttgttgacttttctctattgtttttcaattccccctttcatttatttctgctctaatctttatttccttcyttctgtttgctttgaatttaattttctcttctttttctagtttcttaggttgttgacatgagctctttcttctggtttaagagacagggtcttgctctgtcgcccagggtagagtgcaatggtacagtcatagttcactatagtcgtctcctgtgctcaagtgatccttcagcttcggcctctgagtagctaggacttcaggtatgcaccatgcctgcctactttttaaatttttgtagagatggggtctctctatgttaccaagcccggtcttggactcctggcctcaagtgatcttctcacctctgcttcccaaacttctgggattatagatgtgagccactgcacctggcctgtttttaaaaaatgtaagtatttatagctacaaattgccctctatgcactgcttttgtggcatatcatttttagtatattatggcttttttttcagctcaaagtattctttttcttttctttttttttgtgtgacagagactcactctgtcacccaggctggagtgcagtgccatgatctcggctcacttgcaacctccacctcctgggttcaagctattctcctgcctcagctttccgagtaactgggattacaggcgtgcaccaccacgcccggctaattttttgtatttttagtagagatggggtttcaccatgttggcctaggtcatcttgaactcctgaccgcaagtgatctggccaccttggcctcctaaaatgctgggattataggtgtgagccactgtacctggccagttttcagctcaaagtattttttttccaattatttttatttttattttcttcttcttatttttagacaaggttctactctgttgcccaggctggagtgcagtggcgattacagctcactgcagcctagaattcctgggctcaagagatcctcctgcttycgcctcccaagtagctgagactataggcacatgacatcatacccagctaatcaaagtattttctaatttctaggccaggcgtggtggctcatgcctgtaatcccagtactttgggaggctgaggcaggcagatcatttgaggtcaggagttcaagaccagcctggccaacatggtgaaaccccatctctactaaaaatacaaaaattagttgggcatgttggcacgtctgtaatcccagctcctggggaggctgaggcaggagaattgcttgaacctgggaggcagaggttgcaatgagccaagatcgcaccactgcactccagactgggggacagagagagaacctgtctcaaattaaaaaaaaaaagtgttttctaatttgtcttgtgatttcttctttgacccattggttatttagctgtgtgctatttaatttccaagtatttgtgaattccccaaatttcattctgttgttgatatctaaaatagttctgttataaaaaaagaattctgttgtggttggagaacacatttaaatgatttcagttatttatttgtttatttattcatttattttgagacagggtctctctctgtcacccaggctggagtgcagtggcatgatcatggctcattgcagcctcaacctctcaggctcaagcaatccttccatctcagcctctaaagtagctgggactacagggccatgacaccatgcctggttaagttttagattttttgtagagttaggatctcactatgttgcccatgctggtctcgaactcctaggctcaagtgatcttcctgccttagcctcccaaagtgctgggatttttggtgtaagtcactgctcctggccttctttttatttttattttttaaaaatttctactgtagaatattttttggtcatgcttcctttatcttctttcagcttgcttaaaaaccacaacttcttcatatttcttcttgggtcaatttccctttaattcttttgatgatgtatctccagtcttattccagaatttttatgttcctggggaagaaaaagaatcagaccttccttcaagacttggttccttactgggtatatacccaaaggactataaatcatgctgctataaagacacatgcacacgtatgtttattgcggcactattcacaatagcaaagacttggaaccaacccaaatgtccaacaatgatagattggattaagaaaatgtggcacatatacaccatggaatactatgcagccataaaaaatgatgagttcatgtcctttgtagggacatggatgaaattggaaatcatcattctcagtaaactatcgcaagaactaaaaaccaaacaccgcatattctcactcataggtgggaattgaacaatgagaacatatggacacaggaaggggaatatcacactctgaggactgttgtggggtggggggaggggggagggatagcattaggagatatacctaatgctaaatgacgagttaatgggtgcagtacaccagcatggcacatgtatacatatgtaactaacctgcacattgtgcacatgtaccctgaaacttaaagtataaaaaaaaaaaaaaaagactttgttcttcagtaggtgtctggcagctgtcagtaaagccaaaggctggcctgacgcttatgttcctttcatcatggtgtccagatgatgactatttatttatttattattattttttttgagacagtctcgcttttgttgcccaggctggagtgcaatgtgtgatctcagctcactgcaacctctgcttccctggttcaagcgattctcttgcctcagcctcctgagtagctgggattacaggcatgtgccaccacacccaactaatttttgtatttttagtagagatggggtttcaccgtgttggccaggctggtcttgaactcctgacctcaggtgatctacctgcctcggcctcccaaagtgctgggattacagacgtgagccaccgtgcccgacccgggtggtgactttttaattattgcacacactgctgtggcagtggattccccgtgcccagctcagcacctgacacttagcgagtgttatgagtgtgtaagtgatgaagtgactcattctgctcatggcctatgtcctttcctttcctttttcctttcctttcccagacacaaagaccagtggatcatggcctatgatcttaatttgtaatttatcttccccattttcatttcatttatattcccagttgtatatgttttagcgcttttgtctttacgaaatrcatcctgtttttaatataatagaattgttttgtagcttaatgagtttactgtaattctaatttttttaaactgttgattttgaaataatttaaaacttataaatcttataaaagagtggtaaagataattctgatgtactcttcacccgtatttcccagttgttatcatttgctttattatttgatctctgtgcatatacaaagttttttttgagcgatttgacagtgagttgcagacctgaggccctgtcctgaatacctcggtgtgcatttcctaaggacaaggtcattcacataaacagtacagtgattaaaatcagagaatttaaygttgatgcattcaatacctttatctaccccccagaccttatttgcattccaccagctgttccaatacagcagttctatttcctgatgcgggatccagtccaggatcacacacggcatttagtgtttatggcacttagtatcgtctcagcctatctkcgtttttcatgataattgatatttctgaagaatgcasgccatttattttgtggaatgttctcactttgtgtttgcctgaagttgctttttgattatgaggttttgcattttggcagggcagaaggaggggtcaagtgatccatcatgcattaaatcagaggcacatgaggttcatttgtcccattactggtgaggctaactttgataattggttaaagtggagtctgatggagttttccactgtaaagttactatttttctcgatgtaaataataagtaatttgtgggaaatagtttgagactgtatacatcttgtttgtcatcacactttcacccactggttctggctgattcagtgaagagtttcacctgagtcagttattactgtgctggctgccaaatggcgattttcttgcttcatcattccttatgtgtttattcgcattttactataagcaggagctttttttttcttttctccttctttctttccatccatccacttattgttatggacttatggatcattatttttttagtaggttctaatccattgctattattctttattttgtagctcattggctagatttggccaatggaagctcttcaagctgattcttaaaaccttttgacatgttcctcaatcagttattgaacatatgtttactttcaggctcaagatattttaggttcaggccgggcacggtggctcatacctgtaatcccagcactttgggaatttgaggcaggcagatcacctgaagtcaggagttcaagaccagcctggccaacatggcaaaaccccgtctctactaaaaatacaaaaattagctgagcgtggtggtgggtgcctgtagtcccagctacttgggaggctgaggcaggagaatcgctggaacctgggaggcggaggttgcagtgagccaagatttcgccactgcactccagcctgggcgacaagaatgagactccatctcaaaaacatagaaagatattttaggttcattttgtactttccctgttccagctctggaatcggacgtttttctaaggagttttagtttcttttgttggaaagtggtatttagaaaccaaggtctggtcactaagcatgctcattgctcctaaggttcattgattctaggccctttgagaagttctactgttatgtcaagttcatactaactaactaacaaaacccgtacctagagttagagttcaaggattggttgtggttcttttggttatttatccttggtcatgataccaaggataaatacacagggtgctgcagtcagaggttacttgaatttgtcctttaatgcttcctgtcagtgtgattatgttatttgaaatgtaattattgctgtttatatatcattaatgagtttccccatctttgctgatttttaaaatcttttttcctttttttatttttacagttctttgagttgctgttttatatttctaaatctatataattttttttttttttgagacagtctcgctctgtcacccaggctagaatgcagtggtacagtctcagctcactgcaagctctgcctcctgtgttcacgccattctcctgcctcagcctcccgagtagctgggactacaggtgcccgccaccacgcctggctaattttttgtatttttagtagagatggagtttcaccatgttagccaggatggttttgatctcctgaccttgtggtccgcccgcctcggccttccgaagtgctgggattacaggcgtgagccactgcgcccggcctttttttttgttgttgttttatttttgagatggagtcttgctctgttgcccaggctggagtgcagtggcatgatcttggctcactgcaatctctgcttcccgggttgaagcaattcttgtgcctcagcctcctgagtagttgggactacaggcgcatgccaccatgtctggctaaattttgtatttttaatagagctggggttttaccatgttggccaggctggtcttgaactcctggcctcaggcgatctgtctgccgcagcctcctaaagggcagggcttacaggcatgagccattgcgcctggtcaaatctatataaaatgttaatatgattccaaaaatcaaaactatataaaaagggttacccagagaagtgccacttcctctcctattttttttttttttttttttttttttttggagacaaggtctcatgccctcacccaggctggagtgcagtggcatgatcacagctcactgcagccttggccttctgggctcaagcagtcctcctgcctcagcctcccaagtagctgggaatcacaggcgtgtgccaccatgcctggctaattttcatgtgtttttttgtggagatgggattttgccacgttgatcaggctagtcttgaactcttgggctcaacccaggagccttccttggcctcccaaagtgctggggttataggtgtgagccactgcgcccagcgcctctcctattctttccacctcatttccctacccttatatcatttgttcctggccttttcttcttcttattttttaaataaacacattaatgytcttaattctttttcttgtgcaaaaggtaagatattacatatattcttttgtacttggtgttttttgttctattttggttgctaatgtatcctggagatcagtccatatcagcttatggagatctttctcatccactttcacagctgcgtggcacactaagtgtgcaggtaccgggttttatttcaccactcttctgcatgtggatgtttgattgtttccagtgtttgggagttacagataatatatcagcaaatcacattgcataggtatgtttctgtactgttgaaggtgtgtcttcagtgtaaattcctagaagtggaattactgggtcaaaaagtaaacataaatgtagtgttactagatcctgccaaagtcttcttcataaaggccgcatcattcgcactcacagtagcagtgcatgcgagtgttttctacatatatacaccaacactgtgtgttgtcaggcttttaacatttttgccaactagatacgtgacaaatggcatctcttaccattaatgaagttgaatatctttttaaatgcttaagggtcatttttatgtttttcttttatgaattatctgcccaaatcttttggccattttttttttctgttggatttttagttgtgtttttctttttcaacttttgtgaccttgatgtatgtggaattagccgtttgtgatatatgttgcatatatttttaaatcagattatcatttatgttttgctgtgtttatagtaattttgctgagtttttatgtggttgaatatattagtcttttattgcgtttaggtttgtgtgatagagagccttttcctttgtccaggttttagaggaatttacctgtgttttttgaactatggttttctgttttacattcagatctcagatccatttggagtttactcttgtgtctcctgtgaggtgtgggtttgattttttttttttttttttccaaatggccactcaggtgtcccagaccattattaaaaagtccatcttggccccagtgattccaggcactgtgtcctggtgctggaggactcgatcccaccctgtggcttatggatgccttgtcttcctgccattcctctgcaaaataaagcctacagtgcccacgtagcagggtttttgctttgtagttggacagcagatgttagtgacccaggctggtgctagcctgttagccattgctgaaattattgccacactggttcttggtgtatctaagccctttttgtgcttctctctaggagagaaaggcaaacctttctcaagcggcayccatctctgctgtcttccttcttttttttgctttatcttatgtgtatgtctgggtttccagttttgtgccttgtatacagtcttgtgtggtagcagctcagtacctatctctttagtgaatgatgaaagcattgttgggctgatacttgagaacctttttggtggtgcctttttcaaccttcccccctccccgtgacttctcatccatgctctttctttktctctcctcccatctgggtcttagcctcctgtggcattgattttcctgcctgtaatctacaggctatgggtcttgatggctctggtccactagttcatgatgacatctcatacgggctgtcacaactttacagatgtcaagaaagatcaaatctatggcttactagtgtttctagaacttattagtcttttgttgaatgaaattaaattggtctgacccactaagctctcttgggagcgatgctcttgttattttcctatggtttatatttttcttggttgctccacatagaaatttttcctctagccttgatgttgaaattaagtttatcagctagacgcagtggctcacacctgtaattctagcactttgggaggtcgagttggacagatcgcttgaggtcaggagttcaagaccagcttggctaacatggtgaaaccccatctctactaaaaatacaaaaattagtggggcttgctggtgggtgcctgtcatcccagctacttgggaggctgaggcaggagaatcacttgattgtagcgaggaggggggttgtagcgagctgagatcgtgccactgcactccagtaccactgcactccagcctgggtgacagagagagagactctgtttcaaagaaaaaagaaattaagttgatcaaattagccctcatgactggagatgccctttctttaaaaggtggagggagcacttgttccttctccgtcggggggatttccctcttatgctttgatcatttactcctcagagaagagatgagataccatgtgaagaatgaaaaacccacctcattctgacccgcccccccccaccatttctccaagggaaaaaaagagagtaaaactcaacaatgtgaagataattcattatagctaatgaaataaatcaagactccttgtcacttattaaatattaacttatgctagaaacaaatgtattataagcatgaaaagcacacaaagcactacacttctgtcgttaagaacataggcccaagatggcctcctacttggggtcaccagctctgtaattgtgagaactagtaaggagatttaatctctgtaggatcttgtctcctcccctgcagagatggggtacactaagaatactctcatagagttgctgtagatgatgacacgtgtggatgttcctgacgtaggtcctgcttccgctgagtgtgaaaaaatgtcgcttttgcccctatggcattataacaacctgtgtgaatgctcactgctcgaaggggtgcctggtacctgggggatggagttctcaattctctacccacagtttatgtcaccgggtcgtgctgatttggatctattctttaaaaagtgcatatttgagatatatttttccaagcatgcccttttctattatcatttatagttcttccctcttgtctcttgctgtgattttcacaaaatcagcaggaaacaaagtcctaaaccacctgcctctccacagttctgttacagttctttcttccctcaccagaagaggattttgcacatgaaatgcttcgttctccttttcttagagttctccttccatctgtccatccatctctccacttacctgtttattcttctgtcttgttccaaaaaaccttttgaggcagcttacagaattagagaacaaacaataagcagatgaaaaaactggaccaagattagaaaacaagggtaagaagtgagctgcacaggggatgagggcagtgtgagatgcacgtctttggccttgtgaggttatacagatgggtggcaggctcatccctgagcctcccaacagtgcaagggaaacaggatttgtgggagatgctcactctctgtaagctaaacaagtggtttcatagaarcccagctttccctgctattgagatttaggagaatattttttgagtgttctgtgaagtcaatgaatattttatctttattttttttctgccagagttctctgtttagttggttatattctttaaatggaagttgctccaaaatgcttgtccatgtgggtttggtggctggggaatcagatgcttctgcttattgataggagttggtcagaaatagaaaaaggcatagaaagcataytatcatttataattttttttttcaatgccgtgtggttcagaaaatgcttttgcgtagttgacctcctttgaggatgcggggtggtttcttgctaacatgaagagcttcaagctatgagagaatgtgtgctgacttcaccattgccttcaagacaattgagctagttactgtaaatatgttacttttatgtaatgcatttcatgttcttcaataaaaaatttcaaaagggaggaaaacttattttgagttaaccaacatttaatacaatgctttgatagcaaggctattataggaagcatataagctgtgaagactaaacacttacattatttaaatttcagtagggcatatttaagttttgtcttattcatgctcctctttaacaaagaaataatacagaaaaagcaaaagattatttcttttcttcctcttggtttgcaggtgccctcaccaccaatggcatcaaccctgacaccagtactgagatcggacgtgctaagaactgccttagccctgaagacataattgacaagtataaagaggcgatttcctattacagcaaggtgattttatggctttgtgattttttttacacagttgtgttgtttaatcagaagtttccattttacattgtgtaatgctgcagtgtctcttaattatttatttctgtaagtattcatgtcttgctctctaatgcatagtactatatgcctaaaatgttttctttttctgattcaaaacagtgtaggtttagtataataaatttggaaaagagagaaaaaaggctctcatggcctgcgtactcacagataatgattgttaatattttatatctattttctggttcttttatcaatgtatattatttatattttaagaaatggagcatacttatgtactgtgtggtgacccattttagtctgtgttttctatgctgttgaaatcttccaaggcataattttcagtgacctgtagagcattccatcttatggaggcacccttctttttagtttggattgaaaacaattttgcattccaaatgtacttactaaaatactggaaaagaaaagttgtgccgaagagtggcatcaagtaaaaaaatgaaagtcctctacctcctctactcttattaacaacttggtttattatcaacaacttggtccatagcctccatgacctttatgcctatgagacacacacacacacacacacacacacacacacacacacgcatgctcacayrcacgtgcacacatgcacttacacgcgcatgstcacacccgcacacaggcacgtacacacgcatgctcacacacatgcacatacacacatgttcacacacacrtacatacaagcatgctcacacacgcacacacatgcacgtacacacatgctcacgcgtgcacacatgcatgtacacacatgctcacatgtgcgcacacatgcacgtacacacacatgctcacatacacgcgcacatcttatttatgaaaatgggatcatagtatgttattctgcacttgctttacccactcagcagtatctcatagaccacaggtgtactctcgcctccggacctgcttgcttctttcagagcatgtggaaaggttttctaaaatcctgcttgcttctttcagagagtgtggaaaggttttccaaaatgtggatgtagtcatgtattcatcaagacattttgtgagacatgctcataaacagcacctagaacaagatgaaatgcctgctcttaagatttcacagcttgccttaatttgcttaattattctctcgtggatggatacttaggctttctcactttttcaccgtgaattagaaaaaatgctttactgaacatttttgcccctatattcttgtgttcttgtatccttattcctttaggttcaatttttctagaaatttatcctggatatgatattaacatttatcataggttatgttcaagttactctccaaattcctcctctgatagagagtgaaaagatgtagaattatttatttcaccaatcctgttactgattattatttatttctgttttttcttccccctattgtaaacagttctctgataaatgcccctatgcatacatctttttggattgattttttttaagggaacaattcctagaagttgacttgagttaaagagtatatgttttttttggcatggtacagtggctcacgcccgccagtaattccagcactttgggaggctgatataggcagattgcctgagctcaggagtttgagaccaccccgggcaacatggtgaaaccctgtctctactaaaatacaaaaaattagccagatgtggtggtgtgcacctgtagtcccagctactcgggaggctgaggctcaagaatcacttgagccctggaggcggaagttgcagtgagccgagatcacaccactgcactgcagcttaggctacagagtgagactccgtctcaaaaaaaaaaaaaagtatacttttcttaaagtgttatatattcctgtattgtcctccaaaaaggttattaacaatttactcctccataaacaaacactagctattatttttgaaaaatatttgccaatacagctgagtgcattggctcatgcctgtaatcccagcactttgggaagcctaggtgggtgggtcacttgaggccaggagtttggcattatgcttagaaatatctttttttttttttatggagacagagtctcgctctgttgcccaggctcgagtgtagcagcatgatctgggctcactgcaacctccgcctcctggattcaagtgattctcctgtcttagcctcctgagtagcgggactacaggtgcgagccaccatgcccggctaattttttatatttttagtagacacagagcttcaccatgttggccaggctggtctcgaactcctgacctcaagtgatctgctcaccttggcctcccaaagttctgggattacaggcgttggccactgcacctggcctgcttagaaatactttcttaatgatagaataaaactcttttccttagttttttaatctctaaaatgaggatgataacagtacccatcatctcatagagctgtagttaagataagctgagataatctatgcaaacatatatctgtattyaccgttattagcatttaaaatatttttataattatctaattatctgtaatttattttgtgtgtattatgacataagaatacaatttattttttccaggtcattacctcattgtcgcaccacaatgtattgaattcmtatttttttctttttgatttgaattcttacctgtactaaatactttcacatattaacttttcattcctttctatgaatctttcttttcttcagcaccatattttatctattttagtagtttacttgatatctaagagtgtttctttctttctttcttttttttttttgagacagggttttgttctgttgcccaggctggagtgcagtggcgtgatcacggttcattgcagcctttatctcccaggttcaggtgatccccccacctctggcttcctgtgtgctgggactacaggtgtgcaacaccatgcccagctattttttttgtattttttgtagagatggggttttaccatgttgcccaggcttgtcttgaacttctggctcaagcartctgcctgcttcgggcctcccaaagtgctggggttacaggcgtgagccactgcacccacmcatttttttttttttgagacagggtcttgctctgttgcccagtctggagtgcagtagcatgatcacagctcactgtaacctcaaaatccttcactcaaccaatcctcccaccctcatcctcctacctcacttggcctcactcagatgaccaagtagctgtaactacaggtgcatcccaccgcacctggctaattttttattttttatttgtaatgacagggtctgtccatgttgcccaggcttgtctggaactcctggcctgaagcaatcctcccaccatggcctcctgagacgctgcgattacaggcctaagccactacacataacctcccagaataaaacatattgaaagccccatcaaaactccagtctgtttttttttaacttgaacaaattattttagaatttttgaggaataatatattaatcatactggccatgaaaatttggatggtaggaaagaattaattaaaaaaaaaaaaaaagaggttgagtgcaatggctcatgcctgtaattccagcactttgggaggctgaggtgggaggatcacttgagctcaggagttccagaccagcctgggtaacatggcaaaaccccgcctctacaaaatatacaaaaaaattagccgggtgtggtggtgcacacctgctgtctcaggtaccagtgaggctgaagtgggaggatcacctgagcctgggagattgaggctacratgagctgtgatcaagcaactgcactccagcctgggcaacagagcaagactctgtctcaaaaaaaaataatttttcatgatttcattttaaatctctttgtaatatacattaaaatatgtaaatttaaccaaaaatatgtgggaaaaatttgtgatgacttttattctcacgtcaatagaaactgttttaagagatttgaaggaaaaatggcatttccatagaatcaagtccctgtgttagttttttcttgtgtcatgaaacagtatatacaattgatagatttctgacttcattgttggtatttaagcaggtataagtagctcctttttctgatcgtctgtgataacttatatttaayataacagattacatgtacattatatgtgtggaaaaggggaggaatgaagcctaccctttctgacatagtaattataaaactgcttgtcccaccttgtacatgattttagtgagaaagataaccagttgcgcctttgcttcttcatgattggtaaatagactgcatgttcattagcagtgatgccacaccaggccactagtgggtctcagcaaaggcttgtcgattatatgcattggttttcacatgacctaatgccccagcaaaagaatattagtgtgtttttcctcccaacctctgtttctcttcaggtactagtatacatggacaacctctataaaccctttctttaattttaaattatgcaacatcagttgaaaatcagtccagttgggataactaggaaaaaaaataaaaataaggtttggagtagaaaacaaaaatgcagaatggctagcatggaggattttgcagtggaggcttgggagggagaagggcattggagggaaggaaggagatccatccatctgaactcttcttttttggaagggttctggaacctgaatccttcctcctttccctgctcccgggtctggagccacatggtgtgtaagagggggtggggatggctctcctggcttgaagctaggagaactggggatgaagcttaagagatactccccagtttattgcatagttgaatgaaattccacgaaggcttttctgttccaaacgccctcatttgttcttcatctcaggaaccataataggaactgagaagtaggaacaagcaactctgagacaaagtcagaaagcattgagcacacagggagccggatgttttgcaaccaagtaaaatgaatttacaacaactgcattacagccgcaggtgtgagagtttctaaaaatgtttgagagtactacaagggatgataagcagaaatgaatagcaaagcatccattgataatattttgaaattttgcaaaatagcaagctactgtggtcatattattttaatgaatgcatacacatttatgtggcattcatagactcactcagccacaccaatcgcttttgcttccataaaggatagactttctcacaaacaaattctctggctttggtggggaggtgtattagtccattttcatgctgctgataaagacgtactggagactggcaatttacaaaagaaagaggtttaattggacttacagttctgtgtggctggggaagcctcacaatcatggtggaaggcaaggaggagtaagtcccgtcttacatggatggcagcaggcaaagagagaatgaggagaggactccaaagcggaagctcctgataaaaacacagatctcatgagacttattcactaccacaagaacagtatgggggaaaccacmtccacaattcaattatctcccactggatccctcccacaacatgtgggaattgtgggagtacaatttaagatgagatttgggtggggacacagagtcagattattgtcattccacccctggcccctcaaatctcatgtcctcacatttcaaaaccaatcatgccttcccagcagttccccaaagttttaactcatttcagcagtgactcagaagtccacacttcaaagtctcatctgagacaaggcaagtcccttctgcctatgagcctataaaatcaaaagcagctgcttatttcctagatacaatgggggtatacacattgggtaaatacaaccattccaaatgggagaaattggcaaaacaaaggggttacagggcccatgtaagtccgaaacccagaggggcagtcaaatcttaaagctctaaaatgatctcctttgattccatgtctcgtatccaggtcatgctgatgcaagaggtgggttcccatggtcttgggcaaccctgcccctgtggctttgcagggtacagcccctgtcctggctgctttcatgggctggcattgagtgtctgtggcttttctaagtgcacagtgcaagctgtcagtggatctgccattctggggtctgcaggatggtggctttcttctcacagctccactaggcagtgccccagtagggactctgtgtgggggctccaaccccatatttcccttttgcactgccctagcagaggttctccatgagagccccactcctgaagcaaacttctgcctgggcatccagctgtttccatacatctcctgaaatctaggcggaaacttcccaaacttcagttattgacttcsgtgcacccacacactcaacaccacatggaagctgccaaggcttggggcttgcaccctctgaagccatggcccgagctgtatgttggctcctttcagccttggctggagtggctgggacacaggcaccaagtcgctaggctgtacacagcatggtgaccctgggcccggcccacgaaaccactttttcctcctaggcctccaggcctgtgatgggagggactgctgtgaagacctctgacattttccccattgtcttggggattaacatttggctgcctcttacttatgcaaattaccacagttggcttgaatttctcctaagaaaatctgattttcttttctatctcattgtcaggctgcaaatttttcaaacttttatgctgtttcccttttaaaactgaatgcttttaacagcacccaagatatctcttgaatgctttgctgcttagaaatttcttctgccagatatcctaaatcatctctctcaagttcagagttccacaaatctccagggcaggggcaaaatgccaccagtttctttgctaaaacgtaacaagagtcacctttgctccagttcccaacaagaactgagatctccatccgagaccacctcagccctctttcgttgtccatatcattgttcatttcattgtccatatcattatcagcattttggtcaaagccattcgacaagcctctaggaagttccaaactttcccacattttcctgtcttcttctgagccctccaaactgttccaacctctgtctgttacccagttccaaagtcgcttccacattttcaggtattttttcagcaacactccattctgggtaccaatttactgtattagtctgttttcatgctgctgataaagacatacctgagactsggcaatttacaaaagaaagaggtttaactggacttacagttctgtgtggctggggaagcctcacaatcatggcagaaggcaaggaggagcaagtcaggtcttacatggatgacagcaggcaaagagagaatgaggaaatgcaaaagcagaaacccctgataaaaccatcagatcttatgagacttattcactatcatgagaacaatatgggggaaaccacccccatgattcagtgatctcccaccaggtccctcctacaatgtgggaattatgggagtacaattcaagatgagatttgggtggggacacagaaccaaaccatatcaggaggggtatctggagccctgtgatgggggaagtgctgttgtmgttattgagtcccagtagcacagcctttagaatgtgacagaaacatctgaactcttttttgactgaggcatttcctttacaccctgcagtataagaatgcgggagtgattgagttggaagcgtgcatcaaggctgtacgtgtccttgcaattcagaaacggagcatggaagcatcagaatttcttcagaatgcagtttacattaaccttcgacaggtgagtgtatgtctacctgtragtggaagagttcatccagttcttayggaattgattcactatgaattcagcttatttcgttttgctgaggttcagcatgccatgataaaaactgttgaatcttaacttgatttctaattaacatggttatttgtatattttacttctttcattgtggtatttaactttcaaaattcagaacttgctgtcctttgcattttttttgtttgttttttggagaagtaactgtgttttaccagcttggcaaccttcaacaagctttacgcctcttgtcttgatattgtcactcatgaagtacttgccatttgtaaccctgtttggggtgttgggtttataaaacatgcagtttgtgaaagcacttatatagctcctttgacacagtggtaacccagcaaataatactttaatctgaatctaaatggatttttaataaaacaatcattaaaacctttagttgtggattgataatgctaaatcctaaaattgatagtcttagaaggattttagatatttagttagtttaacttggatctttatagatagggaaactgagaccaagttaaacaatttgcttaaggacaccagacgagtatgagaacgtaggtcactgtaattcagcagatacttaggagggcgttgtgctaagggtgggggaaagagagctgaggcaggtgggtcctgtcctcatccatctgacagttttgtgggaaaggcagacattgagcagtgggtaagtggaaaaaaattggaggtacaggtgccaagggaggaagtggcaaaaggatttaacttagtttaatggaggtggagggtgtgggggccagggacagtctctaagtcagtgagattggaactgggccttgaaggatgaataggagatagccaggtaaagaagagatgggagaaggtcattcaggaagaaaatggctcagcatgagtgatgcccagaaacagaacacatcactgggagagaccaaataaagtcagagatggcggtgggggtagaaagatggggagatggagaggtaggggaggagagggagggagggagaggaagagaggggtagggaggacagagtctgagcgggagggctttctcggccaggtgaagcatttggggctgcttctaagagcggcgggttttaaaagcaaggtcttggccaggcgcagtggctcacgcctgtaatcccagcactttgggaggctgaggcgggcagatcacgaggtcaggagatcgagaccatcctggataacatggtgaaaccccatctctactgaaaatacaaaaaattagccaggcgtggtggcgggtgcttgtagtcccagctactcaggaggctgaggcaggagaatggcgtgaacctgggaggcagagcttgcagtgagccaagatcacaccactgcactcctgtctgggtgacagagtgagactcttgtctcaaaaaaaaaaaaaaaaaaaaggcaaggtcttaacatcagggactgatgtgaccagatttgtatggagtggagggagaggaagggagggggcccattgcagaggcccttggggagcccaggcgagcagtgctgacagcttccccaaaggactggggctgttggcaggaaggccagcccgctggaaacgtgcttgggagtctacgtggaaagggtcagcggccggctgtgggtcgggtggaatggagtgttgctctgttaggtgcccgatggtcaggccgggctccgaggagggcaagctgcaaggcagtggtggagggaaagaggagaggttcagcttctcacataacgagagaggtgtgggtctgggggctcaggcgagagacagggcagggggtggaggagagaggagagagactttcaaatcagtttctcttttgaacacacaaagaagtatgactaataataagacactcatgcttatcatccagatttaatatgttgaaatgttgccgcattgactacagagattcttaattttttcaattgaaagcagataacctaagtagaaacaaaataacagtcaccaccatctcagagttggtccatattttggtactttataatgtttatagccatagtctataaaaagagaggcgctttagcatgagagttgagcacacagactggatacagactgctcgggttggcattccagcttcacttgccttgacgagatgtttaacctctgtgtgcctcagttccctcttctgtaaagtgtatttactgccccttggacccgtcatcttggctaatttcctagattagacgttggtagggaggccgataagtcaaagtggcaagtgtcagtgtcacaccaaagggagcgaccagaacagagtaaagcccataaaccgagtaaaaacaaacaacaccacagtccctcaaagctgtaggccacgtagtatgagggaaacagcaccaccgctggggcagtgtgtcatcagaagagcattaggaagaggtccgtatcttgcagtttatgttgaagtttctggtaaagatggtcagaagcgggaacctgacacttcaaagtggaagcttcagttacctgggcgcccaaggggaggtgttctccccagtgatgccgggcaaatgaaccaacagctggatcatacttctcatttgacatgctttttgggggacctacgtggggttcagcactgcgccrggccacagatttgcagggccaatgaggatgtggtccctgccccggagcctgatgctctaagtgctgagggtggagggcttcccggaggaggtgttctctgaggagagtgaaaagtacccggcagagtggtgctgaggagcctctgagcagagagactgggtgtaaacatgtggctgggtgtgagctctgagcacagaagtcacttggggatcatagcagttttgtttgtgagggacagtgtggggaagagaggccccaacgcaggctgaggtcagttcctgtcacaggtcttgcataaaagtcatcaggtgggcaagagagaatccctgaaggaatctaagctgggagtcgcagtggagtcgcgctgtcagatgggctcaggttcacacccctgtgttgccacctgttcgctgcataaccttgagcacaatcactctgtgtctctgcctcttaatagtatggtctgtaaaatgacaggataacaagttcatgtggtcactggaaggactggccttgacacctcctgtccagtactgtcttgatgcctgccccataaagtgactctgcgatgggcaagtgttatgatcagattggagggtgtaaagagacatcttttgtgacagtggagggtggactgtgcttttaaacggaccctccgaaagcctgaagcagtggaattgcagacaatttggttgggagctgggggcagggctttgagactggcttgccgttaacaactggagttgcctttgcaagttaatgctgctcaattgggcatgcagggaatctcttttcactggtgggtatagaaacacacatttcataaaataaaatgttttcacttaaaatgtgaggacattttgttctttggagcagcctgtccttttgctgtttgctctttcttcctgtggaccactagaggtcagcaaagacacggcgaaaggggaacagcgctcccatgctgggcgggcggggacagtgcagatgtggttccgtggccctgtgagttttccccagcacgacgcttggcttgagttgactcatctccatgtttgtttgccagatgagcaggcagcaagataatgagttctggtgggattttataagaacaataaagaagaggggtctgtagtttttctgaaatagaacaagcttttggttcttgatcaagtatgttccattgtagaattgatgagttgtatctattcctggaaatgactttggctaatatggaaattttgaaaggaactgagatatgattattgcaggttccttctgctttaagaatccctgtgcaaatacaaaaactgataaataatacatctggatttagtggtattggaaagggttttttcgttttacggaattcactgctgagttccttctctttgtgtgcagggatatggattgacctgtcttttctttagttgtttaggtgaatggtttatgataattatctatctaagataattcacaaatggcagcaaatacctcatttaatagctgtctacctgtacatttatgggttggacatgtggatttttacaagcaaatagtgaagtagaggtgaggtggaagaagcatggactttggccccccagatttaggttgaagttgccatttcctcactgtgcgacctggaatagttatgtaacctcattagcctgtttccaagtctataaaatgggaatgatagctgggtgtggtggggggcacctgtaataccagctactcgggaggctgagggaggagaatcgcttgaacccaggaggtggaggttgcagtgcgccgagatggcgccactgcactccagcctgggtgacaagagcaaaactccatctaaaaaaataaaataaaataaaataaaataaaataaaataaaataaaataaaataaaaataaaatgggaatgataatattcacttctttctagagttgctgtaagttgtgaatgatagaataatgcatataaagtgctaagcactgtgcttggcttttagaaagcattcagcaaacatgtctgcctcacggctcactggttgtatcaaagggatgcaggcagctcctgtttgttgaggacccattaacagacagtttacaggcttgtgaatttggttattttctttaatccttataattctgtgtttccagtacagatattcttgtttgtagaggaggaacctcaggctaaggaaaggttgtacaacttgtccaaagccagaccataatttcagaggcgaagggcctctgggaggcgtgctggttctctctttcctgccctcactcacttgttccacaccaaaggccaggcactcggcgctgtgtccgtcgtctgctagccttgagcgttcagcgggcagcaaaacagacgtggtctcatgctgactgagcttcaggtctacagggggaaatgggtactgagcagataaacataaacatagataattgtgaatttgatccaaggaaaagaacatgttctgccttgtagacctggggaattttctagtcaggcctgctctagcagtattaatcctgtaaaataagctctgttggcacacaaaaaagatgaaaaggcagaacctctccattatcggataagctgaaactcattgataatatgagtgattaagcagccagcttgttgcatgcatttagctagatgcttttcagatattggccataatcatcacaacaactttgcaaagtagtttattacgctccattttaaggatgagaaattgaggagaggagtttgccgtgtctccaggattgtcttgtagataccaccattggtatttaaaccatttgggttctaaaatccaagctctatgtaccacatcaggtagtttccctcaaactacccaaatgattgaaattcactttcttaattctttttttttttttgagacggagtttcactcttgtagcccaggttggagtgcagtggcgcgatctcagctcactgcaacttctgcctcttgggttcaagcaattctcctgcctcaccctcccgagtagctgggattacaggtgcccgcaccacacccggctaatttttgtatttttggtagagatggggtttcaccatgttggccaggctggtctcaaactcctgacctcaggtgatccacctgccttggcctcccaaagtgctgggattacaggcgtgagccaccatgccctgctcactttcttaattcttttttttttttttttttgagacagagtttcgctgttgttgcccaggctagagtgcaatggcacgatctcggctcaccacaacctctgcctcctgggttcaagcgattctcctgcctcagcctcctgagtagctgagattacaggcatgtgccaccacacccggctaattttgtatttttagtggggacagggtttctccatgttggtcaggctggtctcgaactcccgaccttaggtgatccacctgccttggccttccaaagtgctgggattacaggcgtgagccactgcacccggctcactttcttaactcttaattagtcaaaaatggcaagtgacagtaagagaaagtggtagtaaggaattgtttgaaaaactagaaaataatctgactttaccagattagagaacatactctaggatcaactctcattgaatccaacaccctttgcctcccacaaaccaaatattcaggaatgattccgagccatttgaaaacattttggcttatgatactgctgactaagacctgccacctctttgttcctggttaattttctcttcaaaaccattcaaattttatgcaggctactctgttcagatgtaagaatagcctctttaaaatttttgatgcagttccttaatgaagctgttgctaaggaaacccaggaaaagcctgctagatatgcacataataattgcaacctcaaactttatgtcaatttaagctgaaaatcagaggcacggggagatttgggaaaggctttttaagatagaagggggaaagtagtaggaatgcagcttagctatggctgaaacagttcagtccagccagcagggtgcgtggctttcagagattgtttgtgaggatttcatagttctcacaaagaaactgttggatggggaaggaggaaagtaagttccttattagagatgtaaaaggagagagagggaactgagacatttctgcatgaacaagagtctggtatattgcaccttgtctttaggagagagtaagaggcatataaggaaatctctcttgagtgagcagtcaaagctgcagagatatgagcaagccaggtgggcctctgatgccccgctgggctgtggatgatggcagctgcctgcaaagcggtgggaatctttgacccagtccttaggctggagtttcagatctccatttgaagcccaataaagtgaggaaagagggagaggactaaaataaaggaaaagccagagcctggagaatgagccccatatccgtgctgtgggttgttctgtttaacccaggaaggcattgagaatgatgctccaggatgagaatggtgcttcacagcttcctgcctggggacatgcctgcagttggtgcagatacttatttcgtgggagttgatatttatctctttttatttatttatttatttagagacagggtctcactttcttccctagactggagtgcagtggccrgatctcctctcactgcaacctctgcctcccaggcttaagcgattctcctgcctcagcctcacaagtagctggggttactggcacccgccactactgcccggctaatttttgtatttttagtacagatggggtttcatcatgttggccaggctggtcttgaactcctgacttcaaatgatccacctgcctcggcctcccaaagtgctgggattacaggcatgagccaccacgcctggccttcatctttatcgttttgctttagctgttaggagccttagagctgagtctctagcttacccttaataattacatctacttcatggcagacatttttgtgatttaaccttcccctggtttcctttaactagaattctcattttctttttacactgatttttatcttttttttttttttttggttattgttgttaaattgtatgtgtttaaaaaattgattttagatccttttttacaatgaggcagaatgtaaataaatgcataaacggagcatattacagacacttattgcttttagaaattctaagctctttaccttaggggttaccttagagctgagctgaatattaaagtgatacatttttaataggaaagtttggtaatgcatgcagattctagactggggactgtatcttattcatttttttagccactgtgctaagcacaatacttgtcatagaccaggcactttttaatgtttgttggatgcatgaagtggagtcagctatgactcatgttccatcctgtggcactcgccagcatcagcaccactcgcctgagtggccgtgacggcagtgaccattggtgggtgtgcacacctgtgtctgcacttaatccataaccccccctatgagggattgcttttattgttttatatttgtaatgtataatatactttatttttacctggaaagacttcaaaccttcagaaaagctgcaggagtagttcaatgaacacttatatgccctttacctaaaaggacagtgccaggcacggtggctcacgcctgtagtcccagcactttgggaggctgaggcaggcagatcacctgaggtcggaagtttgagaccagcctgaccaacatgtagaaaccccgtctctactaaaaatacaaaattaaccaggcatagtagcgcatgcctgtaatcccagctacttgggaggctgaggcaggagaatcgcttgaacctgggaggcggaggttgcagtgagctgagatcgcgccattgcactccagcctgggtgacaagagcaaaactccatcaaaaaaaaaaaaaaaaaaaagacagtgtttgtccttctgtgtctagattactcacttagcgtcatgttttcatggttcatccatgttgtagcacgaatcagtccttcattcctttttttttttttttttgatggagtctcactctgctgttcaggctggagtgtgcaatggcgccatctctgctcactgcaacctccgcctcccaggttcaagcaattcttccacctcagcctcccaagtagctgggattacaggcatgcaccaccacgcccaactaatttttgtatttttttttgagatggagtcttgctctgtcacccaggttgagtgcaatggtgtgatctcagctcaccacagcctctgcctcctgggttcaagcgattcttctgcctcagcctcctgagtagctgggattacaggcatgtgccaccacgcccgactaattttgtatttttaatagagatggggtttctccatgttggtcaggctggtctcaaactcccaacttcaggtgatccgcccgccttggcctcccaaagtgctgggattacaggtgtaagccaccgcactcggcccccttcattccttctttttttttttttttactgtaagttctagggtacatgtgcacaacgtgcaggtttgttacgtatgtatacatgtgccatgttggtgtgctgcacccattaacttgtcatttacattaggtatgtctcctaatgctatccctcccacctcccccctccccaccccacaacaggccccggtgtgtgatgttccccttcctgtgtccaagtgttctcattgttcarttcccacctatgagtgagaacatgcggtgtttgtttttttgtccttgmgatagtttgctgagaatgatggtttccagcttcatccatgtccctacaaaggacatgaactcatccttttttatggctgcatagtattccrtggtgtacatgtgctacatttcttaatccagtctatcattgttggacatttgggttggttccgagtctctgctgttgtgaatagtgctgcaataaacatacgtgtgcatttgtctttatagcagcatgacttataatcctttcggtatatacccagtagtggtatggctgggtcaaatggtatttctagttctagatccctgaggaatcaccacactgtcttccacaatggttgaactagtttacagtcccaccaacagtgtaaaagtgttcctattctccacgtcctctccagcacctgttgtttcctgactttttaatgatcaccattctgaatggtgtgagatggtatctcattgtggttttgatttgcatttctctgatggccagtgatgatgagcattttttcatgtgtctgttggctgcataaatgtcttcttttgagaagtgtctgttcatatccttcgcccacttgttgatggggttgtttgtttttttcttgtaaatttgtttgagttcattgtagattctggatattagccctttgtcagatgagtagattgcaaaaattttctcctattctgtaggttgcctgttcactctgatggtagtttcttttgctgtgtagaagctcttcagtttaattagatcccatttgtcaattttggcttttgttgccattgcttttggtattttagacatgaagtccttgcccgtgcctatgtcctgaatggtattgcctaggttttcttctagggtttttatggttttaacttaacattaaagtttagttaaagacttagcttaaagtttagttaaaaacattaaagacttaacatttaagtctttaatccatcttgaattaatttttgtataaggtgtaaggaaaggatccagtttcagctttctaaatatggctggccagttttcccagcaccatttgttaaatagggaatcctttccccatttcttgtttttgtcaggtttgtaaaaaatcagatggttgtagatgtgtggtattatttctgagggctctgttctgttccattggtctatatctctgttttggtaccagtaccatgctgttttggttactgtagccttgtagtatagtttgaagtcaggtagcgtgatgcctccagctttgttcttttggcttacractgacttggcaatgcaggctcttttttggttccatatgaactttagagtagttttttccaattctgtgaagaaagtcattggtagcttgatggggatggcattgaatctataaattaccttgggcagtatggccattttcacgatattgattcttcctatctgtgaacatggaatgttcttccatttgtttgtatcctcttttatttccttgagcagtggtttgtagttctccttgaagaggtccttcacatcccttgtaagttggattcctaggtwttttattctctttgaagcaattgtgaatgggagttcactcatgatttggctctctgtttgtctgttattggtgtataggaatgcttgtgatttttgcacattgattttctatcctgagactttgctgaagttgcttatcagcttaaggagattttgggctgagacaatgaggttttctagatacacaatcatgtcatctgcaaacagggacaatttgacttcctcttttcctaattaaataccctttatttctttctcctgcccgtttgccctggccagaacttccaactatgttgaataggagtggtgagagaaggcatccctgtcttgtgccagttttcaaagggaatgcttccagtttttgcccattcagtatgatgttggctgtgggtttgtcataaatagctcttattattttgagatacatcccatcaatacctaatttattgagagttcttagcatgaagggctgttgaattttgtcaaaggccttttcggcatctattgagataatcaggtagtttttgtctttggttctgtttatatgctggattacatttattgatttgcatatattgaaccagccttgcatcccagggatgaagcccacttgatcatggtggctaagctttttgatgtgctgctggattcggtttgccagtattttattgaggatttttgcattgatgttcatcagggatattggtctaaaattctctttttttgttgtgtctctgccaggctatggtatcaggatgatgctggcctcataaaatgagttagggaggattccctctttttctattgattggaatagtttcagaaggaatgrtaccagctcctccttatacctctggtagaattcggctgtgaatccgtctggtcctggactttttttggttggtaagctattaattattgcttcaatttcagctcctgttattggtctattcagagattcaactttttactggtttagtcttgggagggtgtatgtgtccaggaatttatccatttcttctagattttctagtttatttgcatagaggtgtttatagtattctctgatggtagtttgtatttctgtgggattggtggtgatatcccctttgtcattttttatttcgtctatttgattcttctctcttttcttcttattagtcttgctagtggtctatcaattttgttgatcttttcaaaaaaccagctcctggattcattgatttttaaaggttttttgtgtctctatctccttcagttctgctctgatcttagttatttcttgctttctgctagcttttgaatgtgtttgctcttgcttctctagttcttttaattacgatgttagggtgtcaattttagatctttcctgctttctcttgtggacatttagtgctataaatttccctctacacactgctttgaatgtgtcccagagattctggtatgttgtgtctttgttctcattggtttcaaagaacatctttatttccgccttcatttcgttatgtacccagtagtcattcaggagcaggttgttcagtttccatgtagttgagtggttttgagtgagtttcttaatcctgagttctagtttgattgcactgtggtctgagagacagtttgttataatttctgttcttttacctttgctgaggagtgctttatttccaaccatgtggtcaattttggaataagtgcgatgtggtgctgagaagaatgtatattctgttgatttggggtggagagttctgtagatgtctattaggtctgcttggtgcagagctgagttcaattcctggttatccttgttaactttctgtctcgttgatctgtctaatgttgacagtggggtgttaaagtctcccattattactgtgtgggagtctaagtctctttgtaggtctctgaagacttgctttatgaatctggatgctcctgtattgggtgcatgtatatttaggatagttagctcttcttgttgaattgatacctttaccattatgccattatgtaatggccttctttgtctcttttgatctttgttggtttaaagtctgttttatcagagactaggattgcaacccctgcctttttttgttttccatttccttggtagatcctcctccatccctttattttgagcctatgtgtgtctctgcatgtgagatgggtttcctgaatacagcacactgatgggtcttgactctttatccaatttgccagtctgtgtcttttaattggagcatttagcccatttacatttaaggttaatattgttatgtggaatttgatactgtcattatgatgttagctggttattttgctcgttaattgatgcagtttcttcctagtctcgrtggtctttacaatttggcatgtttttgcagtgactgttactggttgttcctttccatgtttagtgcttccttcaggagctcttgtagggcaggcctggtggtgacaaaatctcagcatttgcttgtctgtaaaggattttatttctccttcacttatgaagcttagtttggctggatatgaaattctgggttgaaacttcttttctttaagcatgttgaatattggcccctactctcttctggcttgtagagtttctgccgagagatccgctgttagtctgatgggtttccctttgagggtaacccgacctttctctctggctgcccttaacattttttccttcatttcaactttggtgaatctgacaattatgtgtcttggagttgctcttcttgaggagtatctttgtggtgttctctgtatttcgtgaatttgaatgttggcctgctttgctaggttggggaagttcttgtggataatatcctgcagagtgttttccaacttggttccattctccctgtcactttcaggtacaccaatcaaacgttgatttggtctgttcacatagtcccgtatttcttggaggctttgttcatttctttttattcttttttctctaaacttctcttctcccttcatttcattcatttgatcttcaatcactgataccctttcttccagttgatcgaatcggctactgaagcatgtgcattcgtcacgtagttctcgtgccwtcgttttcagctccatcaggtcatttaaggacttttctacactggttattctagttagccatttgtctaatcttttttcaaggtgtttaagttctttgcaatgggttcgaacttcctcctttagcttggagaagtttggtcatctgaagccttcttctctcaactcatcaaagtcattctctgtctagctttgctccgttgctggtgaggagctgtgttcctttggaggaggagaggtgctccgatttttagaattttcagtttttctgctctgttttttccccatctttgtggttttttctacctttggtctttgatgatggtgatatacagatggggttttgatgtggatgtcctttctgtttgttagttttccttctaacagtcaggaccctcagctgcaggtctgttggagtttgctggaggtccactctagaccctgtttgcctgggtatcagcagcggaggctgcagaacagctaatattgctgaacagcaaatgttgctgcctgatcgttcctctggaagtttcgtcttagagggctacccggccatgtgaggtgtcagtctgttcctactggggggtgcctccccccaagttaggctacttgggggtcagggacccacttgaggaggtagtctgtccgttctcagatctcaaactccgtgctgggagaaccactactctcttcaaagctatcagacagggacatttaagtctgcagaggtttctgctgccttttgtttggctatgccctgtccccagaggtggagtctacagaggcaggcaggcctccttgagctgtgttgggctccacccagttcaagcttcccggccactttgtttacctactgaagcctcagcaatggtgggtgcctccccccagcctcactgccaccttgcagtttgatctcagactgctgtgctagcaatgagcgaggctccgtgggcgtgggaccctcccagccgggcgtgggaccctcccagccatgcgcgggatataatctcctggtgtgccgtttgctaagaccattggaaaagcacagtgttagggtgggagtgacccgattttccaggtgtcatctgtcacagctttgcttggctaggaaagggaattccctgaccctttgcgcttcctgggtgaggcgatgcctcatcctgcttcggcccatgctcgatgcactgcacccactgtcctgcacccactgtccaacaagccccagtgaaatgaacccggtacctcagttggaaatgcagaaatcactcatcttctgtgtcgctcacgctgggagctgtagactggagctgttcctattcggccatcttggaaccgccacttcattccttcttatggcyacttagtatccgctrtatggagataccatgttttatttatccatgcattggttgatggactttaggttgtttccaccctttgggtattaagaataatgctgcaatgaacactcatgtacatgtattttgtgggaacaaagtttwgtgggaatgtacaagtgtttgtgggaacacatattttcagttctcttgggtatatacttagcagtgaaattgctgggtttaactttttgaggaactgtgaaacttttccaaagcagctgcaccattttacatttctaccagcaatgtctgaaggttccagtttctctatatcctcattaacacttgttattgtccatcttttgatgagagccattctagtgggtgtgaagtgatgtctcattttggttttgatttacatttccctcatggctgatgctgttgagcatttttcccatgtgcttttttttttttttttttttttttgagacagagtctcactctgttgtccaggctggagtgcagtggcacaatctcgactcactgcagcctccgcctcctgggttcaagtgattctcctgcctcagcctcctgagtagctgggactacaggcgcatgccaccacacccagctaatttttttgcacttttaatagagatggggtttcaccatgttggccaagatggactcgatctcctgacctcatgatccgcccaccttggcctcccaaagtgctggaattacaggcgcgagccactgcgcctggtcctctttgtcaagttttaaattggggtttactttctttttgttatttagctgtaagagttcattatatattctggatactagtcccttaccagatccatgctttgcagaatttctctcccattttgttattgtcatttcactttctttctttttcttttcttcttcttttttttttttttttgagatggagtttggctctgttgcccaagcttgagtgcagtggcacagtctcagctcactgcaacctccgcctcccgggttcaagcaattctcctgcctcagcctcccaagtagctgggattacaggcatacaccaccacacatggctaatttttgtatttttagtaaagacagggtttcataatgttggccaggctggtattgaactcctcgcctcaagtgatccacctgcctcggcctcccaggttgctaagattacaggcatgaaccaccatgcccggcccatttcactttcttgatggtgtccttggcagcacaaaagtttttaattttggtgaagtctaatttatttattttttcttcacgtgtttttggtgttatatatttaaaagattgctaacccgaggtcattaagatttcttgttttcttttaggaactttatagggttagtttttgcatttaggtctgtgacccattttgagttaatttttgttcatcatgtgagttagggggtccaatttattctttttttttttttttttttttttttgagacagagtctctctttgtcacccaggctggagtacagtggcacgatcttggctcactgtagcccccgcctcccgggttcaagtgattctcctgcctcagtctcctgagtagttgggattacaggcacctgccacaaggcctggctaattttttctatgtttagtagagacagggtttcactgtgttggccaggctggtcttgaactcctgacctcaggcgatccacccaccccggcctcccaaagcgctgggattacagccgtgagccgccatgccagggctaactttatttgtttgcatatgaatatccagttgtccaagcagcatttgttgtaaagacaattctttccccattggcactcttgtggaaaattagttgatcataattttttttctattccattgatcttatgtggtacttatgccagtaccacactatcttggttattatagctttgtagtaaattttgaagctgggaagtgtgtctcctccaacttcgttctttttgaagatggttctggctattctgggttccttgtacttctatgtgaattttggcataagcttgtcaatttctccaaataagtcagctgggattttgatagggatcgcattgagtctgtagatccattggaggtgttttaccatcttagcaatattgtcttccaatccatgaacacgagatacctacaataaagaaccagtaaatcttccttttttccaggaaggagacaaatttagttggcaggcaaaacttagaatttaattttttgttttaattgattattttttatcttggctgtttcctaataagaaaggcatcttacattactgtcatatttagataaggtgttgtaggaatcggtaatttcatctgtaggataggggttttattaagcgtatagattgtcctctcattttttggcttcatccctttcttaattttgtatgtcccttcaaggcttcagtctagttgctggcttaatttttttctttttatgcaaatttaattgcaataaataattcttttataaggcaaacaatatatggggacaagtgatttatcctagcatttctttcctgcatgtttgcttcaccttaaatgtgtcatgtatactgtgaagatttggggctgatattaattctcttagggaaggtgtaatgtgagccagatggcagaataggacctttccgcacttgcccacctgaagaaacaccaacctgacaaccatccacacacacaccttcacaagagccaggaaaccaggcaggagaccacagctacacccacggtcgcacataaataagaaaaggtgcatggaagaggatgggaaggacagccttgmaccagcctcctccggccccaggcagcacagcatggagggagatgacctccactagggaaaggagagcaacgtgagtgccaggcctgcctcggacaccagcaccaggctgccctggtaaaaaccagcaccgggcaggccctgtggccccagttaccaggctgggccatggactgagcaatgttttttaatgaaaaaaaaaaaaagtctgttaatagttaaaaagaaagaaaagaaaaatttcarataatacttaagtttggaaaatacttagtgatttttgttttgacaatatagtggtccaaaaactctcagcacaagttccttaaaattctgattaagagataaaaatccccccatccccatccccaacatctttcaaaatgcaaagctcattgttaagaaaggaaaaggaaatccttttcccaaaagcaggaattctgaaagtcagtaggccttggaagccagagaatgccctgcctagctgtggtaacagttttcagtgctcacataggagggatagaaaataaaccttagacctgcccagacttgggagttggatggcagacccatgtgtaaagccaagatcccctaaacgacacgtttagcaaaagaatgaaatagaaaatacctcagtccttaaagtaagaaaataaggaaacttgatcttgttggaaggtgtattagtcagggttctctagagggacagaactgataggatatatacatatataaaggggagtttattaagtattaactcacatgattacaaggttccacaataggccgtctgcaagctgaggagcaaggagagccagtccgagtctcaaaaatgaagaacttggagtccaatgttctagttggggaagcatctagcatgggagaaagatgtaggctgggaggctaggccagcctcgtcttttcatattttctgcctgcttatattcttagctgcgctggcagcagatgaagtgtgggtctgcctctcccagcccaccgagtcaaatgttaatctcctttggcagcaccctcccagacacacccaggatcaatactttgcatccttcagtcccatcaagttgacgcttagtattaagcattacagaaggaaacaaaaccaatccaaagagggtttagtttaaagttgtcctggtataagagtgaccacaaactcctggcagaaaaacataagtccttctggagtgagaagctacgttctgaatgaatcagtgaacagaaaacatgaaaaaggttcacggaagctctggattgagatgttagaccccaaatacactgcctttgcctctctcccaaggtctcatttaagtatcccaaagtattttttttttttgagacagtcttgctctgtcactcatgctggagtgcagtggcgtgatcgtggctcactgcaacctctgccccccgggttcaagcgattcacctgcctcagcttcccaagtagctgggattacaggtgtgcaccaccgtgtccatctaatctgacaacacatcattagtgttttgtagtgtagtgcggaaggcattagtctatttcggacaggcaggagaggagtttaggaaaggagtgatggggggtgggggacgttttagctgtgtatggtcttgtttaattggcttttaatttcaggctgcatgagttgtcattggagggactagattttatggagaacagacttaaagaaactcagaacttggctgggtgcagtggctcatgcctgtaatcycagcactttgggaggctgaggcggatcacctgaggtcaggagtttgagaccagcttggccaacatgacgaaaccctgtctctactaaaaatacaaaaagtagccgggtgtggcgtcgggcacctgtaatcacagctcctgaggaggctgaggcgggagaattgtttgaacctgggaggcagaggttgcagtaagccgagattacgccactgcgctccagcctgggccacaagggtgaaattctgtctcaaaaaaagagaagaaaaaaaaaagaaactgagaactctggtatggaaagatgaatgtggagaaaagctgtagtcagagttcaaatcatctttaaagtacacatgaactcgcttgctcactaaacccaaagatggtaaaataggcagtatttcttgaagccaaaggagtgggtttttcaggttatccaagaatgaatcaaaggctggaactgaggtgatcaggggtcaagcgcggactttgcttggccatctcttttggatggtgcactcaacaagggcactgactgtttacaaagtgtccttcctctagcatgtggtgggtatacctggtagtctaggaaccttccaggtatctgtccaaggcatagggcacagcatccctgtttcagccatctctccatccatcttcttcccaacactgtgatttttttttttttttttttgagatggagcctcgctcttgttgtgctgaagtgcagtggcgcgatctcggttcactgctaacttccacctcccaggttcaagtgattctcctgcctcagcctcctgagtagctgggactataggcacccaccatcacgcccggctaatttttatatttttagttgagatggggtttcactatgttggccaggctggtctcgaactcctgacctcaggtaatctgcctgccttagcctcccaaagtgctgagattatcggcatgagccacgttgcctggcctcaacactgtgattcttttttttttttttttttttttttagatggagtcttgctctgtgcccaggctagagtgcagtggcgcaatcccggctcactgcaagttccgtctcccaagttcacgccattctcctgcctcagcctcccaagtagctgggactacaggtgcctgccaccacgcctggctaattttttgtatttttagtagagacggggtttcactgtgttggccaggatgatcctgatctcctgaccttgtgatctgcccacctcatcctcccaaagtgctaggattacaggcgtgagccaccgcgcccggcctccaacactgtgattctttatggacctatctcctctactacttcatgaagttttgagggaccaggtcttattgaagtttttgttttgttttgctttgttttcattcttacttttgaatgattaaaactgaaaatggatccaattactttagacagatgctttataaaggaaaatccttggtgcatgcctcatacccctactccgggatatgagaaagtaggttatgtttttaacaaacttttttgatagacatatatggaaagtttgtataattttgaagatgtattttctctccatgtaattatggctggaaatagccggagagaggagcagagtgtgttttcaaacctgggaatgtgtggggcctgctgtttcccatccggcattctcccacggtcatcatttagttgagtgcggccaccaggctgcccctacacatctgtcactgacttgttcttctgatcactgcaagtgcccacgtttgagaaggctgatgagggttaaggcattttctagagcatcagtggctggttaacttggggktagaacttgtggtgtcaaaggcattaactaacagtgatatttctgtttcttgaacactcactgagagttttaggcttatgctcagtgtttgcattatttcattgagtctttttgacaatcgtaattagatttgatgatccctgtttcttagggatatgcagatgtggccctggaactcaggactttacagctccaggctgtattcctccctctccatcctgccagagacaagtcctgtgtctggagtttccctctgatcttgtcactttatttcttattaacagaataaagcaggtctaaacttactttctacttggaaatggaatggtgagttaatatttggatccctcagagtctgccttgtgaataaagctccttgtcttgagtagtcttggagccactttcgttggaacctcacataaacatctgggccctgaacttggacttcgtgactgtgcagcctattgaaagattagaacaaagatgtgctgattaatatgccctaaaagagcagcaggttggaaatgagtttggggatttcatctcatttcaagatttcctgaggatcttggcctagctttgccagggaccattttgtactccccggctccttgtgccataggtgcctgtgtcgaccaaacatggctttgtcctgaggctctctgggctcatggcttctcagtcaattgtctgcctagtgcccaaaagcagttgcgctcsagcttttcccattaaggaaccgttttagggctttaaagtgatgtcaattccatttgcaatgtagtatttatcatttgacttcttattacactgaaatgataagaggaatgaagtaatattattactgatcatagtattatttacaacctttcatcttagataggttccatgaaagaatcaatgggagttctaacgcattggtggccaaggcatgtgaccttccccggctgtcacctttattttagatggtgacctctttacaggcactggctaagatcagtattcgtcttctctgcccccttctctgccccaacatctttgatcatgtctggcacatagtgggtgcagctgaaggtctgggcatttccagatttgtgatgaaggcgttaagtacccccacctcttctttttctttttttcttttcttttctttttttttttgacatggagtttcactcttgttgcccaggctggagtgtaatggcacaatcttggctcactgcaacctccgcctcctgggttcaagcaattcttctgcttcagcctctcaagtagctgggattacaggtatgcaccaccacgcctggctaattttgtattttttagtagagacggggtttctccatgttggtcaggctggtctcgaactcccaacctcaggtgatctgcctgcctcggcctcccaaagtgctgggattacaggtgtgcgccactgcgcccggscaacccctgcctcctctttacagtcctcttccaccccgtccctggctgctgtcctccagcactggggcttctgttcgctgctgtactgcacactcctggaaagggacaggccatgtcctactcaaatttgaatattcacggaccatagacctagacaacaacttctagatgaaaacataggatatctttgtgacctcgggcaaagatttttctcagatgaggacatagaaggcactaaccatagaagaaaaagctgatagattgagctacatcacagagaaatgcttttgcttatgaacactcccttagggaaataaatcggcaacagaccgggaggaaatatttgcaaaacacatataactaaggacttgcattcagaatatatacagaactcgtacgactcagtaataaaacaaacgatctaattttaaaaactgtcagaagatttraacaagcgcttcacaaaggaagatataccagtggccagtgatcatatgaaaaaggttcaacatcattagttttcagggaaatggaagttaaagccaccacaacgtctaaaataaaaaagactgatatcctcatatgctggtgagcaggtgatatcctcatatgctggtgagcaggtgatatcctcatatgctggtgagcaggtggagcaacagggattctcacacatcgtcggcgtcggcatgacctttcactgtaggaaaagtggggctggcagagatccgatatgtaggtaaattgtgtgggagacacagagaaaggacattatggagtccagcatggttaggagaatttagggaaagaagcagcagcttcccgctgaagggcatgaggaccagcttcttggagagggtggcattggaaccgagtgtccaaagggagagccagatgtggctgtggaggcattgcaggagcagagagcctgtgtgccccggcggcgtcacctagtacagcctgcctcatacgcttccacccatgattctatgtcaaagagtatttcaytggacttagagcagctattttgtttattttttcattgatttattgtcatcctccccactgattctaagccaggggactagcctgtcattagcatggaggcccccaggggtaggagtcttagcttgttttgctcactgctgtatcctctgccacaagagtggctggcaccagagtaggggttcagtaaatatgtgttgacagaatgagaaaacaaatgagttaaagttgttcagtctggtgaggtcataggtaggcagtggggcctcgaatttccagagcaggttggggctgaggagggcctggcatgcccgtgaaggcatttgggctccattttacagtcctgaaggggtctagtggtttcaagatggggattgtcttagtccggtgaggctgctgtcacaaaatgccacagactgggtggctgataaacaatagaaatgtattgtgcacagttctagaggctagaagtccatgatccaggtgccagcatgtttggtgtctggggagggcccacttgcttgttcatagaccgccgtcttttctctgtgttctcacatggtgcaacaggtgagctagctctttagggtctcttcttataagggcactaattccatttgtgagtgcttcaccccctgacccaatcactttttaaagtccccacctcctaattccatcaccttgggggctaggctttcaacatgtgaattttggggaggcacaaacattcaaaccgtggctcgggtgatgggctctgagccatgtctcaggaacctaagtctggcaggggtgtgtggacaggtgaaggaaggtcgagaggtggtaggaagacaatgccgattcctcttccagatgagggctgacgagggccccatcgaggccatggcagtgagcgcggaggagaggggatggagggagggtttggaggcccaagttggaagggcgttcaagctaaggctctgtactcacagaaacatcagggaaacattcatcgtccagggcagaggagggagagaagcgcttccttaacagtgctcctggagcagcagagtgggctctgccttccttcttctctgaaggcgctgtgcagtgggcagggcccaggcccagagtcaggtcttgtccctgatacttcttggctgtgtgattttgcacaggtgattaatgtgtccctgagctgttaatgtccttatttgccagctcacaggatgcttgtattgagtaaatcaggtacgttaagtctgctgccatacagtaggtgctgaagaaacagaagttgttggctgggcgtggtggctcacacctgtaatcccagcactttgggagactgaggcaggcagatcacctgaggtcaggagttcgagaccagcctggttaacatggtgaaatcccgtctctactgaaagtacaaaaattagccagcatgggggtgggtgcttgtaatctcagctacactggaggatgaggcaggagaatctcttgaacccgggaggtggaggttgcagtgagccaagatcgtaccactgcactccagcctgagtgacagagtgagactccgtctcaaaaaaaaaagaaaagaaacagaagttatgattgctacactacagggttgttgggaggattcagttgggtcttggatgaaagaaaacttttgtaaaccctgaagtcttaagtctgatatcagtggtattgttaataattcattacccagttacatgattctgtgtcttcttgtgttttaagaatttttgtgtttgatgagagaccttgataaaatcctgttgtgtagatgaactcttgttccttttcttttcttttgtgaaggaacttaaagtagaggtctcagatttgtagcaggtacctttgtagcagagaatctgggctttatcagcaggaagatgggctgcacctgcagctgtggctggggaaggtctgaagccacctggggcctgcgccatgcgctgctcaccaggctttccctctccttgattctcctcgattctcctcaggtctttgttttatgaagagacatttttaatgtgtgcttcttttttcacttatacgtttctttcaaaagctttttactttctctctgtgcttcagctttctgaggaagagaaaattcagcgctacagcatcctctccgagctctatgagctgatcggcttccatcgcaagtctgcgttcttcaagcgcgtggccgccatgcagtgcgtggccccaagcatcgcggagcctgggtggagggcctgctacaaactcctcctggaaacgctgccyggctacagtctgtcgctggatcccaaagatttcagcagaggtactggagtccccttgctggcgctaaggtgttgctttctgtctgatggtcacatgctgtttcagcccctgccctgagtggcagacatcgtggttggtgctggtggctccagaatgactagatccctgccctggagttgggtgcctgctgtaatccgattataggaaaaagtactggtgctttgccttggggctcggattcttgaatctttatcagtgggagtcagaaattgcctttgagttcattggcatggtgtgtcatcatcaatcaaacagtggaagtacctaatgaattttactcatgagatttagttagtttagcacaaatcaatgaacccagaataaatatccttgggtatatgtgtatacctgagctatgcattcagcagtaaattcttattctgaaatattaatgcagggtaatatgtattaaaaataaagctatcaatctaataacaaatatgtacaaggataatgcccagtattagacaaagtctgattagaaggagaaaaaacatttttgggggccaggcacggtggctcactcctgtaatccccagcactttgggagaccagggtgggcggatcacttgaggtcaggagttcatgaccagcctggccaacatggtgaaacactgtctctaccaaaaaacaaaaattagctgggcatggtggcgtgcgcttgtagtcccagctactcaggaggctgaggcaagagaattacttgaacctgggaggtggaggttgcagtgagctgggatcgtgctactgcactccagcctgggcgacagagaaagaccttatctaaaaaaaacccaaaaaaacaaaaaaaaaaacatttttgaggggttacttttagataggaaacatacactttttctttagttcaagcctagagctagtgaaggtataggcttctagacaggaaagaactgtgatgtcatctaggttaatttcccaccagggcaaaaatgggttcttcggcatcctttttatttttattttttttcctgagacagagtttcactcttgttgcccaggctggagtgcaatggcatgatcttggctcactgcagcctccaactcctgggttcaagtgattctcctgcctcagcctcctgagaagctgggattacaggcacgtgctaccacgcccagctaatttttgtatttttagtagagatggggtttcaccatgttggccaggctggtctcaaactcctgacctcaggtgatccgcccactttggcctcccaaagtgctgggattacaggcatgagccaccatgcccggcctcttcagtatcttttttatgtggtcatgtccatccatttcactggcctctgctgactgaaggtgctcatggctttatgatgaatccaaaagttctgcttttggataattctgatagttagggctctccccaacgttgaattaaacattatgtttctccttactttcacctgctagaatatctgaagacatctactggacttttttgtacattgattcaacaggtagttcgttatactcctgcccccatgccatgcagtgtgttgggtgagtgatgcgatggcaaaggagacagtttctgccctctacagtggaaataaacaggtgcctctcacatgtgacagcttcccggtgtttgcacagagctctcaggtccttccagagcctgcttctaacttacgtgtctgtggttgctgtgacagtcactcctaagtcacactccccagacttcttactgttcaaccatcttcccaggcaacacttacatttgatagaacctcaaatccgattctcaggatgcattctggttagcttcgagcaggggtcagcaaatgttctctgtaaagggccagatagtaaatattttaggctttatgagccacacggtctgtgcggaaatgactggaccctgctgttgtggtgtgaaagcagccatggacggcacgcacaccatggaactgtgtttacattagtacatggtggccagatttggcatggcagctatactttgcgaaatccctggctgagaacactgtgatatttgaaatcatttatttatttttattttttagagatgaggtctcgctgtgttgcccaggctggcctcaaactcttgggctgaagcgatcctcctgcctcatttaaaaggagggcactgggtttggaagagaaaacgcagactgagtgagtaatatagcaggaggagagtcaggcgggcagtgaaggggagtgaagggaggctgggatggagtgtacgcagcactttagcctcttatttctcttcagggaagagaactagacctgsggggtgcttttgcagtctggggagggcacttctgctctggactgctgtggtctggccagaagctatgccaggaagagctaaggccctgcgtgaagcagatgtgttcagggttgaaaatcccccaagtcccatcaagttccccatataaatccccagtttttatgggtttttgtctttagagcctaagatatcctgcctctctggagccacaggggcaggcggagcgctgatgaccactctgggcaagtgataaaagcctgtcatgctgtccactcaggtgagatggctgagatctggcagggagtttggcactttgtgtgttcaccctcaacatgtgaatggtgtccagcacaaagcaagaaccaagacgtccctgcggaatagaaggcctgctggagagggtcctgaactctgctcttgacctcttgcactcagtatcatcacaacggctaagacaaaagcaagggataagatccagcttcaaaatgaactccaccaacagtatgagtccagtcatcagcacagccagcacagccagatgccaagtcccacgtttaaagaaaccccaaaaaccatgacggggtgcagaatagaggagacctggagaggtcatacacaaagatggataaggtgtgctctgagacgaggtttatgatagtttttcttcacctgcccttcctttctctaatttctttttcctcggtgttccctggagggataggatggaacctgtctccccaccccttatttcatgattgacacctttagatggaccatgaggatgtgtgaattgaggctgatgacccacttacctcctgcccttgcagacgcacagacttccccactgttaacaccccataccagggtggtacatttgttgcaattgatgaacctatgttgacacatcatcatcacccaaagttcgtagtttacattagggttcactcttggtggtgtacattctgtgggttttgacaaatgtgtagtgatgagtatccaccattatgatatcatacagagaagtttccctgccgtgaagatcctttgtgctctgtctcctcatccctccctccctatttattaccttctggcaaccactgacccttttactgtctccatagttttgcctttccagagtgtcatatagttggaatcatacaatatgtagccttttcaaattggcttctttctcttagtaatatacatttaagtttccttcatatcttttctcagcttgatagctcattactttatagtgctgaataatattctactatcagaatatgtcacagttatttatacattcacctaatgaatcttggttgacaacttggttgcctgcaagttttggcaattgtaaarcagccataaacattcatgtgcaagtttttgtgtggatataagttttcagctcatttgagtaaatatcaaggggcatggttcctggatgatatggtaaaaatatgtttacttttgtaagaacccgccaaactgtcttccacagtggctgaaccattttgcatccccttcagcaatgaatgagagttcctgctgctccacatccttgccagcatttggggttgtcactgttagattttggccattctaataggtgtgtagtggtatctcgttgctttactttgcaatttcctgatgacatatgatgttgagcatttttcttatgcttatttgccatctggataccttctttggtgaaatgtctgttcagatcttttgccccctttttaattaggttgtttgtttcattgctgttgactttaagagttttttctatgatttggatgacagtcctttatcagttgtgtcttttgcaaatatttcttcccagtctgtgtcttgttttctcattctcttgatatgtcttttgcagagcagaagttttaaattttaacgaagtctagcttatcaattctttctttgatgggttataccttgggtgttttatctaaagatataacattagtatacctaaggtcacctagattttctcttgtgttaacttctgggaggtttgtattttctcatcctgcatttgggtttatgatctgttttgagttaatttttgtgaagagtgtgaggtctgtgtctagagttatttttttgcttgtggatgtccagttatttcagcaccatttattgaaaagactgtctctgctccattgattgcctttgctgctttgtcaaagaccagttgactatacttaggagattctatttctgggctgtctcttttgctccattaacctatttgttctttcaccagtaccacactatcttgagtactatagttttatagtaagcctcgagattagggatatttttatttattaaaaaattttataatagaatgatttatatttctttaaatcattctattataaagacacatggacaggtgtgttcattgcaggattattcacaatggcaaagatatggaatcawcctcaatgcccatcagtgatagactggataaagaaaatgtgctacatatacactgtggaatattatgcagccataaaaaatgagatcatgttctttacagggatatggatggagctggaggtgattattcataccaaactactgcaggaacagaaaaccaaataccacatgttctcacttataagtgggagctaaattatgagaacacatggccacatagaggggaataacatacactggggccttttggagggtggagggtagaaggagggagaggatcaggaaaaataactaatgggtactaggcttaatacctgggtcacaaactaatctgtacaataaacccctatgaaacacgtttaccagtgtaaccttcacttgtagccctgaacttaaagtaaaagttgaaataaattgtccttattagatgttacaaaaaattgattgttcacaaaaggtgattgttcccattttcttctctgtttcttggtattttaggtgacatacctggagcagctgctgtgctgggcagggtcgccgtgcagttgcagcctgtgcggggtgctgggccctgcttgccagccatctgcagctcagagctgggtgcattcagatgaaggggcgctgttgtctcctgtagggaccttctgggcatgccttgctaagcctggtgcctgcaggctgtgtttgcctacggggcatctctttctaatccacgccaaggctagctgtggcctcatggtaaatggcttcacatgcgtaacctcatttcttacagcctggtgagtggagaccacgcgttccacgtgccatgtgagggaccagggcaggcagggcacagtgttactcctgaggttgcacagctggtgggagcacaggacgccattactgaccagctgtgggatgctggccgtgtccctgagtcctgtgtgcccactttctcatctgtaagtgggccactagtttacactcgtttactggtagaggttgtaaggattgaattggttagtccttgtgaggtgctttggacagtgctcagcaaatgttagtggctgtttgtcaaatgagatctttggtcaggtctagtatgcttcccatagcatcccctgaggccagcgtgaatggggtttgcaaggcctgtccctccctggctcccccagaaagagtgtgtgttgctagggcaggccctccctggcctttggttgcagatgagggccagggaggggtctgccctagtcacacagttaattttggacaaaataactggacaagccctaaaacttgtaggatttacattttaaaaggctaagagtggccaggtatggtggctcatgcctgtaatcccagcactttgggaggtcaagatgggtggatcacttgaggtcaggagttcgagaccagcctggccaacccgtctgtactaaaaaaatacaaattagccaggtgtagtggcgcatgcctgtaatcctagctactcaggaggttgaggcaggagaatcacttgaacctgggaggtagaagggttgcagtgagccgagaatgcaccactgcactcgagcctgggtgacagcgagactccgtctcgaaaaaaaaaatgctaagagttactggtggaggaggagagattagacctcagagtcttagcacgggagagttgggtgtctaagctcatttaggctggattctggagaaatttaattgggaaggagtagtgtttaggaagaagaaagtttttaaagcaatcacactattgctttgtagagtgataagaaagtgtattttaatagatttctatgtgcacttgtgaatggaattcccatttgctgtgcttttgagagacttcaggcaagatttaaattgcttttcggttccttttttttttttttttttttgcatcctttgaatataactccaggctggcttcagggtaaaagcaagcctcctgggctctatgcaagttatcttaggagtggtcytcattttctttttttcctgtcccggggccagttatctgtaacatttaagactgcatcagtctgaggtcttctgatgcctcttgcctccttcggggacactcttccctgtccttcctgcctcactcccrgtcatcctcaggtcacagctggatgccatttcttcggagaggtcctcagtggtcctttcagccttaagtggaactgttttatttttctctttcatcgaatgccgttttctcttttccttgaattctgttgttcttccttataacacttcccatgatttgtaaatacatttgaaaaatgtttggggccgggtgcagtggctgacgcctgtaatcccagcactttgggaggctgaggcaggtgggtcacctgaggtcaggagttcgagaccagcctggccaatatggtgaaaccccgtctctactaaaaattcaaaaattagccaggcatggtggtacgtgcctgtaatcccagctactcgggaggctgaggcaggagaattgcttgaacctgggaggcataagttgcagtgaaccaagatcgtggcattgcactccagcctgggcaacaagagtgaaactccgtttcaaaaaaaaaaaaagacgtttgtgtcaggaggagacattttccattattttgtgaaagaggctagagaaagaaggtgactggctgagattaaaaatgataaatgtcagctggctgtatgtttaacaaaacacaaaagtcactttaaaccccatctccactgtggctctggactgctttaaacatctcccagagaatttaatggaagtctactaacaccctgtacctgtaaataaaaggcaaattgtctgtattctcaggtcccaaaatgtattctttttcttgaaatgaacatttgcactagctggttatagacggtcgaggaaggaacactgatgtgtgctgtgtgtacttgccggcttaaggggccgcttagtatcatttaaatcttatttgtgttgctgtatatgaagatttttgatcatgccttttcctggacgagggattaaattttgcccaggaactcttatgaaagaaagagactgctaaggcagatggatttgctaaaaggcaatagttcatatacaaaataaacctccaaattggtgaaatttttgattacaagagtattgaaaattttatcactgggtcatatgctgcaaatctgccttcagaaaaataattcacattttatagggagagcactttgagccacatagaaattatgacttgtacactatttactgttaagaaaatgtatactcggtcttactcataatcgcccgtggtaggaactggatcattatctatttttaaaagaatcagcaaagtgatatttgcccaattcttatgtgagaaaaccttctggatatggtagtgttgagattagttaaattgggtctttctgaattcatggctaggttagtcatgacattgatttcagcttcataatctttaaaaaaatstcttcttcattttggcatttggtcttggcttcttttgacaatgtggaatattgcagggactcgtctttctctcctttcctgcagttgtatgagaagtactaccattttatattccaaaagatgtcgggaagataaactactaagatataaagtagtgttttttttatttttatttttatttttttttaagtgtgtgtatggtcagctccaaggatttcaatgagaagttatggagaaatactttaaatatatacaaattagagaggatagaatagaatattgtgtccattgcccagattaaatcattatcaaaatttgaccacattggctttatttttactttattggtttttttgttgaagtatttaaagcagatcctagaaaccacatcactgtactccttcatagctgtatgcacgtccgcaacatgggagggtttcctttcaccagccttacgtcttgatccacgtgtgtgttaagtaccaactttgttatcaggcaccctgccaggcattaaggacacttgaatggataagacataaacctgcctcccaaggaaattaaggattgatgagagaaacaaagacatgagattacaggtgccttatggtacctgccagataactcctgtgggctgaaatttgtgcaaaatacagcggaaatacagaagagggactggtcagctgtgcagggcagagtgctgagggaagagctcaggaagggctgtgagcggkggaacccttggagcaacgtcttcaaatatcaatgggcaaacagagaaaggttaggatagaaggaagggcccctgctatttgcgttagggaggaggcatcccttcttgttctgtttgctcgccagtcagcctcagccgagcgcccagtctcacgtcaggccctgtcctggggatgcaatagtaagtaacgcacagtcttcaggtacaggaagtcatacctgaatgggggattttgacacacaagcaggtaattttacttaataaataatctcaatagggatttaaaaaaatggaggactcattcttagtgaaacagtggaacaggttggatcattaatcatgtcacagctagagtcaaaggttgacctgtgtgttaaccacattatattcattgaataataatattaatagcaactagcatttrttgagaacttatgataaataaactgctgaagtgctttaaatgggttattgcactgaagcctyataactttaacttgtactccgactactgtctccgttttacagtttggcgtggcccccttctcatcgagggttcaccccagatgtcacctccttgcccacctgccctggctgacgcagcatctctcagccccatcagccctcactattactgtttgtgttcgtcccagcatccaccagcatgctgtttcccagggctgaggcctgactcttcccacaagagtgtcaatggcacgagaacctgccctgcacagtattgtgttctcagtaaatacttgttaaccaaccgactgtcgtgagctattacggactttcagtgcgtggcagttttgtcagagtttgaatgtgcatttatgcgttttttcatggtctaagttttggatcagctggagcagtgattagccagtctgtgtggttggttatcagagccattggcagggtgtgtgtgttaacacagattggctgggagcagtggctcatacctgtaatcccagcactttgggaggccaaggtaggaggatggttctaggtcaggagttcaagaccagcctgggcaacatggggagaccctgtctctactggaaaaaaaaaagtagttgggcatggcggtgtgtaactgtagtcccagctacgcaggaggctgaaatgggaggattgattgcttgagccctggaggtccagactgcagtaagctgtgattgcaccaccacactccagcctggatgacagagaaagacctcatctcttaaaaaaagagatacttttcaactgtctgtgcatccagatttctccgtctttaattcaaagatgctaaactgttttggagtgagcagctgtagaatttaactttttttttttctaatttagctatctacttttcttcatttttcttatattttagagaaatattatatttttgatttaatgttgttggttgttgataatgaaggcccttcaaatatgagtattttcttggaaaaaaagtatgtctctagctcagatatatgaaatccatcttttgttctaagcttattatttcgaagcaggctatttttgaaatcaaatcatgtctttgcagagagagaagctatagtgtaatgcctgtttttgctgtatgaaaaccatgccaactttaaagtacttttccagggtcattaaaagcagaggaaatattttttgttgctcttggagtttggtggttgaggcatctgtcttcaaattgccaagttttacaacttagattaaccgtatttcctgtaccctctccaagcacttttgtgatgttttgtaacttccatcgcaggcacgcacagaggctgggctgcggtccagatgcgtttgctccatgaattggtctacgcctcccgaaggatggggaaccctgccctctctgtcagacacctgtccttycttctacagaccatgctggacttcttgtcggatcagggtgagtgagctcaaaccacaatgttttttttcaaggaactgtgaatgagagcactttagatgctggttcatgtaaaccctgggcttgggtttcagtgggtggaagatgctgcccagctcttcgtcagtgacaaggtccctgccccatgccttggctccctccttccacactcacttctctgggacacctgtgccacctcctcccgccttcacgccatctcctcctgctcctcggccgccacactccatggcttttccctccacctctcaggcttcttttcagcctcctgtgttgcctcccatttccttagcctgcctttttaaaaatataaatgtcaaagcrtaacatttacatagaggagtgcacgactcataggaatgtggctcagtaaattctcaccaagtggccaccgctataatcaacacccagatcagagacgggcaggaacagaacccagggcccctcgtgccccttcgagtcactgggtaactccatccccccttccagaaccaaagatgaggtttgcatgtgttggctctcatggggccacgcggtgtttctgcccctgtttcaaggttgcctttctcccgggctcctttcttggccttcatcttctcttcttacactgctcctgggtgctatctgctttttgagttttagtcatgacctgtttccctacgcgcttggggctcagctgccccaaacctgccttcctccttgtacccctggccctggcccagtgtgtggtgccagctgggttcttggggaagtgctgtctgctggggagactgatgtgtgcagagtgtattgggacgtactcatgggatcagccccgtagaagggaagagatggaggcgagactggacagtgggagaagctgggcctcagtgctatatggacacaggcctcagctgcacggggagccctgcactgccgtggcctgcagacgtgtcccatgttgttctgagggggccgggccattctcctccctcactgaccagcagttgaatgcagtctaccctgggtgatgtggttctcttcagcaaggagacaaggcttctgctgacccagcagggcctgtgcagctgggaagccgtcggagagatctctggcgatgggagggccggggcttcctgtccccgtgccaggccctgggtgctcactgctcccaggaaagggtagggtcttgatgaagggctcttgcccgtcaaggacaacttctggggaggcagcactctcccctggggaacgggcctctcctccctgcaggccgtctgggcgactcattactgccccctgcagtgctgtgccgtcactgctgctgtccaggtggcgaccccactccctcagtctcatgtcctggcacctcccaaatttcgtgcttctctgttttcacatttctaaaagcagcacatctttctctccagccctccacccactgctttcccctggctgttctctgtctttgagcaggctctggctccagggtaacgtggggtgtgcatctctgagggtggttgtgaggtttaaatgcactaattctggccggatgtggtagctcattcctgtaatccgatctctttgggaggcccaggtgggcggatcacctgaggtcaggagatcgagaccagcctggccaacatggtgaaaccccgtgtctactaaaaatacaaaaaattagccaggcatggtggcaggcccctgtaatcccagctactaaggaggctgaggcaggagaataacttgaacccaggagtggcgcttgcagagagccaatgttgcgccattgcactccagcctgggcgataagagtgaaattctgtctcaaaaaaagaaagaaagaaacctagtatacattaagcagtcctcataaagcccatcttctcactgcacctgttgaaacactagcattctttaaaggaaacattgatttccctacagtgatttccacggccatctctaagagaaaggaattctcctttcgtgaacccctgtggttctttgttgccaaggttctgaaggcacacaccacttattgtggccgttggcatcctcgtgtggagtagctgttgttttctgttgaggacttctggtgacccaagtgaatctctgctctgaccggggcccctgcgacagccgtgcagctccttttctgcgtgtattgggtcgctgttgcttttggggctgcatttgaactgtgcttttcttgattgtacctgcagagtgagcaggtggccagcagggccaccgtggaagctggctccatggcccatttgcactccggcgtttyggtgacgggagggagcagcaggccgaggcagagctcccagagccacccgtgtctcctgctggggtgactgtggctcagtggcggcttgggcagtggtctggtgttacctgctcgagtgaatgtttgctctccccagcccctgggagtgctgcccacctcccctactcccctggaatttcttgagcctccccgtgatccagcaaatctaaagaggtagtgcctggactctgtgtaggggcttagaatctcgggtgccatccctgacccatggcatgtccctctgcccctgtagccaggactctgttctctcctggtggcagtgtccccacatacctcacctcagtaagcacagtccccacggttggtgagttgtggtgacacggccctgagcccttcgcctgagccgtcagtgtcactccttcgcctgctgtgtctgctgcatcttgaacttcttcagcacacaccttccttcccacagcagggccggtgcacctcccctgtccccacaccctgccccttcaccatgtgactcctcttgggcctggcctcctcttgaaagccttcacaagtccctagctagaccagggactctgggcctctgctctctttcttcctgcacttgtcggtcatcagttacgtatttagttggtccatgcttgtctccctccatgggagaaaacctcattctgcctgctgtctacctggagctggacctggcaaaggctagatgccaagtgcatggctgctgaggtgtgagtgatgttgtcacagcccttgccttcatcgtgattgcttatggggaagttgattctgacttgggtcctcagacatttttcaaaagcacattcttggccgggcatggtggctcactcctgtaatcccagcactttgggagggtgagacgggcggatcacctgaggtcaggagttcgacactagcctggacaacatagtgaaaccccatctctactaaaaatacaaagattaaccgggcgaggtggtgcacgcctgtaatcccagctacttgggaggctgaggcaggagaatcgcttgaacccgggaggtggaggttgcagtgagccgagatcatgccactgcaccccagcctgggtgagactccagctcaaaaaaaaaaaaaaagcacattctttttacaaggaacacatgtgtgtttgtacactgtatgtgtgtgtatacgtatgctgcatcgtgtttttctgttggagtttgtatttctcaagggcatgggccatatcttcccctttgggtaccctgcggtttccatgggacatggtgagatgactgagcgtgtatgcaggatcaataattggagtgacccattccactcttctgtgtcaggctgatgagccgactgtctccactccagacatgtgaggccttgtcttattttgatgacggcactgagaagtagattgtgtttcccagccccacgtgctcggaggttgatgtttacacgtgtgtccatgaaatggccgccgggaagaacagagagtggacgagcacatagggctctctgttaattgctctgttgctgtgtttctttttttattaatagcattcatgtattgttgatgagcatccccgtgcctgggagtggtggtgggtgtgtgcctgcctatctcccctgcccttcctgtccagaactcagtgtcagcgtttttctccaggtggcaaagaaaacctctacaggaaaatacagcgagggttctcattgatgctttaacctctgccttccccaccgttttttcttatcctgtttatatttttaagctttgttcacttctaagcctattgtgatagttgtaccttttcctcatgtgatctttcaaaaagggtgatctgtatgctatatttttgagtaattagacattttataacaggtcacattggaggctcttttaatatatgtgtgtaaaatatgtaaatgtgaactcttattgaaacgacatgtttaaccacagcctgtggtcttcaccagccctaagtgaggacggaggcttcaagttggatgtggctcgcccattagactgcttgtctccctcacatggtcacgactggccattgcttttatggccagagcccttagttaattcccccccagtgctgtgatctctcttcggtgtatcttctccatgctggaatcctgaggatagtttctttttttttctttttctctttttaaggtctaccagaaatactggaggagaatatatgtttaaaatctgagtttgaattagtcatggtaggaagttttgatccatggtatttgtagagtgagttaggagagattcatcatctcggtttggatgactgacaaagctgcaaccagactcagctagatttcagatcaggcggttgatgggaaaagagaggaggagctgtgatcatgatgtacttctaaggtctgctttcttttggtggattgttagttcccagtgagaaaacagagaacgaaatcactatgcttccatatgggctgtgtttccattagatataaattgcgtttgatttttgatgaaaaggcagcataaccctctagaggtgtcaggtgccccttgtcctgggaaggggacgcacactgtgattgatggggtccaagctgtatgtttttaggtgacaggaaaatttgtttatccatgaaatgctgatagtgtcttatggttatttaaagtcatattaattagtgatttaaagacacttagtttaaaaggagaagaacttgggacacttgatactgttgaacaaataacagtctcttgaaagacctttatataatgatatttggttaattggagtcgtctgagaaaaggacaaaagtcaggaggtctgagaggttctttccactcatctcagcctctaattactgtaacctccgatcaataattacattctccccagcctccattttctcatttggacagctgggttgtgcagggctaggtggcggtttgttatttttaatgatggatactataatttattggatggtcttttttgctgaagagctcatggtgctattcacagacttgataactaacatttctaaattttgctgcattgaaataaagtatggaatagaagagcagccaggaatggaaaaacgtgaccccagggttgaagagggtctttctagctttcttgtcctttgtgaagctggactggtgatgtgcagttgaagacagcatcatcgggggccttctgctccatgtgtaccctccagtatttgcaaaagattgaacctacaagatacgttattagggcaagtatttacatggaaaggctctgagttctccaagactttggtcattttttacaagatgatgtactaccctgatgatttgtggaatcttcttaggaaccgtgactgtgttgcttttctgatcatgggtacagggccatctttgttgaggcttcccatgtgtgtgggcacagagcttctgtggcattccagcagtagattaatggagctgtcatcctctgaagcctcatgggttgtgcatgcaaacctggtcctgtgaactgcatgggagtctcttaaaagggcagagggattccttcctttgtgaaaggtttagaatggcacatatttgtaatttccagactcatcttttcccactctcacattcactctgtatttggccgtactaaattgttgacagttctccaaatacaacagcattgctattctgctgccttcgtacatgccgtttmcattactgtcacattgtccaggaattcatccctgccatgactgcagtgccccctctgggagctccccgtgccctgtgcctgccgctgtcagagcttccagcatgctgggctgtggaggtgttggtctgtttgcccacccagcaagcctctaagctcctcaaagacaccaactgtcacgcatatctggagcagcacctggtaccttacgggtccttaaatgccggctgaatgaatgatgtcttctgtctctttaaacccaccttctactatgctaccaaatggatatttcttctaactggcaattttaaagatcctgctgtggcctttggtcaggcttttgagcagggtttggcaaaccgtggcctatggaccaggtctggcccgcggcctgatggtcatccttgcgctggccgtttcaggatgaatttacagttactgacaccaattcctgtggaaaataaaaaagactcgcggctttcacatcacgtagcttaaaaagggaacacggggaaaaactagttaggtaaactgtttcagggactgggatcaaaagccccaggtgagcgagtaaggttcaaccatatgtaggctctgctactgtgagtgaagtgcggttatcaatacttacgaaaagaaggggaaaaaatgcatactataaatakgtcatattaatgctactgtgaaaagactgaggagtgacgaaaggggggggtcccatgagatgggagggggccagtgaatgaacctgtgttaaggatgtgccttatttcacagcatttctgctgttggaatgactttaccaggttaggatggcagggagtgtgatgttctcacgctagagtatagatggtttgcgttgcacatgatttcctgggcttggtcttgttgggatctgaagtcttttggtttacctcttctactgtggtccagtgtctttctggaggcctctgggtagatggtgttttctcgaaaaccctatctgtgtcttggtttttgcgtctaccttgtgggattgttttaaggattggagatgacacacctgaagtgcctaacaatgtctgctgccaagaagtgcttagtaaatatcataagatggcactgttttccttctgggggacctggacgccagctccttggtcagacattagtggttcttttgctcaaggttaccttaagaagactcggagagagaaatagggaacagcagaatcaccccaaagggctgtcagatgtggatgtgattcttttccaagatgtgctgctgttataatttgtcttataatattgtaattaactctagcagtgctctgactggcctggggaaggggtgagtgggaggtggaaacagaggaagaggagcaagggaaaggaaaggatggtgccacccagaggtgttcttcaggcagggagcggcggccagtgtaaccggggattcagtgcatgctgtttcccccgcgtttaatgttcagcccagtcctaaggtgttgggaagctggcctctccacctcgcccttgaaagtgtggatcaagattaggctgccagttcctcgttcagcggaagtagcacagaatcccaggtctcatggtatccaacacgaatctgacttgctggtagaccttgaggttgtttaagcatcttaaacttccgaaacaactgtcgctatgcagtgcctctctccccatagctgctgtcatgctttacctacaagaaaccaaaagtcttactaaaataaaagaagtttttgagagctaactcatgtgccctacaatttatccatctaaagtatatgagaatgctcacagggttgtgcagccacaccacaagtgaactactcatccctgctgtggcgtggatgatcctttaaaatgtaatgccaagtgaaggaagccaggctctgaattccacacacatgttttatgatctcaattatttgaaatgaccaaaatagactatagggacagaatggattagtctttcttaggactgggggaatgggggactttgtgggggcgatggctaaagggtatggggttgaggcggtgaaggtattccaatagtacattgtggtggttgttgcacaactgtgtgatatcctcaaaaccattgaattgcaccttttaatgggccaactgctatgtgaattatatctcaacaaagctgttacaaaagtttttaagagtctctagcagacctctctgtctcattggctagaaccagatcatgtggtcatgccagcccactgtaagcgtgatgggaagcacagtcatccctgagtattggcagggggcattggctccaggctctctcttggataccaaaacctagggatactcaagtccctgatataaaatggcatagtatttgcatataacttatacacatcctcccatatagtttgtttatttatttatttttatttttagcagagatgaggtctcgccttgttgctcaggctggtcttgtcctcttgggctgaagcagtcctcctgcctcagcctcccgaagtgttggaattacaggcatgagccaccacacccagcctcctatatggtttaagccatctctagattacttgtaacacttcatacaatgtaaatgctacctacataagccattattctactgcattgtttagggaaggaaaaaaaaaaactacacacgttcagcacagatgcaattttttcccccaaatattttcaatcctcggttggttgaatccatgggctcagtgctacagctaggaagggctgaatggatttggccgtctttgtctctaggggcaggcagcgtggggggctggaggggtgcggggagaatggcagcacagtcagcgactagcgtgggcctgtgtctctcatccgttgtcgcttctccttcctcatcctttacctgactacccacgcggttgttccggcccagccctggaatcaccttttctgccatcctctcccctctgcaccttggattcgttgagaggcccagccagcctgcttctgctttctcgccctgactgccttcgttctgtttaatttgccgtcatctcctctggagcctcctgcccctctcccttgctccactccagcctcccattgcttcattctccggacacccctcacagttactgtttaaattgcaaatcagatcctgttttgttgctcctgtaataaaacccaggactcagtgtggcctgcaggttctgcccccggccctgccctctctcccaccttgtcccttactttctcgtctgctcccggttccagttcctttggcttccttaattaatgcttacgtgccaagacttttccaccccagagccccacatgcctgttcctgggcgatcttgaacggtgcgcttctgcatgagggctcacctccagtgccgtcttctccaggagaccaccgtgacccccggctcttctgcatcatacccgccgctttgcgtttcccagtcttaacgtgagaggctagcagaccccatctgccttgtcctgggacggcctggaacacagtaggtgtgaagaaatactgttaaatggatggacagcctccctttgatatttacctgcacaccgctttgccactgtccctgtcacattgcgatggctgtttaggagaagtctaaatgtcacttccccatctggtttgctaatgggacttgcctggggtggccactggtgattgcaccttgcaggtcactcatcttgtcatgggctgcttgtctctatcaaagtcaccttgatggagggtggaagtggcagcagacgtcgctgaatacaggagaccaaaaataatcactgcaattattttgaaagaaagcaaagtttgttgcttcagaaaatgttattttcagagcagaattcagcatctctgcttctaaaccttagtgggcatgtttgctggaaaggcgcgtcttcctaaccaaggctgccgcagatcccactgttccctcaaaaggtgcttcttgactttgtggcagagggaaccagttatgttagatgattgtgaagacgtttttagaaaagggagttaagggaaggattacttaatcagagcaaggcttggttactcacttagaggatgtaaatcatctgctgaccgtgtagctgagtgagagaggcattgctgggcagaggtggcttctgcagcctgacaccctgtgctaccgttgccgggctacctggacgtggtggcagcccgttaccctcatcaggtcttcttcaccttccccaattcccgcccctattcttggtgcagtgccatgctttaaggggcactgctggaagggggcggatgttgacttcgccaggcctggtgtctcattggaatgttgcggaagggccgcaaagcccatggcacaagcgctcatgccctcctgcccactccgtgttccccgctccctcctgccgcctccctctctcccaccccactggcttccctgtgtgcagacrtgccgtagttaccacgatgtgcagctcagctcagcccagccaagccaagcaaccttccgctctgaagcggaacctctgccagggtcgtctgccttccctcgcgcgcccccttcggcccccctgtgtgcccttccctcgcgcgcccccatcggccccgctgtgtgcccttcyctcgcgcgcccccatcggccccgctgtgtgcccttccctcgcgcgcccttccctcgcgcgcccccttcggcccccttgtgtgccctctccttgcgtgcctccttcagccccctggtgtgcccttccttcgtgcgcccccatcggcccccctctgtgcccttccgtcgtgtgcccccttcggcccccttctgtgcccttccctcgcccgcctccttcggccccctggtgtgtccttccttcgtgcgcccccatcggcccccgctgtgtgcccttcccttccctcgtgcgccgtcttcagcccccccgcttgcccttccctcgcacgccccccttcagccccctctgccggacgtccctctcctctcccttgccaaggtcaccagtttccaaagcaggagtcatttcctgtcctctttttctgtctgtcaacagtgttctctcagtccagtgcttcctctacacggtgctttcttccttttcccagctcatcctggaacttccccacttctgattcccgtgtgctgggcgcttgcgtcagggcttggttctgcctccgcttgtctctttgctcccagtgtctggtgattcccctcggcctcatgcctttagatgccatttaaaatgtacacttcagctttttggcatgttcacagatatgtgcacctatcaccacagtcagttttagaacatttttatcacctccaaaggaagccccacaccctacagctagctagaggcacatgttggcagtcacctatagttgaatgcattaataatacatgcttttttttgttccctttcttgcttgcttttcaggttgtttttgrtactgttgataacactgtggtgaacatctttaggtctttggctttttttttagcaggagagagttttcatcaggagggggcttcctgggtcagcctttttgagcgttgtgattgctgttgagacactgctggatgcagccagcagcagggctgctaattgagtgtgtgcagaacgctgccttactcttctaatttgcgttttcttggtgacttgcaaggttggattttttctgcaggtttgtttgttgtatctcttttatgtgaagttcttttccagtcttctgattgcttcctccctcctgctcatttgactatcactgaaacttagttgggatttgatggggcagatggtgtcctgccatcgtgctttgtgatgtgaatgaagtggtctgcccacagtcacccagttatccagtcagctgtgagtggcagaacagcaggacccctggcgtcccagcgcctcggaaagggggaaacacttgccatggcacctttgactgacatttttgttcagttgtcatctgagtgaatgcccttcttagagctgctggagttgccgatggcaaattcttctcagcccagtgctcctggtccctggtggtggggtgatgatatatgtttatgtttctttgaaggaaaagacacccattgaacattgaacctggaacaatttcaaaacagcctttgaccagaggacttatggaaaaggaagaagtaccacctggaaaattatgagacagctataaaaatcactgtattcataacagttctagagacatacatgtacaccatcaaagagaaattattccgacacttgttaaaatggtaaggagaattttatttaagactactacagtaggagtcaactctattgcaacagaggagagattgaactcagctctgaatacaacaaggccaagtggggctttatagccaatgagcagagtgagggggtcagtggatggaaaattactaagaggagagacattaagtgtaggggattcttgctaaacttgcctaacagggaggcccaggatgacttcccgggattcttgttgaaactgggctaggcaggctgaggacagggctgaaggatgaggcctcgttggaaagaggactcacaggagcttgtctgaagtttggtcaaggagagtctttgtcagtgcacatgtccatacatatgcacacatagataggatttcttataggggattgggctacgtgctgtgggagctggctacccaggcctgtgaagcatcgtttcggtgtctgctgctggatccagaaggcctgaggcaggcaggtggctgggaagggaaggcggatgtgaagggagggaagcaaggacaagctaggaactgtggggctgagctggaccccatggggatggcctggagcccatgtcagcttctcaccacctcccagcctcccgctctaatggtgggggctcctggaggagaggctggtgccctttgcggccgtgctaaacatgcgtgcctggcccagagctggaggagcagaggagctatgggtgggatgctgcccagtccaccagtgtgggtgtgtgtcctgccctgggccccggaaccgatgctaccccgtgcctctgcctcagacatcactccatgtgctgactcagcttcacagcgaggggctgggaagtgtcattccaactcagccgagtggacacagtggtgacgattttaatttctggtgtgaatctcaagtccacttttaggaagcaggagataaatccccatcaagaaaaatcattcattttctttgcatctctctctagcatatttgatatttgattgaaattttaacacctgaaacaactttttgttttgttttctctttggcaagtccatccttacaggtgtagttagatgggttagacagggatactaataattctcctcctccctcttcccatcttggatagaaaaatattgatctgatattatgtgaggctttctgaatgagagtgaattggacagtgaaaagcataagaaaaaataaagtaactaactcctttaaaaatcttggtttttgcatgtaaaattgtggtgtttgagctgagcatttaattttagtagaccctcaggactccaaaggatgtgtttgacgggttctaggagtactgttcggataataagggacaaggaggagctggaaaatctgcacaggagcagccgctccctttacatcctttctgcaggtatttgtggatcatctcgcgtaagttgggtactgtgcgtaatcccagcagtgtgaggggcacgcagttcctttggggatgacctggagaaactggctggggagatggagcaactgggagaagccgaggttggctgctgcttcccacaccctcaccctccccagccgatgcactccaggcagtttcacgtgtttcagcttccttaggtcgaaggctcggtttctatttggtgccatcctaccttgcatgtctgagtatggatttggaggtggcagagctggctttgaacactaggatgtgtttgtttccttaactcttccagtcccgtaagcccctttgggttgtccccttgcatctgccccaaccccagggctgtgtccagccttccctgggtcttcagctgctgtctctcggtctccccggatgtccacggtggccacatctctgtgcctctccattctgtcagcggcccaggccccaggtggtccatctccaggagtctccaccccagccccgtttcccatcccttcctgctcccgtgaccccttccgtggtgactgcaggaacctgaggtcttttggtagctgactcctgcatttcctcatcctcttcctccccgagtgttcccttaaccttctcatatggagtgagtggctcttcagcagggaagtttggaaatgtgtgggagtgtttctggcataactgtgactggggcctgtcgccagcatttagtcggaagggacagggaagtgaaatgcaagtatagcccagtgccggccaatacatatctgtcccactcacaatgccatcctagcaatccgaggagatgagaaccagccctttttttggcctgcctgccctgctgttctctcaaatgcatgctggtttttctcctctgcccccaggacctcagggcccagagatgggacgggcatcattttccgttgctacttccaagcagtcctcctcagaacactccagctctttgggagggtgtaccattaggattgatggctcctgcctttccttgtgttgtggtcattgccaggtgcactggctacttctcctcactcagtacctggcctgctctgtcctcagcacctccaccccatctctgttcctggtggcttcaccacccacacagaggacctcctcaaccctgcctgctctcccacttctgcatgttctgctgggggatctcacctggccctggggcttcaggaatggtctttgcattcatggtgcctgtacttcttccttctgsggtgctgcaggcctgactgtcgaccygcccaccctgccttcgcttccctctcagcacagggcgcagggtgcccctgcccgccccactgcttgggcagaaaccttgacgctgtcgtggcttccccgccgtcaggccccacgtctagtacatcaggaagtcctggaggcttcactgcctcagcacatcccagatatgaccacggcttcacgccatagcacctttctgcttcaacctccctggtggctcccaggacacgtatcaggaagtggagggaaagccgggttatttttggaggcctcccaggtccacctgatgtttctcctcagttctccttgctcacctctctccagtcttctgcacattcactcagcaccagccaggtttgtcttgtttctgtgtctctgagaaaacaaacttgatttctggctcttgtccgggaccttgcacttgtttttttctgcgtgaacagcttccccctgggtcttggcatggctgccatttctgtgcacctcagttctgagccaaacgcccacccttctctgcytggcgctaccatcagtctccctccttgctagatggaggctccttgagggcaggcgtgccaccgtcctgcgcagtctctgtggcttggagcactgtgtgacaggggctcagcaaatgtctgttgactccccgtgcagcaggggaaagtcatgtaacttctccccacctcattttccccatttggaaaaggggcacaagaaggacccacctcctggggtgcatctttactggttgctttaacaaaatactgcagactaggtggcttataaataagggacatttacctctcacagctcggggggctggaagttcaagaccagsgtgccagcagatttgtgtcctgtgagggccacttcctggctcagagacatgctggaaggggcgagggagctctctgggrtctcctttacaagggaactcctcctatcatgagaactctactcacatgccctgatcgcccccacaaaggccctgtctcttaatcccatcaccttgggagttagggtataacgtgaatttggggggacacagacgttcagaccataacagggtgtgtgtgaggattaaagctggttccatttccaccgttccctccactctgtctcggcttgggaagctcagacagctgttagtkcctctytccctctgccctccacactcagctgggtgtggatttggttattttgtgcaagtaagacttagttctcagggacaatgcttttatttttaaagaaaatcttcagaatttacaatgccagttccagggccccattcctatcaagtcagaatccctggtccaggacccaggaatctgtgctttgcagggaccccggggaggccaggacaggaggtgtgtgccaggtctgagacacaggctttgacaagtggaaattactagtggggtatttttaactaagggcttctgtgggtctttgtctgtttctgaaaaccagcctcccttctttcccctcctcacttatcgtttgactggttaggaagtgaaatgtgcagagtcacctttgctgccttgtcacccctagaggaattctgcgtcctttcgcggccctgcctctgtgggtggcagtatttcccaagtcagattcacgacgtggcccagtgagatttctcatggcttgtaaacttatatgtttgaaaagtaatgcaaaacactgtatcacctttggttaaagatttagtgaaacacttttaatgaaaagaaaaatgccgaggctgatatgcatgccatgggcttcagcccagcagtcatccttggagagtgagggttgagsccgcagcccagcactgctgggctcaggaccacacagggccagagccacccctccatttcctaccccatgctggcttttcacttatgaggagttttcaattgtgatgtgcttttctggtcatcttttatcatcttggatattttaatatatgtcctttatattttttgaatttcagtaaattctaaaatagtattaaaacaataatgtgttatttttgctggattttggaattttgctagaatttggccatagtgatcgcaagcttcccattgtatagattaacagactaaaatatacggggttcgggttgaaagccctacgtgtcgtatgttgatgtcctatattgtattttgttcccattgtgaagtatgcagacttcacatttgagtttttgtcccttagcttcatatagcagagcataaagagctaaaatacgaactctggccaaaaatgaatgacatgattttttgtattgccaaggatatatgtatatatatttcctatttttcattcctgacatgcgtttttcccccttgcatttttttctccagatggcttatgtggtttctttggaccttcgatttgctatatttcatttttcactgggctggggagaaggtatgcatctgcattgctgtgttacaaggaatcccagtgggagtttgtcagtaaaggggtataatttgtttccattgcaatttatgcaatcccttttgtttgttcagaactagagagaagggattgaataaaaccccagcagaaatgaagggaagcttttgatgtacttttagttgtatgttgaagagataaatatcatgtagtacaacataataagtacctgctaataaaatgcctgcttggtagagaaaccacacatgtaaaatagtgaggtgaagaaaaactatcagtacttcaaaatcccaaatatattagtggatatactagttataggaaaatactaatttgccaggttttaggtgaaccaaaatagaacatcccagggtggtatcgaaagggaccttctgcaatgtcacgaaggatcttgtctctgtgggacaacgtggctccaggtggtgtcctctccccagcagtgcagtgcagtcctgctttccgtttgcccgcccaccatctgctgcacagagtgccaagacaccattactcagcctggactctgccacttctggtccggaatatggcaactcatcctgagggacctcctgccttccagatccgccctttctttcctgtcctccacccctatgataaagtgatctttctttctaaagcaggtgtttatctgcagcaatcttctgctgaaatagtgtcagaggccaaaggccccacacattgtgcactgctctttcagtctggcccaggccgcctccttagcttgggagagagacttagctgctgtgcccagagcagaggctctacacacacgtactgtgagtttcttctggcttttcactacccagaatggagcactagccccccttcccgtgctccgtgcttccctccagcccctttccttgacaccttttggtagaagaaaatttttttcttcccaaagtttttttttttttttcccatgcgtatataacaatgcttatcacatttgtgaacatgagttctctgaaaaggactttagaggggagactttattctggggaatagtttacaaactgaggagaacagcctttgatgcaaactgaagctatccattccagagaacaaaagaaaggtttgtcttttacagagaaagttcccgcccaggttcccactcaggttcacttatgtacttgaaggtttcagacttgctgagttctgattggttgttgcaggtcacagtctattgatggcatgaatgggaacaggcagctatgtaggcccctaagttaagcagacacgtgggttttccaggaactcaaggtctgtgtgtgacctctagtcaacagatggctgcttgagtctaacttgaatgtaggtcccgttagccactcaggatggattcatcctgtggagctggctttttcagggcctacacattaatttttatatttcatatgtattaatttttagttttcatgtctgtggactgaggtgtgaggtgggacagctggaatgtagtctttttgtgtttttaatcccagcctaatcatagaggctcaataaatgcttaataagcccagttgcctttttttcctctgctgttgtttcctcctcagtaacatgaggatgaatacctatcttcctgtgctgtcataaggattagaaacagtgtatataaagaacctgttctcaacctgttctcaattgagaacctgtgctcaatatatagtaattgttgttggttacgtggatttgttcgtgacttccaaagagtgtttcagcatatgctgctcttaaagagtctcacagttttctattttgatgaggtatgcatatcattcatgggtatttgagtggccttggggaagatgctgactgcccctgggcctgggctactgcatgtgtaggaaggggacgatgatgctttaattcagcagaggacagtaggggctgtgatctttaaagtcaggcagagctgggtttgtatcctggctcatgtactttatcaaatgtgacctttgacaatttactgactttaccaagcctgtttttcaactgcaaaaataagaagattgtgcctagttaggtggaggatttatcagaaagaatgtgtcagctgcctggcattgtgcctgccacagtgggatttcaacagtgctggtgtgtttgcttacttcacccactaggcaggtgggcagtttcccgggtgaggctgtacagttctttctaacttaagagacctacatatttttacttaggtctctaagttagaaagaaaagtttctatctctctggtgaaatgttaggctttcagtgggtattattgaaagttttagcaacagagtaacgagctaaagttaccaaaagattgtttctctgcaggtgattgttacccaaagattgtttctcagccaggtgggaacagatgggggagcctttatttttgactgtgtctgactctgactctaatctttaactgaccaatttagtttaaaaaatgtttatcttggctgggtgcagtggctcacgcctgtaaatcccagtactttgggaggctgaggtgggtggatcacctgaggtcaggagttcgagaccagcgtggccaacatggtgaaactccctatctctatgaaatacaaaaaattagctgcgtgtggtggtgcacgcctgtaattccagctacttgggaggctgagacaggagaatcacttgaacctgggaggtggaggttgtagtgagctgagattgcaccactgcactctagccttggcaacaagagcaaaactcagtctcaaaaaaaaaagtttatctcagtggtatgttgcaggtacttaatgctaagtgtgacttcagtgatgaaaatgtaggcatctctgtatcaggaccatgtgagaataagataagcagaatttctgatgattgaattgaagccatagtgaagtggtagggtttcatacgcagtattggatctggaaactggaacgaactggaaaagggcatgcaggctggatgcacaaggactatgggtcttcctcagggttcggcctcgtttgtttgtttggacaaaggaccagatgaggagttgggaggtgagactttatccttagcctttccacgtgtgaacttctcttctccctggccctcagttttctcctttataaaaagtgtaggaattggattaaataagcactcatatatgttcattcacttgtcaaagatctctgtattagatactgaatctcagatttgattgataatttcaagccgattagtattttctgtcacttcaatgtgaagtgacagagaataattattagatactgtaaaaattaatcttgccatatgtttcacatactgcaaatttgttattctggccccaaaggccagagatctgaaatgcagatgttggcggtgctggtttgaagcctttctctttggcctgtaggtggctgtaaggccagagatctgaaatgcaggtgttggtggtgctggcttgttttgaggccttttctctggcctgtaggtggccgtctggtggygttggttttctctgagccgtttcccgtcggcctgtaggtggccgtctggtggcggtggttttctctgagccgtttcccgtcggcctgtaggtggccgtctggtggcgttggttttctctgagccgtttcccgtcggcctgtaggtggccgtctggtggcggtggttttctctgagccgtttcccgtcggcctgtaggtggccgtctggtggcggtggttttctctgagccgtttcccgtcggcctgtaggtggctgtctggtggcggtggttttctctgagccgtttcccgtcggcctgtaggtggccgtctggtggcgttggttttctctgagccgtttcctgtcggcctgtaggtggccgtctggtggcggtggttttctctgagccgtttcccgtcggcctgtaggtggccgtcttcttgacargtctccacatggtctttcctctgtgcctgtgtcctaatcccctctcgttataaggacgccagtcatattagcttagggttcaccccagcaaaactcattttacctccattatctctttgaagaacctgtctccacacacggtcacattctgaggtgctgggggttaggacttcaatatacgaattttgcggggaggggacacgattcaacctgtaccatgcaccatggtctcgtctgtcctgtcccatcctaagggacgctggtcgctatccactcaattaatttttatgacctgcaaaggaggccacagtgactgacagtacattatatgcttgtgttgctcttttggaagtggtaatggagcggacacatatgaaatgtcagctgaagacctcccctgtgcctcctttgcccactggtccatatttgtgggctttgcttatacgtatggcgyggggacagaatacagttatttggcccatgcagccacccagtcttgctggtgtccacttcggtgatctgagagagaaaaataagacttttctggctgtcatttaaaaaaagacattgagtttaattcaaattaataattttttttagcaacttctaagtggcagggatctgttttaggggaagaaatggcatattccttggtataaaataaaatacggaggccctctttagaacgttcaggatttatctcctcctggactgactgtcagacaaccccgttttgcaggggagaagactctctgctcagtccactggggtccagcctgttctggaaggcccctccagaacacctgcaccaggcaacagggtgcccggcccgtggtgcttgcttggctgtttgtgcacagccctgagggcctgagggttcatctcgcagccctctcagttattattaactgccctcctaagccttggctccacctccctctgttcccacagccactctcacagcaccgctgatcacgtgcccatctgacacctaggcagcccattttggtgggggaggcagcaggttcagggcaggtggatccggtacccgcacccacgtgctgcatggcagagccggagggaggcgcatctggatgagtcgcagtccgtttgttctctctcttgcyggtgaccttgttctctatctctgctttctggattgacaagtcctgatcctctctgtctgtggctcatatgtcacagtcctggcctgctcaagcttgattaattaattttctcactcacccagccagtatttatcttcttagaatgttcttcctgttttatctttcctcaaatgcagcaccttctggatgtagaggaacagtgaccagcctttgcctgcagtctgtttctgggtcctgtgagagtgtgtgacaggagttgtcacacacctcttgtgtgctgggcctggtgtaacatgtgccttcatgtgtgtgaactcctctgatcatcatggttagagggatcattgcaggctgagattacgaggaggaggcagtaaggcatggtgggcttccgcrgctgcgtgtgcgagctgggattacagttccgggcgcctggctctggagcacatgcctgaccccacatcctgggtcacctgcagccagctaaggacacttactcagtggttgttggatctcagtgtccgacactgacaaggggctgcacccactaaagactgtaccagccagcatcagacaccagtcaagggtgttgctgttttctaagttttggaagcttacagcttttggagtcatccttaaattgtcttacttaccccatatcctgttaatcgcctggaagactcattctaatgcttgagtttatcacatgtggaattcgtcttcttccttccatcgtcacggccctggttagactttcaacactgatgacttccattagtttgtttctgtaccaaggaggttatctatcaacttagatacagttgtcatttgtttgaaagacaaggattggatgagatagaaaatgtcagaatgtaatttattcagctaccccttcattttgttgcttgctcattattttgctactcagcccaaagaaaatgtgttaaaagtttgccatccatcagtgtcagagtagacagggacttggtttggatgagggtgtgcgttactggggccttgatcttagtgagatggacctcgcctcattttactgtgtttcttggggctggggaagggcaggaaatgaaagaagtggtgcattttctacatatttccagtggccctcagttttggtgttgcctttctttgcctccctgttcacatcagctgtctctcatttgccgcagagcagagcgtggtgcagacagaggcaagccagggttgggaatctcggctggcttgcagccacagactatacacagtaggaatatctgttgaacaaaatcttttgttgttgtaactgtgatcattatgtcataaataaacaaggggcttttactgtaattgttaagtcccgtgacctcagggacgtgacacacaagtatgcttcatcatgggggagaaaactgagcagatggaaaagaaattttggtttcaaaaattatgaagttagttatacatcaaaagtaataatttgagttgtgaaaaaaaaaggttcttaaaaataaggaattacacagtgagtcattgagattataaagttaaaaaatattgttggccaggtgcggtggcttgcacctgtaatcccagcactttgtggggccaaggcgggcctaccacttgaggtcaggagtttgagaccagcctggtcaacatggcgaaatccctggatctactgaaaatacaaaaactggccagacatggtggcgggagcctgtaatcccagctactcgggaggctaaagcgggagaatcgcttgaacccaggaggtggaggttttggtgagctgggatcacgccactgcactccagcctgggtgacaaagcgagaccctgtctcaaaaaaaaaaaaaaaaaaaaaattgtgaagacttatgatgggacttaagagtgaagctcttgatatattcaaaatataacaaaaatttgctcatgatttcacatggttatatttccactcctgacctctgaacttcagtttcccaatgaaggctggatttgtctcctgaatgtctcataggatcctgcagttaccatatcctcagctgaattcattctcttttccttctatgtttcccgtttgagttaagggtgttggcattttcttagtgtgggaagcttaaaacttcgtcagtcatccccaagttgtcatacttatcctgtatcctattaattgcctggaatgcccattctaatgcctgagtttctctcatgtggggatttcccctcttcccatcgtggtcatgactgtggttcagactctcaacacctatacttggaatagtgcagtagactcttgacatcatggtcctgttccctggctttgctccttccagcctgtgcgtcacattgcggccggagttacctccttagaatgcaagctaaatcacattctcttccttaagaatctgcagtgtctaccctttgtctatctagtaaagtctcaactctttctcaaggacattcacgatttgattcaaaccatctttctcaaggacattcacgatttgagtcaaaccatctttctaggctcattgcatactttttctatccatgtaacctatacttcagatacactgaacattttttgctttttaagtgtatcacatggtttttcatgctgcttctattgtagcatgctctgttcttgtactttccctgtttcctgttattaagaaattaatttattcctctgcacctccttattatcttgcttagttctcaattcagcatcattttattataccttcagaataatttacctatccgattccctcactagattacagactccttggggacagggatcatgtctgttcaccttttatcttttatcattttgggcaatgctactagaaagtagtcaatacatgtggaacttatttatttatttatttatttatttatttatttatttagtgacagagtctcgctctgtcgcccaagctgtggtacaatggcacgatctcggctcactgcaacctccacctcccgggttcaagcgattctcctgcctcagcctcccgagtagctgggattacaggcatgtgccaccacgcctggctaatttttgtatttttagtagagatggggtttcaccacgttggctaggctagtgtcgaactcctgacctcaagtgatcctcctgccttggcctcccaaagtgctgggattataggcgtgagccaccttgccgagccatggaactgatttaatttcacattgcctttctcaaattatttcctaaaatgtatcaattgagactccaccaggcagacaaaggaattacgagattttgctgttgtgcttgaagatgtgggactccagttgagcgatttaagataggcttcttccttatagagggtggatattcaagatttgtttgtcaaatgaatatgaagtgaaatatgaaatagttttagaataaagggagatggctgagcatattacacatgagagattgtggtggagaagtagaaggcacactgaactgaatgggggtgagttctttctaagcttcaatttctctcatctgtaaacaatggcacttttttggtarggttttgggaatcatttagtaaggcatatgtaaagtgcttggactagtgcttggcatgtagtaagacctcattaaatgtcagttatcaatgcagctgttgtttgtaaaacatctgtgttacactgggaagggctataaattcccttactttaaacttccacctttgtggaaatgaaggaagttcaaagttttcttatgccattgacattttatgatactatgttcttcactcatggggcatttataaacaaaccctgatttttcgttgtaaaacctttttgaaaattcaattttgagcatttaaaatatagtttttatggccaggcgcggtggcttacgcctgtaatcccagcactttgggaagctgaggcgggtggatcacctgaggtcaggagtttgagaccagcctggccaacattgcaaaatcccgtctttactaaaagtataaaaattagctgggcatggtggtgggtgcctgtaatcccagctactgaggaggctgaggcaggagaagcttgaatctgggaggcrgaggttgcaacgagctgagatcgcaccattgcactccagcctgggcgacaagagtgagactccgtctcaacaacaacaacaaacaaaacaaaaacctatgtatctatatctatatctacatctatatctatatctagctatctacatatatatagtttttattatacaagtaatatatgcttcctttagaaatcttggaaaacataaacaggaaaaaattatgcataatcctatataggcaagccctgttaacattttagtgtatttcttttgtattgttttctgttattttaaaaattgggttaattgctttctttcttttcattcttttctttttctcttttttttttttgagacaaagtctcgctttttagsccaggcttgggtgaagtggtatgatctcggctcactgcaacctctgcctcccgggttcaagtgattctcttgcctcagtctctggagtagctgggactactggcatgtgccactgtgtccggctaattttcgtatttttagtagagttgggggtttcacgatgttgaccaggctggtcttgaactcgtgatcctcccacctggcctcccaaagttctgggattacaggtttgagccactgtgcccaggcgggttaattccttacatcgaatttattttgtaaatataattctgtatcctgattttccatgtgacataacattttccatattgttgcagtctttataaatgtcatttttaatgtttgcataaatttgcattatgctgctgtaccatagtttatctaaccattgcttcatagttagatgtgcagattctaataatttattatctttatttttttaaaactttaaaattttttattttagtatttttaattgatacagtaattgtatatgtttatgtggtactgtgtaatgttttgatacacgtatatcatgtgtaatgatcaattcagggtactttgcaaatccatcttcaaacatttatcatttctttgtgttgggaacatttagaatcctctcttctagccaactgaaaatacacaaaaaattgttgttacttttagtcaccctacagtgctataggacacttgaatttattctttctgtctagctgtaattttgtctctgttgaccaacctctccctatccttccttcccccaacccttcccagcctctactctctccttatgagatcaacttgtttagcttccacatatgagagagaacatgtggtatttgcctttctgtgcctggcttattttacttaacataatgccctttaggacattaggttcaaccatgtcatagtgaatcacagaatttcattctttttttatggctgaatcacattccacggtgtatatatagcacattttccttatctagtcctctattgatggtcacttgggttgattccatatcttggctactgtgacttagtgctgcggtagacatgggagtgcaggtatctctttgacatcctgatttcttttcctttggaaatcccagcagtgggattgctggatcatgtgatagttctatttttagttctttgaggaaccttcaaactgttttccatcataacagtactaatttacattcctatcaacagcacctaagagttcccctttctctgcaccctcctgtatttgttatcctttgtctttttgatcacagccattcttgctggggtgagatgatctctcactgtggttttgatttgcatttccctgatgattagtgatgagcattgtttcatatacctgttagccattttgtatgtcttctttcgagaaatgtctattcacgtcttttgcctactttttcatggggtggtgatgatgatgatgatgatgatgatgattttttgctgttgagttcctttatattctggacattggtcccttgttggatgaatagtttgcaaatattttctctcattctgcagattgttgttcactgtgatgtttcctttgctgtgcagaggttttttagtttgatataatctcatttatctatttctgtttttattggcctgtgcttttgagtccttatccataaaatctttgcttagaccaatgacctgaagtgttttccctatgtttttcttctattagatttgtagttttggtttttacatttaagtcttcaatcccttttgagtcaatttttgtatatagtggcacatagaggtctagtttcattcttctgcatacttatatccagttttcccaacaccatttattgaagagattgtctttttcccagtggatgctcttgacaactttgatgaaaattatttgactgtgaaaacatgggtttatatctgggttctttttttttttttaattggtctacaagtctgtttttatgccagtaccatgatgttttgcttactatagctttgtagtatattttgaagtcaggtaatgtgatgcctcctgctttgttattttttgctcaggattgccttagctatttgaggatttttaaggttccatatgaattttaggattygtttttctatttctgtcaaaaacatcactggtattttgatagggattagttctaggatatctgtgttttctttgcattttttcattttggggcagtctgggtgggcagcgtgacaaaatgaaaaaagcagaaagtttgaacttaaagctttgagtttgaatgtaatctagcaatttattacatgaatagccccaagaaagtaatttgaatttgtagattgctctgggtagtacaggtctttcttcttaatataatttcttcttctgggcattatgttaagatctctagagatgttaaaaatttttctaggcagtgcttgaaatagatgtttttatagtgacctgatggtttaacacaattacctttcattttggtagaacatgtttataaacctgaaaggaacaaggaaaaatattcagtcttttggtgcacttgaatgattgttcatcagggcctccaactggtcactctgaaaattaagtgactagcaaatatgaaaaattattgacaggaggcagttaatgtggctcactgcaaatttatctaagttaatccacactctgttaaggaaatgccttgttttcttgttacatgacagatcttcttccatatctcctggtttgtcatatcattaatatttatagtggtggcatgtgactttttcagcctttctaggtagaccattatgctacctggatgtatatgcagaatgaagaaaagctgagttgatttctcttgctctgtaagatgcttaacttgctggacatgttggagtggcagtttcaggatatcagtcacattttggggcaatctcggtggcaaagtgacaaactgaagaaagcaaaaagcgtgaacatatagcattgaggtgttttgttttgttttgagactgagtttcgctcttgttgcccaggctggagtgcaatggcgcaatctcggctccctgcaacttctgcctcccaggttcaagtgattctcctgcctcagcctcctgagttagctggaattacaggtgcccaccagcacctgggtaatttttgtatttttttagtagagacggggtttcaccacrttggccacgctggtctcaaactcctgacctcaggtgatctgcccgccttggcctcccaaagtatgattacaggtgtgagccaccatgcctggccggtattgagtttgaatataatttagcttcttattaccttaataaccccaggaaagtaacatgacctttccaagccttagattccsaaatgrgcacaaaaatgccgaggaggttgcttaatatggtagaaagagcaatagattcaagaagcctggggttaaaatctcagcctcacttactagcagtgtggcctttgaaaagatttataatatctctgattttcacttttctcttccctacagtggggctaatgataatatttgactcactggataaatgtaaatattaagtaaggcaatgcaggtgagcctctaatgcagcacttgacttccagaccgttgtcgtgtgtgcttgaaatgccatgtgctccctaggagacgagccatcgctttgtctgctcctgtcccatttttaatttgttgctgctgggttcctgcatggatgaaagtttttttgaaggtcacaaatgaccacttaactctcaygtatggtgatcccaacagatgtttctctcatatccacccccatttcttttctttccagaagatctcaccttttggcctcttgagtctcatctcgaacctctagcattctttccagatgtgtttctcactgcccctyacctctgtgttccccaggatgtcatccttgggccctctgtttttctttgtcaccttcacattctacctgggagtgttacctctgctgatgttcatggtgctcaggggtccgcttgtgcccggtatactttcctagttaccctagtctgggtctctccaccctccggtgctttagactcaacctgctggagctgctgtcttccgacgagcttgccctgcccttcctctgaccttgggcttctgtctcggccagtggctctcctccacccggtccccaaagccgtcaccctcagtgccagtcttgtctctacctccttcagtttctgtgtccaatcgagcatcaaatcctttcaccctaattcgtaaattataactatgctaattagactgtggcctccttggtcatagctaagcatctctaaagctccaggacctttttttaaaattaaaaaaaaaattatttccataggttgttggggaacaggtggtatttggttacctgagtaagttctttagtggtgatttctgagacctgagcagtatacactgaacccagtttgtagccttttatccttcacctgctcccaccctttccccctgagtccccaaagtcyattgtatcattcttgtgcctttgcatcctcatagcttagctcccacttaggagtgagaacatatgatgtttgattttacattcttgagttactcacttggaatgatagtttccagtctcatccaggttgctttttatgtaaagctccaggaccttacaccacatctgacacataaccatgcctcaacgattgatcatgtacgtattttgttagatttctacctaagtattttcctttttttgagcttgtaagtgatactgttttattttaaattattgttattaattaattaattaattaattttgtttttgagacggactttcgctctttcgcccaggctggagtgaagtggcatgatctcggcttactgcaacctccgctccctggcttcaagcgattcttctgtctgagcctcttgagtagttgggattataggcacccaccacaatgcccagctaatttttgtatttttagtagagatggggtttcaccatgttggccaggctggtctcaaactcttgacctcaggtgatgcacctgccttagcctcccaaagtgctgggattacaggcgtgarccaccgcgcccggccaattttaaattatttttacattgattttgaaaactgtggtaagatatacacaacacaaaatgtacccttttaactgttttaagcgtaaaattcagtggtattgagtacatacattcacagtgtgatgcaaccatcaccgccctccatttctagaactttttcgtcactccaaacagaatctctgtacgcattacacaataattctcattctcactcctctgatcctcctggcaaccatcattctacttttcctcttgatgaatttgcctattttaggtacctcatataagtggagtcatacaatatttgttcttttgtgtctgtcttatttcaattagcatgttttaaggtttatctgtatgatagcatttatcaaaatttcattcctttttagggctgaacaatattccattgtagggatagactacattttgtttatctgttcatcagtcaatggacatttggcttgtttctaccttttggccattgtgaatgctgctgctatgcacattggtctgcaagtatctgtttaagtatctattttcaatggtttttggtatatatgtagtgggagtggaattgctggatcatatggtaattctgtgcttaactttttgaggaactgccaaactgtttggcacagcagatgtactattttacattccttccagcagtgcatgagggtcagatgattcttgtcttgtcgtgtcttgtcttgtctttttttttagatgtcctgtcgcccaggctggagtgcagtggcgtgatctcagctcactgcaacctccgcctcccaggttcaagcaattctcctgtctcagtctcccgagtagctgggacaacaggctcacaccaccatgccctgttaatttttgtatttttagtagagacggggtttcaccatattggtcaggctggtcttggaactcctgacctcaggtgatccgctcacctcagcctcccagagtgctgggattacaggcatgagccaccgcgcccggcctggatgattgttttttgcatcactatgtcatgtttcttttttgtgaccaaaagagaaaataagtaatatacattttattttatttttttgagacagggtctcgctctgtcaccaaggctggagttcagtggcacaatcaggactcactgcagccttgacctcctgggctcaagtgatcctcccacctcagccctcagagtagctaggactacaggcacatgccattacgcccagctaatttattttttttttgaattttattagagacaaagtctcgtgttgctcagactggttttgaactcctgagctcaagtgatccttctgccttggcttcccaaagtgcagggattacaggcgtgagccatcacacctggccataatgtacatcttaaagtcatcattgatgatgtttgtctgagtgaagggggaaaataagttgttgagacattagtatgtcaggaatcactggtcatggttgcagagcattgtaggtggtggcaggcaaagcgggtcctttgatcatggtggggggatgtaaagcatttctagatcactgctacttatgaggcacataggctacctgtgcactatgtggcctgcctctgcatcaccaaatccaaatatgacagagcggagcacaaggcagagtcaccagggaaggttccccaaaaagtaatgactgcacaggtctttaggtgccttccctgcagtaacccccaacttcttcttctttttttttttttttttagtagagacggggtttcactgtgttagccaggatggtctcgatctcctgatctcatgatccgcccgcctcggcctcccaaagtgctgggattacaggcatgagccactgcgcctggccagtaacccccgacttcttagaaactacccggatttccatttgtatatcagatttccatttgtatatttccatttgtgtatccatttgtatatcagcttctttaataaagatatacaaattgcagtttttaaaaggcttcggtgtactcttattgtatagtgctttgggggtgccagctgagaactcatggtgtttttgggggggtctctcttcctcagtggatcctgaatgctgctgtttatctctttagttctgtgagactgctgaagactccatgctacttttactgtctaagtttattcttttagttatttgtcaggttttggtgtcagggttgtgctggcttcataacacaagttgggaagtattcgctcctttgttttctgaaagagtttgtatgagattgatattatttcttctttaaatgtttgacagaacttacgagtgaagccatctgggatggaaatttttgtgggagtttgsattacagattcaacttctttaataaatacaggactattaagattgtcaattttttcttgtgtcattttacccccaaggagtttgtctatttcaccacatttgtcaaatgtataggcatatggttgtttatactgttcccttattatcctcttaatgagcgtaggatctgcctcctttttattcctgatatagatgatctgtgtttctcttctaggggtttatcatttgttttcaaagaaccattgactttgttgattttctttattgtttcctgtttcctatttcattagttattttctttcaactttatatttaattttatgtctttttctagcttctacagtgcagacttagatattggtttgggacctttgtttttttctaatatgaacatttaaggctataaatttccctctaagcactgcttcaggtacatctcacaaatattgacctgttgtgtttttattaccattcagctggaaatatttttaacatttcgcttttgtttttatttttgacgtgtgtatgcattgcttacttttcaggtatttgcagccgttgtggaaatggtattgttattgatttctgttttaatactgtaatggtcagaacatattctgtgtgatttcagtcttttaaaatgtattgagatgtgttttatggtgtggcatttggtctgtcttggtggattttccgtgagtacttgaaaggaacttatattctgcagttgaggggtatagtgttgtatgaatgtcagttgaagaagttatttaatagtttgtttaaatcttccttatcattgttgtctattcttttacttaaaaagtttttaaatttcacttatttatttttgagacagggtgtccctctgttgctcaggctggagtgcagtggcacgatcgtggcttactgcagtctctgcttcctgggctcaagtgattttccagcctcagcctcctgagtagttgggcccatgggcacgtactaccatgcccgcctaattttcttattttttgtagaaacagggctcaccatattgcccaggctggtctcgaacttctgggctcaagcaatcctcctgccttggcctcccaaagtgccgggattacagatgtgagccacgatgcttggcctcttttatttattttaacaaagggttgttaaagcctccaactttaaaaaaatcatgaatctttctgttcttatttctatcaggttttacttcatgtattgtaaagctctgttattaagtacatacaaatttagtattgtatctccttgatgaattgcctttttcattttgaaatgtgtccattcatccctttgcttacactgaaatcccctttgtctgatattaatgttgccacaccaggtttattatgcttattacttgtgttcgtgtggtatatcttttcccccccatccttttattttcagtctgtgtcttcatatttaaaggttgtttcctgaaaatcaaacatcgtatgttctcactcgtaagtgggatctaagctgtaaggatgcaaggcaaaagaatgatacaacggactttggggactccggggaaagggtgggagggggtgagggataaaatactacaaattgggtacagcgtgtatcgctagggtaatgggtgcaccaacatctcagaaattaccactaaagaactgatttatgtaaccaaacaccacctgttccccgaaaacctatgcaaataaaaaaaatatattttttaaaaaagtttgtttcctgagagtataaagtatatatagttggatcttgggttttttatcgagttttgtgtggatgggttcaagtctaccatcttgtatttgttttctgtttgtcatatctgtttttttcctcttcttttttctccttttatgcctttatttgggagaataaaatatattttgttctgtggaaaaacacactcaaagtgttttttctgttctctcaacatgacaaccaacacagaaaatttctgtgacctctggttgccaaaatgtgtwtaaggatttcttccccttaataaccagtcagtcagttttccaacagataccagctgggtgtcctctaatttacttctgataccgtctatctgaagatagtgttggatcccacagattgagagtccagttccatgagacggttccccgccaccctttcagatacccttagagggccccaggttatgacctctgtttctgattgactgtctgtgaatcagagattctaccgcctcctccttgggtttgagtaatttgctagagcaactctcaaaactgaaggaaacacttatgtttactggtttattgtaaaggatattacaaaggatacagatgaagagatgcccagggcgaggtgtgggagaacgggctcagagctgtcatgcctctccaggtgtaccaccctccaggagcccctagctgttatttgcaagctctccaaaccctgtctttctgggtttttatggaggcttcatgacatagccatgactcattagaccactggctgctgatcaactcgactttcagtctctctcccgtcccccgtggtggggctctaatcatgccttggtctttctggtgaccagccttatcctgaagttgcctggggactgccagcctttggtcaactcagtgcacaaacatacatcactttggagattctaagaatttaaggagttgtatgccaggcaaggtagtcaaaggccaagtagatattttacgatatcatgcttgtattctactttgtcttttctgttggcttttttgttttttgagacaggatctcactctgtttcccaggctggagtacagtggcccgtaatcatagctcactgcagccttgaactcctgggctcaagcaacccttccacctcagcctcctgcatagttgggaatacaggtgcacaccaccatgcctggttaatttttacatttttttttttttgtagagatgggggtcttgctacgttgcccaggttggccttgaactcctggcctgaagcaatcctcctgcctcagcctccagaagtgctgggaacacaggtgtgagccaccgcatccagcttctgttggctttttaagccatatctctatttaaaaagtgcttgctctggagattataatatgcatttttaacataacccccttcaaatattgtactacttcctcttttggacttgtattaaaaagcataaagtaaatatttaccctcctcaaaaggcttgccaccaggggggtggggcattgccaatctgatctgcagttgagctgggtgtagccttggtcctagctctccttggggtcatttcatctttagcttcaggtgtttggtcaggatttgaccttctgttggcttggggtctgggcacagaaaagactggagtttggtttgcagccagtcaccagctttccatctttgtgctttgagactggatgctggatttgtgkgtttgggggagttttctctgatctccagccctatctctggctttctgcattttgggrgctctctcttggtcctgcccccagccttccacagggtactgccttgcactcagtgaagggtcctgatgccttggaggggtttcttcaagctttgctgcttggccctaacctttggcagccatggtcttggaggaggaatctcggttgttctcttgtctaccaagctcagcaagcctctgctttgtgcttggagaaagcatagtgcccctcagggcatctgccagctctctgccctgcctggatttctgtggcagctgccaggcatctaggggaggtcctgagtgcctgggactgtcctcctagctgtcctgcctgccctcagcctcagtgtactgcacgttgccctctgcaaaagcctgcaggaggcgttggagaatggtagatttgcccatgggagtctactctgttgcacccacctacatgcaggcggtgaaagtgtcttccaagttcagcccttttctccttcccccgttctctgcccaattctcccttctcttgctcctctgccagggacaaagcagctgttgggccctgtctcctaggaagagcttgctgcttcctggaatttagctcatgcctgttcctttgcatcctcagctctctgatggatttttcaagaagccccttttacagcttatgcatctcattctcattgttagtgcgcaaaggccatctggtgccactttttagagttgaacagcaactctgcttttgaggcagtcttggatggacctggcagccttccgtcctgcggagctgaatgggaacaagcgagggggagctcatgctgagctccgggttcactgtcactactcctggctcctcctggcacctggctcctcagggtctgcctcacttggtggctccagccccagccatggctctcctagccccatgagactgcctggagcgctctgccggcttctctgccgcaggcagtggttctcccctgttgagaatctgcaccactcccggggtgaagtggtgccacaggcaactgtgctcctctcagcgagcttcccttctgtctggaatcttgcaagtcctccatgtcttggccactctccagtgccccctcctctttttgacactttatctggctctttaagttactgatgggagtgctgttctgctagaagctgctctagaagtggaagttgctacaggtgtactcgtaatgggcacttaatgggatagtaaccttttcatgacagtgggatgctattggatgtacaaggttagtgtagaaagatcgtgagatgtagggtttgtagagggcctgactttgagatccagcttcacagatgactggttttctgactttgggctaatcacttcctctccctaggcctcaagtatgccagtaataaaatggggataacaatgacaccgtatttgttaatggagaataatactcttcacaaaccctcaagcctcttttgtaagaagggagtttggctaggtaaatgtggagaggcagagtkacttatctgattgctgttggtcccgataaccgggtgctggatttgacttggctgggccctgcttggtcttgggagttcgttggtcacagagcctgagttcccgtctgcagctctgtgctggacgtttggcgtggcctcccctgagtggggctaggggtgaccagttcagtgcagcctgtgtctgggaaggaagctgtgtctgcccagttcttggtgttagtgaggaatttcagtttctaaaaaaccttaggtcatgtccttcaacatagcctgtgttggtacaaataaagatgcgtcagctccatcttttccttttgttttgttttccacttatgtagacaccaggggacaaagccctgcttagtggaagcctccaaagagacctcagcattgttatgttgaaagatcaatatcattattcctaagaaaaccattcaaatactaactgtggtattatttctataagtgaaagtaccagaatcgattgtgaaaatgtaacttcagatatttgatcaaatcacacctgtactttttcctccgtgttttctttttccttcttccttaggtttttcctcctggatttagaaaaaaaagatgtacttctttcccctctttctattctctacctgttcagagtaccataactgactgaatgcaagcctggttgtctccgattattacttagcagagacaagaataactgtgaaatcgtgatgcactggttttcaagccagtgtccatttaaatggccgtaaatcatttctgatccaaagttttggtgatcatattttctccttctgtaagaacaatatagttaagtaataactaggctttcattaaaaatgttctgtttgggccaggcgtagttgctcactcatgtaatcccagcactttgggaggccgaggtgggtggatcacttgagtcccagaattcaagaccagcctgagcaacatggcaaaaacccatctttacagaaaatatgaaaaattagctgggtgttgtggtgcacacctgtagtcccagctatccggtaggctgaggtgggaggatcgcttgagcctgggaggtggaggttgcagatcgcgccactgtactccagcctaggcgacagagcaagaccctgtctcaaaaaaaacaaaaagttgtccgggcacggtggctcaagcctgtaatcccagcactttgggaggctgaggtgggcggatcaggaggttaggagatcgagatcatcctggctaacacggtgaaaccccgtctctactaaaaatacaaaaaaaattagccaggcctggtggcgggtgcccgtagtcccagctactcrggaggctgaggcaggagaatggtgtgaacccgggaggcggagcttgcagtgagccgagatcgcgccactgcactccagcctgggcgacagagcaagactccatctcaaaaaaaaaaaaaaaaaaaaaagttcaaaataactttcaagggcattaggtgctctaatttgactaaaatcattgttggataatctgatcaaaaatggaagaagatggattgatttttagtgacataagttgaggaatcatcacctcccactaaccaaatcatatgctgtgaacatgtcaaatttttcacaagcttttctccagcttggcatgtggaacagacatcagcagccaccacggccttgtgtccttttattcctcttatggtaacactgggtatatgtggtcaggcttcatattttggaacaggaagactcggtcaactcttgatctgaatcctaactctgttcctctgtatgaccatgagaaaataatttcagttctccaagcccattaaactttattgctgtgtccatcaacagatgaatgcataaagaaaatgtggtatgtacacacaatggaatactatacacctgtaaaaagrgaagaaattctgttatttgtgacaacatggatggaactggagagcattaggctaagtgaaataagccaaacacagaaagacaaataccgtatgttctcacttatatgtgggattcaaaacaattgaactcatagaagcagagagtagaatggtggttagcagaggctgggaggtaagtggaatggggagatgatggtcaaaaggtagaaagcctcagttagacaggaggagtaagttgactttttttgagatctgttgcacagcatggtgaatatggctaagagttgagtgctgtacatttcaatattactaaaggaacaaatttcaaatgttcttatcacaaaaaatgttaaatatttcaggtgatggacatgttagcttgatttcgtcatttcacattgtattaaaaatcataacactttgtatcctataaatacatgcaatgataatttgtcaaaatataataaaaattattgctatgaaacattttcaaacataaaggtaaaaagaattgtaaaatgaatcctcatatatccatcacccggattcagtggttatcaagacttttacacatttacttcatctcttgctttttaaatttgctgaattattttaaagaaaatctcrgagacatatcatttcagaccttcatactttagtatgcattgctaaaaaatgagcattttcttatataactacaatattatacttaaaacattaataattattttttggtgacatttgataccaatccataatcaaatgtccagggttgttcctgagttcatctttatgaactttaaaagggggatcataatgcctttccccacttctttggcaggtattttgtaagagggtattatatgcctattttggataaaaaataatgaagtttgttattaatatataccagaatcccttgccttaaagattttatagtctaaagaacatagtacaatatttggcacatcgtaagtgctcagtaaatgtaattgtgggtagggacatgactttcttccttttaaggagcttatagtccaaatcttttatttttcgttgttaaacttaaaaaaaaattaaagcagaaatcacttataatcttatcactgtgaaaactttgtaagttgtcctgtcctttgtaaagcccttcagagaccawgagaatccagtagcaaagagcacttctagcctctgggttttagtctctaaacacttctttccactaaagggaatgagagctccttggagaagtgatttaattctaggcctggggctggatatgaaccagaaacaaagggatcaaagaataatgggaccttatccaaaggacacaggraccaaccagaagggactcccactggccaaagatggtgcctacatcaaaaaagaagaaagctttcaaataaacartctaacactgcatcttaaggaattagaaaaacaagaacagactcaaccaaggttagtagaaagaaggaaataataaagatcagagtggaaataaatgaaatagagatgagaaaaaccatacaaaagattaatgaaatgaagagctggtgttttgaaaagcttaacaaacctttagctagattatgaaaaaaagaataaatgtcaaatcaataaaatcagagatcaaaaaggagaaatttacaactgataacacagaaacataaaagatcacaagagactattacraacaattatatgccaacaaactcagtgacctagaagacgtggataactgcgtggacacatacaatctgccaagaatgaatcatgaagaaatagaaaatctgaacgaccaaaaacgaataagaaaattgaatcagtaataagaagtctcccatcaaagaaaagcccgggacctgagggcttcactgctgaaacatttaacaaagaactagtaccaatttttctcaaactacttccaaactcattctgtgaagccagcattactttggtatactaaaaccagagaaagacacaccatcaacaaaagaaaactaatctcaaaagacagatatccctgatgaagattagatgcaaaaatcttccacaaaatactggcaaacaaaattcaacagcacatttgaaagatcttccaccatgatcaagtggaattcatcccagggatgcgaacatggttgaacatagatgtgacatatcacattaacggaatgaagaaccaaarccatattatcatttctatagawgcagaaaaagcatttgacaaaattcagcatcccttcatgataaaaactctcaacaaattaggtgttaagaatactcacaaatagtttccaaattctggaagagtcaggtagaatgaaacaaatatgttctaaattttgttcataggagtacactcaatcattaaaagctgttaatagctcaaaagaaaagtttccttgactctgaaaaaacaaaggaccagcarcgttttaagcaaaaaatcaaaaagattacttcagtcttgtattagttcagtctgtagttaattcccattctgcttgatattcctgaacatttcagttctccatgagtcctgaaagtttttcttctattctgatgtcacartctccaaagttatcagaaacttgtattcaacagcacctggtagagttttatagctgattataaaaccaccttctaaagaccaaaacagacaacaattgtctgtggatgacaaaaggttttagggcagccwtagtcaaagatacaatccataaggaaatttgttacctctgtggcacacaataatttaacataacaattataattattactgataatgtacactaagtcatatcagaattataggagtttcccatgattttggaacacataccaataacatatttgtgtaaatatagcctaaagaaaactaaacaccatttcatatttgacagtgtttcctgtgtaatttttataccaaataagacaaattatgtcacttttggactttagggaacctagtatcttaaaggattaattagttcagaaaaagatataatttataatttgattttggaaaggtcaaaggtttaaaacacttatatcacagatcattgtaaaataagtcattcatttgaccaaagtaataactcaaggatttttttagaaaggtgaaaaccttcgttctttgagaaagaagccttaattttccaaacaatatttcctaataaaatagcatgaaaccaattaaatttgtttttcaaaattttataaactataaaattttaatcttgaacacaagatataactttcataagctttttataatctttataacctttactaaggagttggttaatgcttcaagaagaccttgttaatctgacacaggggctcatatgctggtcttgcatcagtgtgtctttgacaataatgattaatttatagagaaactgaacttattttatctctcaaaatcagcccttaaatctcacatgcccaccaaaaaaaaaaaaaaaaaaaagacatacaaatggccaaaagatgtatgaaaaaatgcttaacatcactaatcatcagggaaatgcaaatgaaaaccgctatgagagatcacctttctccagctggaatacctattatcaaaaagtcaaaagatgaaatgttggtgaggaggtgaagaaaaggggttctttacacgctattggtgggaatgtaaattagtacggccattatgttaaacagtatggaggttcctcaaaaaacttaaaaatagaaccactgtatgatcttccattccgctactgagcatatatccaaaggaaatgaagtcagtgtcgaaggggtgactgcatgcctgcatttattgcagcactgttcaaatagccaagatacggaatcaacctaagtgccattcagcagatgaatggataaagaaaatgtgatatagatacacagtgggataccattcagccataaaaaagaattaaatcctgtcatttgcaacaacacagatggacctggagggcatatgttaagtgaaaaaagccaggcacagaaagacaaatccctcatggtcttcctcaggtgtgaaatttttaaacgtttgtctcatggaattagcagaatagaggttagaagagtctggggatggttggcagaagggagatggggagaggatggacagtggatacaatgctctagttaggagaagtaagttctggtattctaatgcacggttgggtgactatagttcacaaaaaggtatatttcaaaagatctagaagagaggaatttgaatgctcttatcacaaagaaccgataaatgtttgatgcagtggatacgctgatgaccctgatttgattgttatacagtaaatgcattaaaacatcatactgtaccccagaaatatgtgcaattattatgtatccattagaaataaaaaaggatgtgataacaatcaatggaaacatcaaagagataaaaatccataggtatataatgatactaaacaataaacaaaacacattggtcattactggagtttcacagggcaatagttttccactcagtaaataaagggaaagactcaaccgtttattaatgtctgtgttgtctgcgttccaggataaccaaatgattgatgaggaaaaaatccttccttataaacaaattctagcttctaagtgcagaggaattagagaattagaaaatcaccagtttgtaattcctgatgaaataatagatctggcaacaatttatagccgacacttgaatcctttaggagaaggtggatggggcctttgcactggatgggccatgctgacaattgggcataagcgtttgactctagaaaccccactgaaatggcgatggggtcatatggcagtaggggaaagccaagaagcaacccccattccctgtccctagcaggagcaccacacggcagtaggcgctgctgaaaatcatttacaattgattacatatccgcagatcgcttctgcccctgcagctggcgacggtcccttttccaccccagcagaagattagcatttgactcccttcagggagtcagcaggcacagcggagaggtgtgccctgctacgctcatggggagtaagtgaatattgaggcatccccaacctggccttccacaaagctctgagagtgctcacagccaggctatatccctacataggacattcctccacagcatagtgaccagacctaaagcacaaacacgggggttctctaatgaaatggcacagccagaccacgctgcggtgaagcagcctcccctgtgctactcagtgtgtacgttattttctgtctagaaatgccattcagagcttagccgagtgatacactgtggtgcctttcctttcttggataacggtgcaagtggcatgaggcaccacaaatagatccctttatttcagcagcatttaccgagagtgtgtatggggtggtagaattcaactgaataggatacctcaaccataagtgctctgcctaacattaggcaaattagataatatacatgatatcagctggagccctttgggagatttttatagattgagaatgatttggttatttaaaggcttttttcatgtttcagattaacattgttgtgttgtattcaaaagtaattctggtcacttttctgctctgctctctggcttcctaagaatgagggaggctgggtgtgatggctcatgcctgtaatcccagtactttggaaggccaaggtggggggatcacttgagcccaggagttggagactagcctgggcaatgtagtgagacctcatctctacccaaaattaaaaaatcagccaagcatggtgacacatgcctgtagtctcagctgcttagaaggctgagatgggaggattgcttgaacctgggaggcggaggttgcagtgagctgagattgtacctctgcactccagcctgggagacagagtgagatcctgtttcaaaaaaaaaaaaaaaaaaagaagaagaagaagaagaatgcgtaggcacagaaaattcctatggtagcagtttaacaattaatacatgtgcctgagctctatgaagcccttgccttgatatttattatttatggtcaccagcctcagtggagcacttggcttcactttacagctacttacctgctctttgtccactccagtgcagctatatgataatgatgataatggttattatcatttcagtttattcagtgcaccgtatctgccattcactgcttttttaatgtattatcgcatttatccttagtaattcctgatataggcactcctcttactgcaggcaaacaagatgcagaaaggttgaaggacttcccctaaggtggtagcacagtagatagggaaagaccaaggcatctcctggagtcggatctaacttcgctgttctaggtgtcatccctggcgatcgtgtccctctgctgctcttctctccaagtcctctgtcttccccatcagcagtcactttggtatttcacagagaagctagatgctgcaaggagggacttccttgttcacacccctcccataatcccatcctttccttaattctttaaaacactctagggagaaaaccacaggccttaggccaagtacatggtctttgacaagctgcttaatttcccttggtctcaggtttttcatctgcaaagtggggacaggagtgcctgccttcctgagccagcctgagtcctagagcacagcaggtgctcctgwgctctgtcatgctgtgggtgagaaggggtctgtgtccgtggcctgtctagactgtgccatggacaggaagcggacatgattatcacctgtgtcctcttttcctccctccttgtgaaagggatggggcaggatggtgaacaacagtcttttctcacaaagctctatatttgcatcaaaaatgttgatttgtaattatttgcctaagtgtctgtcatacagataaattacaaactcctgagggacagacaggtcctggcattttgcttggtaattacctagtaattgctgaaaaagtatggttaagttataaaatatactgattctctagtcctgcctacagactttcttgaaatttgataagggtttattttcttggaaaatggaagtctcctggaggatactaacttaatttcccttttatccacaggcccttaagaggagcagtgccggtgattttcgaataagtggaatatggcttctgctttgttctggtctcttttgctcactgccccttcatttctgtcagaagattggactcactggactgtcatgaaatgccccaagtaaaatgaaagccagccactttgacttttgcctaatacatctttattttgttttcatcttctcttcagaaaagaaagatgtggcccaaagcctagagaactatacgtccaagtgtcctgggaccatggagcccatcgccctccctggcggcctcaccctgccaccggtgcccttcaccaagcttcccatcgtcaggtgagatgggcactgcagagccrgaaaggcagctgccctctgggacaccgtcctctagtctgattgtgaatagagatctttagaagagttcccatttttgttggctgtgtatcgggttcattatctcattaaacttgaaagcagccctatgacatggaagtaagtattttagagatgagagagtcagggccagcgacattctgtaactgctgcaattccatgcccactaaatggcggagtcacgtctgcacccagccttgctttgttcgaaagcctgccttgcgaccactacaccgtggtggaaaccagtctgatcacatcgtcttctccttggaagttttcagtcatttccctttccgcaggccatgcaccccagccacacgggaacagggcagctcctcgcccacacaagcacttgccagctcccacctttgctctgcactgcctctgcctggcaggctctctcctctcctggcttcattctgtctgtgctcccttgttccttcatgctcatcctcagccccatttccaggacacctttcctgagaggcgagctccctgagtttccatggcacccattgctcactgctctcccaggatttgctgccatgtgccgtcctttctgtgtgactgtcactcctaagagtgtgagattttagagtggagaccttttggcacatgcaaagtgggtccttgcaaaaggtttttgttttttcttcaccactcaaggcttaggacctgcaaaaggtttatgaactgatcttgtgaggtgatttctgaatttctgaaatatttgtttgaagaccggaaagaaacagttgaatctgacattttgctgtcgagtggaagtgctgtcaccttaggattcagtgtgatgaagatgctaagtatctttaaaacgctcttggcttggctattgttccccagcttcactcggtcttgccatgtactcgctttgactcacgggcctgctgcattccatgaatgagtcactcaacctccggggtatcagtttgcttatctccccactatgcccccaaaattaagaagaaaaccgatagcattaagctattatgagaattcaatgaagtaacatgtaaaagcatgtgtatggtgcttaagaaatgttagttttctttctccctgcattctttgaaggcaagtatagtactgccaaatgaaatggtttctttttgccaaagagttgtgtgctcccgagaagtgggggcagaaagggtcgctgtgcattgcagcccctggcaggccacactggaattttaaggtgttctgaagagcactgctgagattgttcatcaggcagagctgcaaggggcagcatccaaaaggcgtggctgtggcctgagaaggtgctgtggctgctcctcagaatgtccagagggacttgcaacaccgctgtttggagggcccaggaagggcgtggctgctctgcagtgcccagtgcttgctcagcactcaggcaggctgtggagcaaaggggcctttgaggcttttctatgactaagacttagagccgaatgcatttgacttgggattaagggcatgattcattttttaaagattaaggtctagaaaagcctttcttaataattttatatttacatcatgacttgaatcatttttaaatttagaaaaccttgcctagtagaatgttatgaagcttacagaacattctgggtgtttggtgctgtgtgtagatatccaggagctgaggcttcttgtccctgaagctggggatgatcggtccttgcaggtcattggaaccaaggaagaagcgtgcttgttctcctcacagcctgccaggcagccctggagttaagcgagaggccctgggttcactctcacttgtgtgtggccgtggtagagaagcagtctctttacacttcgttttcttcatctttaagccgggcttaaaaattgccccacacagggtggtttgttttgtttcagctgagcagaggcacacaaaagcgcagagcagcatnnnnnnnnnnnnnnnnnnnntacattgaaaagtactgtaacattcacattttagtccctcggctgttgaaacattagaaaaggcagattgggtgaaagtgtaacagtctaccgtttgggcaagtgctgttttccgaaccttctgtgcgcgtccctttcctgggcagtgtgtctctttctctgttagggtcctgaggctcctgtggcagagctccctgcgaacagttagctgagtcttgcctggcatcctggtgccattgttcttgcccagtgtggtcatggactgtttctttctttcttttttttttttgagttgtaatctcactctgttgcccaggctggagtgcagtggtacgatgttggctcactgcaacctccacctcccgggttcaagtgattcttctgcctcagcctcctgagtagctgggactacaggcgcatggcaccacgaccggctaatatttgtatttttagtagagacagggtttcaccatattggccaggctggtctcgaactcctgacctcgtgatccgcccgcctcagcctcccaaagtgttgggattacaggcgtgagccactatgcctggccatgggctgttttcaaaaatctaattttatgtatgacccaccatctgcataaacatattcgtgatgattttctgaagactttagctagagaagtaacccctaagtgtcctggtgactccttcctcacgtggatcgtacctggtctcattgaaaactgggaagaagaactgcctgagattcagtgtggtaaacccacggaacctcagtacgaccggtcaaatgaaagggaaggtctttggaacatttggagagccggagtatctcgtagcctactctgctccccaccgcttagagaacagactctaatgtacttgctttgcatggcttgcagggcctctgtggcctgccctgtctccagctttgattgtgagcgccctatttccttggtcctacrctcctgctttcccttgtgggaatacttagagtgggccaaatgtgtgsccggttttgttccttcgttgaggctttatctctggcttggaatgcctgtgcttccctgctctgcctgatgacacttagtcatctttcacgattttagttcaaggattatgtcctctataaagccttttccagagccacccaagtagaaatgactatactttctttgtaagttaggaattatttcagctgtaaagaacagaagacctaatagtagatagtcaataggaagatatttttctagtttattaagaagccggaaacaggtggcctctctgtaactctgtctttacctcaagattaccagatggctgctgcagctccagataacacatctacatccaaggcagaaagaagggagacagggcaggtctagagatgtctrtcttttgcttaatagggaagcaaaaatgttcttgacagattcgagtaggcttctgccccagtctcattaacaggaagtgtgtctcatggccatctctaattgcaagacaggctgagaaaataaatatttagctttcctagaatctgtgatataggtggggaatggagaatggggtcagaaattcgtgcttggtcagccagccaacagtgtatgccatatctttcttctgtagcgcttatggaacttgactggacatctttgttgacattttgggtccttctctcttctttgtctttgtagcccccaggtgaccttgtgtgttgaatgagtaaatagttggatcccttagaatattttgtaatagcagctgatagaaaccagrctaacttaggcaaaaataatttatggcacatatacctggaaagttcagggaggaattcaggtagggctggagtcagggctcaaacaacctcatcaaaacttggtttctttccctctgagctctgtccgctgcagtgttggctttagttgcaggccccaggtgctatcagagtggctcatcacctccaggcctcacatcctcttgctactgtgtccaggaaaagagagcaggtgccttttagtaacacctgtaaaggaacactgctttctttcagggggacaatgtccttttgcttttcactgcccctcatggagttatgtactcagatcggaccgagtccctgcaaaccacatggctgcaaggagaccgtgtgtagttcccctaaagcaaaacctacgaatagctgggcacaggagaagaggcaagtgggtgttgggaggcaacagacaaggacacaatagcaaatgacacccaaggcccactcatcccaccacactgcttcagatcaaaagtcctggtttcggtttgtgacctgtaatgcctatgagtcaagataatgcattgatgaatatctgcccttcccaagtcagaaagcataccttggaaaagtgcaaccttgaagcaagtgcacgctttatggactgcatgttctcttccttggacttgtggcactttctgatgcagagggctggttatatgcttctcttcttactaataaataggctcatgttttatatgagactaattttcacccatagataaaaatgtgcacgctttaatgtgctgtccagattcgcttttcatgcctttcttctaagtttttgccatttgaaagtagggagaattaggacagatgtgatgtccttgctccatataattcttcttctttttttttttttttttttgagacagagtcttgctctgatgctgaggctggagtgcagtggcgcagtctaggctcactgcaacctccgcctcccaggttcaagcaattctactgcctcagcctccgagtagctgggactacaggtgcgtgccaccatgcctggctaatttttgtatttttagtagagacagggtttcactgtgttcgccaggctggtctcaaacccttgacctcatgatccacccgccttggcctcccaaagtgctaggattacaggtatgagccaccacgcctggcctccataattctttagcctccagcacttttctttttcttgtcaaagcaagatcttttttcccccaagatatgccatgggccatacttctagaaaagactgtatgccacttccttctctaagactgtcatgatgatgtgtgagggatactgatgtgtacgcatctctgtaggtttcagaaaggaaggatagtaactaaaatgcattgacatatttatgccaagcaccaataaacccccttcatgtaaaattggaaaagccactggcttttgttcagtagtcttgtattcctatcccgcattctgcagttagctgtgtgactttgaacaaatgatttaacttcctcttcttgaactgaggttgatgagacatacctcccatgcatggatcaaatgaaatgtttgggaaattgttttataagcagaaaagctctttgcagacatgagttcttatagaggtttcagggaattttgcctctaattagatgtcaccttaccattccctgtcagtttttacttttgtttgtacatgttaaattaaatcaaatgaattagttccatcactcccttaagaaatgcatatatgtagctatttagttattttaaaaaattcctgggtctggcacggtggctcacgcctgtaatgtgaacactttgggaggccgaggcagggggattgcctgagctcaggagttcgagaccagcctggccaacagagcggaaccccatctcttccaaaaatacaaaaaattagtcggatgtggtagtgcatgcctggagtcccagctacttgggtggccgaggcaccagaattgtttgaacccaggaggcggaggttgcagtgagyggagatcgcaccactgcactccaacctgggtgacagtgcgatactccctctctctctctctcaaaaaaaagaacaagttaaggtaaccagagtgaggggaaagtaacagtgggatagaaaactaacaacaagttctgttagtacctggaattcataatgtcctacgtaatggctggagatgggagagagcgtgattgtgaggtaactgacaagaaggaagcgtgattgactacaagagcccccctctcaagaacaggcatgtatcagtcacactggggaaatgcatctcttcccagcagtgagctgggaaacctctctagtggattctctcgaagagaacattctgatgttttgagtagcatgctcagcaacatccccatgaagatctaggcaggtgtctgatgttgttttgctgttagcattcggtaacgcacactgagggcatgggaccggagcaccaggggatgaaggtggctctcccagaggacagggcggtgtggcctgctgttgactgacttgcgttagcccccctgctgccagcatctaggataacgggtgggctgctgtgcatcacacactctttcatgaatgccattgagcttttggcaggagttgggcaacagagaatccagagttatgttctcaggcatcaagaagagctggtaggtgtctgccgatgctgactgaggggagcgggctcgtgttgttaatgctctcagcacctggtccgtggcaggcctgcagtgaatctgtgtgcagtagttaaatgtccacatcacatgtagggttgtccccctcttcctaaatccttgctcctcatctccacctgaaggaaggcctgggcagtagctatggattaggccaaggtgcttccttaggaaacaaatccgggactgtcttcatatatcaaccaaacacttcaacgtcctatgcccggaaacatggattttaccagtttaattaaaaaaaaaattggggctgggcacggtggttcacacctgtaatactggcactttgggaggcagaggtgggcagatcactggaggtcaggagttcgagaccggcctggccaacatggcgaaactccgtctctacgaaaaatacaaaaattagccgggcgtggtggcaggtgcttgtagtcccagctacttgggaggctgaggcaagagaatcactggaacccagaaggtggaggttgcagtgagccaagatcatgccactgcattccagcctgggcgacaagagcgagactctgtctcaaaaaaaaaaaaaaaaaattaagtcaggcattgcaggtcagcccctatgacataagaagagctcagtaatatgtacacttgaagactaaagctcctgttagtgttacagggtaagctggttgaaaaatgtctacattggtgagtaaattatcagacctgctatatagaatcgttaaacataaacgaatttactgctgggtttggctcataattatgactttggttttagaatagatggtcagagccattttcttttcccttgaggcctttcttagtatttgacaataaaactattttagcaatatacaggaaaatacttacttgttctctgtagcatgggagcatgaactaggctcacccaaagatggtttcaagtaattccgatgcaagtaatgaaaaaggagccaaaatacatccctattttaattgtgttccaaaattcaattaataaaatatttgttgagtgcctaagacgcgcttttggcccaaggctaattgcgaagagatggtagtggccaagcgtgatctcatctgccaggaggcagccaagcccacatcctgttgctgttgaccagagttaaagcagaggatggttctgatagaactataagtgatcttttttccttatctatggaattctctgcaaaaatgatacagtgtgtacacagtagccaacagtagtctatcaggcccctagtaagcgtgtagattattaacacactgtaagtcctggattattattaaggaagtggaataaagtttcagtgccatttccagttaaccagtgagtctttaatttgggggcagtgatggggagtgggactcattgaatatttttttttaagagctaacattgagctccttcaacctggagaagagcttaagagttaatgaaggcgtttacgtgaacaaagacccaaatcctctagtgagagtgagcttcgagttgctttgatacgtttaaaacttaaacttttaagttaattctaccgtttgaggaaggattctaggcatttattcagagaggtgtttagaggcccaaattcagggtcgtgcttcggactcccagacaccaatcaggatgcagcctccatgactgtgttcatgccactgtccaggattttctcccatacatggtctagcggccaagccataaccttccttaagaatttcttaaaccagagctgtttagagctgataagaaatgtatagcagcattcaggatgggagcggctggccccaccttgctactacagctggcgcggttgccctctccagctctctcagttgctccggactcggagcaagcagcctccacgccgtcatacacacgaggcacttgaggccagtcgtagtccccacccatctcttcttggatatgtttccctgtgaataagattgatgaattaaataccaagaaacaaaaggtgagtggttgttgactgtcattcctctcgaccggttcgtctggcgtcgctttcctgatcagcgctctgcggtgctctgcgcggccctgacggctgctgttcctgagggaagtcaggtttttacggtgtcagcagtttccagatggaatctgtcaaaatcatccttgtcttggacactttatccctggacttctgctttgctgttggcagcttcataggctaagtacaatttttattagttcygcagctacagacagataaggycctggtgccyctgtcctcagcaggctcacagctgagtggaaacagatacagaatgaaatggttctgatccgctatgayaaaggcataatgaagggcacacacagagcgaagggagctggggagcacctgctgggtgtgcccttggtctggagggcgcggggttagcaccatctcctgccgtgagtcactgagggtggtgggtgagaaccacgcatgtggcaggctccccggggctgggatgtgggtctgtggtggggattgtctgccgagtgctgtaggcatgctttgcacagagcaggctggaatgaggcatctgaggtccctcctcactgagagaggtggtgattttgtggattctgtaaggcagttgttattatgcagtataggttagggtgcactgtggcagaaaaattaaccctgaaatcttcgtgatttactgtaacaacagtttctacctccctcacacaagtttggtgtgggttgggtggctctccagggcagctgagctctgggaggttgctgagtgctccaggccgcatctgtctggtgctccaccttctcaatgtccagcctccaggatcaccatggccgtgcagccgaaggagagagctgggggctggcccgtcactctaaagtgtgtgtctcacagaggcctcggtggctcccactcacaacctactggccagagctcctcaggtggcctcaccttcctgcggaggccgggaggcggggggtggggagcacgtagatttatcacgatcagtgtcactatcagtcttcctgttttcccacctctrctccttgtcctttctgtctgacgtccaggagtgttccagatcttaaccaccgtcttcccaaactggtcacaagggtgacagcaccttctagtactgtggtttaagagcatagtgtcacctgttgttactgctttccagccatcggatttgcgacagtatacttagtccctcttgcgtgagtttccttattgatgacatggagacaatagtaatagtacccaaactaagaaggtgtttgtgatgtttaagtgagagaatacatatgcagtggttagcacagtgcctgctcatgctcagactccatggattggtaaatttatcttaatgctagctggatgaattcgagcatgagtacagattggcagacatccacagctgggatactgtgggaagcgatgacagatacagatgctgctgcatgcgagtagagcagagggtgctgttgaccttctcatgggtgccatctcttcccatgggtcagagtctggctgccacttgctgtgggcaggtcccttgggaaagggagaggcagagagagaagagccatcctgggccaggcagtgggccctgtgccaggagtctttagctggatcctccccatgggtccatggggaaggtggtggccccacctgcactttatacacaaggaacctacgtcttagagatggcaaggcacgtgcccaaaggcacacagctggtaagtgtgaagcgagatttcaagctggcctttctgactccagaccatccttgggcccagttcaggagtccccagagggaagtggctgctcccccagttccagggagtgatttcccctgtctgggagaatcttgagttactgttgcaacacttccttgctgtgtcctgatgcctcggagtgcttttcctccctccatttatcttccttctgactgatttactgtttttctgatacatcatgtttggttatgtttatcctgaaaccacgctaaccagacagttgaagtatttgtgttctgtttgaaacaacaggcatgtgaaactattgaaccttcctgctagcctccggccacacaaaatgaaaagcttgmtgggtcagaaygtgtcaaccaaaagtcctttcatctattcaccaattatcgcacacaaccgtggagaagagcggaacaagaaaataggtaggacgtcgatcctggctttcccaccgtgctctgccacctgatttccaatggcttttctagatttttagaacagcatttygagccagttcatgcatgtgcatgtgtgtgcrtgcgtggatgtgtgcacgcatgcatatgtgtgtatatgtgtgtgcatgtgtgcatgcatgcatatgtatgtgtgcatgcgtgcatatgtgcgtgtatgtgtgtatgcatgcgtgygtgcatgcatatgtgtgtttacatgtgtccatgtgtggatgtgtgcacagatgtgygcgtgtgtgtgcgtgtgtgcagtctgtcatggaagtttatttgatttgctgcttttggcaggcaattgcccatagatgtgattttaaaaaatttatttcatataaggtaattttgtgaaagttctggaaaccagaaagacttttgttaactgagacttatgtgaactacagaagagtgacarttggagatgtagactgattttacaagggctgaagtgacttctgagtcatcagagaaagattcagggttggatggtgttcaggactgagtggagggtgaggtaatcgtgttatgttcttttgtgaacacaggtgatcaggatagtcagtcctgggttaagctgtgttgtgggagagactgggagtggacaatctctcctgagctttcctgtgtctgagctctcgtccctcctgcaccagggctcagcatgcaccaccggccctgtcccttggtgtccttcccaaagcccggctgtagtgccaagctccccatcccttgctgccacaaagacatgcccraggccccttgcaggagattgtgactgccagtcactggggaccactgccggctgagcccacacgtcctgtgacagaaccttgagggcctggaggctggccgctgcttggcgactgccggggcctccgaggagtgtgagcgggaggcctgcgcaaccgcggcgctctgtgtttgatatccagtgctttcttctccttctgtttctttatttctactcttaattcctgtacctccaatttaggaagaaggcattccggctcctttttccaccatgcttttctttccaggacagaggcttcctgttgcactcgcaagctcacccacaccccgagttacggactgcaggcgctccctgacccccccctgcccacacccctcccgctctgtcggggttttcatgccacctcctgccaccatcactctggtttagcyacagggactcctttctggtcgtggaaagaaacaggcttgttccaagcccagggctttggggctcgctctttcctttgccaggaactcgtcccctgcccctctatcattggctctcttgttgtcacatccttttggtctctgttcaaatgccccctccctcagaggggtgttctctgatcccagcgccttgcaggccactcctcccaccatctctagcggtgctgtctgggattctcttcccagcttctctccagctcaaacccacactggcccattgatgctttgtcctgcaatatcacctgaagcccagaattctgtcaggctgtgtgcagctgctgtctccccagcacctggagcagtgacaaaagaatgaatgaatggatggggtacatattatgaatcccattttatagattttgttgacggggaaactgattcacgacgtttaagtgtcatgtccaagaactcacaggagaacctagatctcactgtacatttcatgttcctggcagggcatggtggaattcaaggcagaagggacaataagagcattacgtgtagcacatcatcttttttttttctttgagacagggtctagctctgtcacccaggctgaagtgcagtggtataattaggactcactgctgcctcaacctcctgggctcagttgatcctcctgcctcagcctcccgagtgggtgggaccacaggtgcatactaccacacccactgatttttgtattttttgtagagacggagttttgccatgttgcccaggctggtctcgaattcttggggtcaagtgaatcccctgcctcggcctcctagagagctggggttacaggtggggacctctgcgtccagccagcacattgtcttgatgagcatttctcatatattactagctctaggatttcttagcttctgtaagggtctcataataaacttcattaacaatttgtaaattatccgaatgccttaaaaaataaagtgcttcagaggaaataaagttgtttgctgagataaagggcataactagggtaggagtactcaaagaaccttgtgcttttaaaaatggtaatcatttcttttattctarttgtgctttataagaggctatcatatgttaccttatttagtttttccagtatttttgggagatttcatttttatctcccttttacagatraggaaacaaacttagagaaacgacttttagaagtaactaaaagttactcagttagtgacaagcttgatttcacatcacagaccacgtgtcctgttcccattagtaccctatggtttcctctcacgtgcacagtaggtgtgggacagacctattacctggacctcacagtcctcaccctcggctggtttttcagtttagttcatgcaggcaagacacaaacgtgagaagttgactatcgagactaaatgtgaataaacgctctctaaaactgtacatctgtcagcaggggtacctggttacttacacgttgaactcgaatgaacaataaacactgggctaactgggagtggggtgtggggtgggggccccgcagaccctggggaagccctctggaggctcagacacagcctccatctgaggagccgtgtgggctttgcaaggagtggctccagctgttctagctgttcactgttagaatgagaagaaaataaagagacatggggtcatgcccttgaaaaactgcagtcaatactgtattttggaaaatttctgaaaatgtgagcactaactatataatctactctagaatttgtgtgtatctgtatgtgtgtatgtgtgtgtatgcgtgtgtatatgtgtatgcatctgtatgtgtgtatgcatgtgtatattgtgtgtatgcgtgtatgtgtgtgtgtgtatgtgtgtgtgtctatgcatgtgtgtgtatgagtgtgtgcatgcatgtgtgtgtgtgtatgcgtttttaaaatgccatttttagtctattgattctgaaagacaccccaaycttgtctctcctgccactgcttctctgatctggagaacatgaggtgacaggaagtgtaggcgctgggtagacgtggtggatgaacaggcagggcctgatggcagccccagatgtgctccagcgtgtgttgcggtaagcaggagagagctgtacaaatcctgtcctcactgtgttttggggacgtcrtttcctggcctcctgtgggaactccacctttcctctctggagggcgtcttcygagctccgtggggatgggcaggccaccctcagggctcctctgtctcccctggccccrgacttgctgtcctacgagtgctcaggctcttccccctgggaccttctagagtctctggctgctcttttgtgttctcattggggttggtgatgaactrtctcccctacggaacttttgaggaaagcttcagttctttcgttgagaaaaacttccagaggtgatttaggagactggaggtgtgagactcctcttctcaggatgggccatgtgatttgtggggcccagtgcaaaatgcaaacatagggcctytgttcaaacatcactaggaattcgaagacagcaacagcagagcgtgaacccagatgccagggcacagggccctgtgccactgatggcatggattgtaggccctgcctctctgcttttccttttcaatcttaagaaattgttggccgagtgtggtggcccacgcctgtaatcccagcactttgggaggctgaggctggtggattgcttgagcccaggagttcgagaccagcctggccaacatggcaaaaccccatctctacacaaaatacaaaaaaatagccaggcctggtggcgggcacctgtggtcccagctagttgggaggctgaggtgggagaatcacctgagcctgggaggtcgaggctatagtgagccaagattgtaccactgcactccagcctgggtgacagagcaagaccctacctcaaaaaacaaataaaaagacattgtcaaagattccttttrtgaaaattacaatctgtatttgttgaagagggcttaagcaawcattatccagtgattctcaaaactatttgatgctgatgctgccggcattattatattccctatttgcaaataagaaaattaagactgaacgaaatttaagtacctgccccaggtcagatagcttatcagtgacattccccgggctccatgccaggttgcaggactcgatgcccagggccttttttctttatagtatggcttctcaccatagtaagaagtacctgctcatctgggctgaggacaaattcagtggatgatgtaagatttttttctgagatataacgcaagtttcagccaaaatgcacattatttgtttggtaggaaaatgcaatttatatcccatagcttctaatatctttttggcagtgtactgatcagtgagtgcttgtgcagaagcttgacagatcacataactttaacctaaatttccagtctctctaaatgaacctcggtgtataattgggggaggtatcatcacagcaggtggcatagggttttggagatgaagaaactcttgagggtagtgtttgagaccattttccactttaacttgggatagttcacgagtctttgtgtgttggctggtgtggccatcatctgagctacatccatgcaaagatgactgcaacactggcctcagcttgagtgtgttgggttgaaggccttctgtcatttgtgataggtctttgtggtgctgccaggcttagtgccaaggtcgactgctgccccagaggcagcgtggtggcctggagaggctgtggctgtcaggtggacttgggctgcaccctggccctgcagctccccactgtgtgaccgtggacagctgattgtgcctctgtggtctgcagtcatgctatctgcagaatggggacattagaagctgacacggagggtggttttgaggatcaagggagataatgtttctaaagtccctggcagccattcagtaacatttttggtagcagttatatgccctgtgctatgtgctggggatgcattgataaatcaggagtctttcccgccacatgggtccatacagtttagcagaaagagacgaacttgtcaataaacgccactgcctggtgccgtgggtccacagatgacagcatgcacagtgtgtcccgcaacagggagggcagggcctgagatgagggggtttcagagaggctaattcttgtgccttcccactacttctaggacaaaatagtgaggaagggccaccaccgtgtgctttgacatgctgaggatggaaaggggttatctccttctttcagcaaaaatcacttttcaggctgggtgtggtggctcatgcctgtaattctagtactctgggaggccaaggtgggggggattagttgaggtcaggagttcgagactagcctggccaacatggtgaatccctgtctctactaaaaatacaaacaaaattagccggcatggtggcgcacacctgtagtcccagctacttgggaggctgaggcaggagactcgtttgaacccgggaagtggaagttgcagtgagccgagatcacaccactgcactccaacctgggtacagagtgatactccatctcaaaaaaagaaaaaaaaaaagaagaataaatttttatgtaatcaacagtttattttagatttaccctttagtagacatggaccatctaagtgtacattatttttttagtactctagaaaatgatttttcaaatggcttattatcatcatcatcatcatcatgaccatgatagggcaagccatttcttaattaccagacgttagccacttgtttaaagagagtgaccttcttcatttgtggtgaggagtggtctgggatgctgaccatcagtggccccgggcaggctgggtgaggcggggtcaggcgggctgggagcatgttgtgctctggccactgacttgtgtaaatgaggaggtcgggtgagcyccctcccattgaaggtcctcagaagctggtgggcctgggaggtggggggcatggaagctgggatgagggaaggacaagaccygagtttctggggtcctgagaggtgaagcagtagggtgaaaagagtgtaggttttggagacagactggagttcgaatctcagttttcttgcttctcaggaccataggacaggcaggcgggccagcctgtcaggtgggttctccttttttgtagaacgggcataacatttgtgctgctgacatagactgtggccattcactgcattgtgcagaggctcagatgagtacatggtggtgcaggcattaggggagctgttagctcacctggtgggcactgtattaattaattaattaattaattttaaattttattattattatactttaagttttagggtacatgtgcacaatgtgcaggttagttacatatgtatacatgtgccatgctggtgcgctgcacccattaacttgtcatttagcattaggtatatctcctaatgctatccctcccccgtctccccaccccacaatagtccccagagtgtgatgttccccttcctgtgtccatgtgttctcattgttcaattcccacctatgagtgagaatatgcagtgtttggttttttgtttttgcgatagtttactgagaatgatgatttccaatttcatccatgtccctacaaaggacatgaactcatccttttttatggctgcatagtattccatggtgtatatgtgccacatggccttaatccagtctatcattgttggacatttgggttggttccaagtctttgctattgtgaatagtgctgcaataaacatacgtgtgcatgtgtctttatagcagcatgatttatagtcctttgggtatatacccagtaatgggatggctgggtcaaatggtatttctggttctagatccctgaggaatcgccacactgacttccacaatggttgaactagtttacagtcccaccaaaagtgtaaaagtgttcctatttctccacatcctctccagcacctgttgtttcctgactttttaatgatcgccattctaactggtgtgagatggtatctcattgtggttttgatttgcatttctctgatggccagtgatggtgagcattttttcatgtgttttttggctgcataaatgtcttcttttcagaagtgtctgttgattcctttgcccactttttgatggggttgtttgtttttttcttgtaaatttgtttgagttcattgtagattctggatattagccctttgtcagatgagtaggttgcgaaaattttctcccattttgtaggttgcctgttcactctgatggtagtttcttttgctgtgcagaagctctttagtttaattagatcccatttgtcaattttgtcttttgttgccattgcttttggtgttttagacatgaagtccttgcccatgcctatgtcctgaatggtawtgcctaggttttcttctagggtttttatggttttaggtctaacgtttaagtctttaatccatcttgaattaatttttgtataaggtgtaaggaagggatccagtttcagctttctacatatggctagccagttttcccagcaccatttattaaatagggaatttatgcaatgtcaacatgccagctctgggtcagatgtcataggtgtggtggagtcagtcctcatctctgtgcaggttgcagagtgtgtgggaaaagctgtatcttgagaacatgcttatgaaagctctgaaagttgaataattctggtcaacagacgttcttatctgctagagaagaagccctccactgccctgttagscacccgtgtctgctcggggtgcctctgagttcagaggcctgaatccagcagctcctctcgcttgctgtgtggttcctgggccaatttattaycctgtttggaccttgagtgtttgccttgcagtgacgggggttatcatacctatctcaggaggtccttatgcagagtaatgagataacctgtgtggaagtgcctcacacctaacacatgcctgccacctgttgattgattctgaaattccttctggtttgcctaagagaggattgtaaagggaggagggggtgatggaaattgggacagatgctgaattagctttctgttgctttgtaacaaatgaccacagactcagtggcttcaaacaacacaaatctgcttcctcatgatttgtgtgggcttcagctgggtcctctgctcagggattcacaggactgaaatccaagtggcatctggggctgtgtcctcatctggaggctcaactaagggaagggcctgctctcacgactcctcaggccgttcttcattcatttcctgtgatccccgttctcttgccagctgtctgccggtgctgctttcagctcccagaggctgctcttaggcccttgccatgtggtcccctccacaggccctctaggcaaggatatggtctcctgtgcggtctcacctgattagaacaagcccattcaggacaaccttccttttgattaactcagagtcaacggattggggtcctcaatcacatctgcaaaaactttccacctttgttttacaatatagcctaatcatcatattcacactgaaggtggggattacatagtgcatgcacaccaggttgtgcacaccaaggctgggggttttggaggtcgtcagaattctgcccctgcacaggtactgaactgcagttgacctgggagtgggtggggaggagaagactcccctctcacaatcttaggggaatagggcaaatcacactccgtgttactcacaagtgaccccagtgccgtcttcctgtgttgccagcttctgggccccgtgaagcgcagtgtgccttatggctctgtaccaagaacagtgccatctggactgatgccagcatgaatgcagcccgccgaaggcagtgacaagcgccattcatgtggcatcaaagtgccagtgacagctaccttgctttgtttcagagaaagctggtggaaaaagcagctttgaatcacccatctcaagawgatcatagagcctgctgcctcactgagaatgtaaattgccagaggaataattggaaaccatgtagaaagtgaaaaaataccaactaatacatggattcatttatgtgtgtgtattttctagatttccagtgggttcaaggagatgtgtgtgaagttcagctgatggtatataacccaatgccgtttgaacttcgagttgaaaacatggtatgtatcaccaatcatttgacctttttgggctaacatacaaacttctcattaaagtaggttttacttaatgtctgaggcacacatcwtacgatatgtgtctgtttttatgtttgttttgccaaagcatataagcttattgtaaatgaagaccatgttttgttattcctgtgtctttaggcttggttttcaataaatatttgaacctacaaagaaacctctgatttgaacacatgccgagcttagttgattgggtataagatgtgaaataataatttcgaagcttacgtgagatgtgttgaggttgcaaagtccccattctgcctgctactcaacggtatcagcattattttattgctgcaagatgataagatgaccaaggccccagggaagaacaagctgtggaatgggaggataaatgaccacaccaccaccacgagctttctcttgttttgaaatcctgatgtcccatttctgtgctttgtgtagggtgtgaaaaattcagtttgtaatctcttctgttggaaatgcttacccaattctctagtcagggggaaggagattagtactggcgctctaagctgattctgtgttttcagagcgggccctcccatgccgatgtaggtcccatccctcaagtcttctctgcattgctgtgtggtgctgctgtgtaacttttcagcagcacgcaaaggagggtgctgcgagaatrgatgttgtcttttagagttttatgactggtgttcagggtaagaggcgggcctttcatgcatgtatctcgctgagtgctcttgccacgtgtcggtccccaggcaaggccctgaggggacagagatggtcaggccctggtccctgctgcgactgtgaccaaggctctgttggggtgcatgaggtgttgcaggcctgttgtggacgggagtctgcctggccctggagagtcagggaagggttcctgggacagatgtgacagcctggctgtgagtacaggctgagttgcagtttgccaggtggacacgtggtggctgttgaaatgctgtttaggcctctagcacgtggcatagtttcccgaaatctgtctgagctcctggaagctcagctggatgttcagcttgtagtctcgaggtgcgctcgggaggascgcytctcctcctgttgggcgaggactgacctgcagtaggatttggctctggcctttcctgtggctttctgtctcagccttagtagggagaagcagtttagagaattttccccaaagtggttaaagtatcaaatgcctgctgctctttcttacacattttttttttggtcttaaaatgtagctttcatttttatctggtttaaaaacaatatgtgcttattataacaaatgaggaagagcagggaacaaaataaaaagcaccacatggagatagcccacaaatcatgggcaaagttttaaaaactaaattaggaagtattttaaacctatgaaatgttacagggaatagtacacactcgcatctccaccattcacatttaaaaaatgttcacagttggccatattgctttagctattttcaaaagaaataaatgccaatatatttgcctagagacaattggctcctcggcttccacccttgcctgctgcatctgttccacacatagatcatttcacaccttggctccaagtccgggcactaagtgtactcactgccgagagagtggctttgcttctgggtgcttcctgtagacagagttgggaaaagtctgtgtgcatatacacatacatgagaacacacacacacacacacacacacacacamtatatatatatctaaacccatatgcctacatatatgtacacatgtgtatacccctgcgtctgcaccatagacatgcatgtagcatctgccctgttcacggggaccctcgctttccagcacttctccagagggtgcttgccttcctccatctgtgtgtgtcctttcttcccgcgtgagaactcgggctcccaacatcagcacatctacttagatgctcagtcctgtcatatctgagatagttgcggggtagctttgaccatactgctgcagaaaaccaacccrctaaaaagaatccaggatttcccccttcgcccagggcttctttatctcagcagtgttctgtaactgttatgaaaccttgcctgtcatttgttaggtttattctaatgtagttgacggttttgatcgcttgttaatgatattttacccaattgcttattgctaaactatagaaataacgccttttttttctgactctgtcactttgctaaatgtactcgaaagttcaagtttcattgtagattccatagcgttttctgaccctggttttgttttctgtgagtaattgcctgtatgacttttcttcctttttcttgctttagtgccctgagtaggacctctgttacaatgctgagaagtcctgagggctgacatacctgtactgcttccaatcatgggccaccgtcttgaggccagggaatctgcctgttttgttcactagcaagcttagtgcctgtactagtaagcttagtacataccgaaataagttgataactcacagatgtgtggcagggatattaactggtggtatagttccacactttattgattgattgattgagatagggtctcactctgtcccccacgctggagtgcagtggtgtgatcattgcagcctcagcctcctgggctcgggtgatcatcccacctcagtctcccaagtagttgggaccacaggtgcgtgccaccttccctggctaattaaaaattttttttgtagagatggggtcttactgtgttgcccakgttggtcttggtctcctggggctcaagtgttctttccaccttggcctcccaaagtgttgggattacaggtgtgagccaccatgcccagccatgtttttatttatttttgtttataaataaaatattttctctttgtgttcacattcccatttggtaaaatgataaatatcagacagcaaacagggctgaaatcaagtggatccgtggtttatcgcctgagcacctgcagtgcttaccatgtttaggtggttttgtgttacactgtacactgtctccgaagttctctgtgaagactgttggtgattttattccagcagttccgatgtgccatagccaatgtcttaaggctcatttggaactgagcacacacagtaggtttgctccgggcttacgatgctgcgtcgcttggtttaggggctgctcaccagcggagtggagttcgagtctctccctgcggcgctttctcttccggctgaatctggtctgtacccagtgacgctcgtcggggtcccgcagacgactggaacgattactgtgaacggtaaggagagtcccttcatgcttcctgctcaggagggtctgctgaacccttgcatggcctccatgaggtccagagccgatcgcccgtcatgccrgtcctaaccagttagaagataatgaagaccttgtctctttgggaagcatgaaaaaaacctgttcgtggggtgcgggatgtgtggtggtgggaggggtccttcctgtgctctgaccccactgcccatgcccctcctccctctgcttcgtctcctttctgctgtcttcctccagtgagccttccttcctcctgctccttcttgctggaactcctcagagggtgtctacacacgctgaatctcccctttgcagagggcctttaaccctctacatcctggactcagcccttttcacttccccaaaactcctgtcacaagcagtattttttgggctaaatacagggcctacttttcagttttgtttctaaattcgctcctcagtgccctttgagtccctggctgaccctccactaggcatgccctctcctctggctgctgcgagcctaccctctggatactttaccgcctctctgctctagctgctgtgaccctgcctctctggatgttttactgcctctctggcccttctgtttgggtctcttttgtcttctgcagcccactcctcagtcaggccttcctcacaccccacttctttccttccccatctctcgccctgtgttccctggccctgttaactcttcctcttccacaggctaccttaggtgatcccaccgatgccctggccttgctgtcttccagttcctccaatgtgcagatgatttccagggctggacttcttcccagcctgcacctccagcccttcccagctggcccctgggcgcctcgcatataatacatgcaaatcagaactccctacctcgcctccccaaaactgcccctgcccccgtcaagcctccatctcagtgcgggcattcccatcagccatttgccctaacgggttcttgggggtcatcctgaccctcgctgtctgtcacagcacccccacctccctccctcagtgcttcctgagaactgctgcttctctccacctccactgccccttccggtcttgcagatcataactcttctagggtttgtcacaaaagcactgggactggtgtttttgccctggtcttgcttgctaacagacccacctcccatctgtggcccggcgatcttcctagtgtgaatatgcccctgacatctctcaactgggagcctcacagctgtcgccaggcccttgttatcaaggcccagtccttaagtgttgctctggagcccagtgtggtctggctcctgctggcctccgcaacctcctctctgcctctcccctcctacttcagtctccgaagactctttagttctggcagctttccaggctttccgaggctttgcctgtgtcccatcgagtgcttatcaccctggccggctcctgggcttccctcagtcctcagcacaggctttccttcctccgggagccttcctcggcatgggctcgctggcctaggcccctgtgcggtggyctccttcctgactctgtgcaatagattccttgctggcctcgtgtgtctcgctcagctgcagctccgtgcctattgtggagcctggcacacagtaggtcttcagtgtgtgtttgttgcctggaagagcaaacatttgctggaagggtgctccctacgggtgagtgaggcaggtgtaatcgtaggtgagggtgtgctgccccaagtgggaatacggagtggagtggccgtgggagcgaatgactctgggcatggacccagcggggagagtgagtgggtcagtgaccctgaggcttgaaggctaactaggaactattcaaatgaatgggggtgggctgtggggggagtccacagggggcagaaagagggttccaggcagaaagaacaacgtggtggtaagagagaacatggtacatttgggggacctgggggtggtcagagtgggtggtccaggccagggtggcagagatgagacaggctggaagggaggcagagggccgacctgggttcttacacacggtgccaaaggatgctggctttctctggagggcattggggctgctgcgttatttgaagagagatgtggtcaggtgggcagttcagagccatccctcaggatccaggatccctgttgagatgggaaggactggaggcagggacagcagtgatcaagcttcagcgatgacccagggagaaagggacagaggtaggcccatagccgtggcctggcagtggagcataggagataggaatggatgagagaggagtaacgaggagtgaagggcttgattcagaatagcacataaccgtaactagtrtgttcacagttgaggagtcagagccttagtcacgcagttcttggttgtttatcctgggtccagactagtgagtgttcatttttagcccgctttgggaacaaggtcaaaaggactgaccttgtattatcagacattgtaatgtgctatttgtcctcagacttttgggtttatatggcagttattttaagcaacaggtaagaaaaggaaaatgactgacttaaattaagaattgcaaaataatggctgcttagcagacaaaaccatgtcataccaggttttatagaaaggacattagtgcaagatgtggttttgggaaggagaatgtttgccagtttaagacgtctttgaagaggtatactttagaggaagcgtggctgctctgaatgggagttgtgttgatagggcagctttaagctggcaggaggtgagcacggggctgactgaggctgtgtaaggtccctgatttgcccacgagggagtgcctgcctctccttttagtatggaatagtttcatatgaatgcagaaaagttgtcaccctaggcatctagccatggggtattgtttaattttgttacagagtgaatgttgtttataataattatctcgtgaaatttcaaaagccattttaaagctttgcttaaacaatttcaagtgattatctaaccagtggactttttttttaacatgggaaatttgctaatcttaaattatggtgcttatacacacacagcacatctgccatatcagcagcagctacaataacaattggctcgtgtgtgaactttcatctctcaacagaaagctttgaagcatttttcacatactcattaagtcacattatgtcctgggaaagaatattaacattctcgttttagagatggataaatctgaaaagcaaatgagtaaagggatgagatactgattattaagtagatatttatagtttacaaggaccttcacatatatagtctttcatttgggcccagccagccttgtgaaacaggaatgcagatgctgttatcctccccatcacgtacgaggacagtgagggtcgtggggttgagggcgggagtgtgggtgagcgcccgcgggnnnnnnnnnnnnnnnnnnnnnnnnnnnnnnnnnnnnnnnnnnnnnnnnnnnnnnnnnnnnnnnnnnnnnnnnnnnnnnnnnnnnnnnnnnnnnnnnnnnnnnnnnnnnnnnnnnnnnnnnnnnnnnnnnnnnnnnnnnnnnnnnnnnnnnnnnnnnnnnnnnnnnnnnnnnnnnnnnnnnnnnnnnnnnnnnnnnnnnnnnnnnnnnnnnnnnnnnnnnnnnnnnnnnnnnnnnnnnnnnnnnnnnnnnnnnnnnnnnnnnnnnnnnnnnnnnnnnnnnnnnnnnnnnnnnnnnnnnnnnnnnnnnnnnnnnnnnnnnnnnnnnnnnnnnnnnnnnnnnnnnnnnnnnnnnnnnnnnnnnnnnnnnnnnnnnnnnnnnnnnnnnnnnnnnnnnnnnnnnnnnnnnnnnnnnnnnnnnnnnnnnnnnnnnnnnnnnnnnnnnnnnnnnnnnnnnnnnnnnnnnnnnnnnnnnnnnnnnnnnnnnnnnnnnnnnnnnnnnnnnnnnnnnnnnnnnnnnnnnnnnnnnnnnnnnnnnnnnnnnnnnnnnnnnnnnnnnnnnnnnnnnnnnnnnnnnnnnnnnnnnnnnnnnnnnnnnnnnnnnnnnnnnnnnnnnnnnnnnnnnnnnnnnnnnnnnnnnnnnnnnnnnnnnnnnnnnnnnnnnnnnnnnnnnnnnnnnnnnnnnnnnnnnnnnnnnnnnnnnnnnnnnnnnnnnnnnnnnnnnnnnnnnnnnnnnnnnnnnnnnnnnnnnnnnnnnnnnnnnnnnnnnnnnnnnnnnnnnnnnnnnnnnnnnnnnnnnnnnnnnnnnnnnnnnnnnnnnnnnnnnnnnnnnnnnnnnnnnnnnnnnnnnnnnnnnnnnnnnnnnnnnnnnnnnnnnnnnnnnnnnnnnnnnnnnnnnnnnnnnnnnnnnnnnnnnnnnnnnnnnnnnnnnnnnnnnnnnacctccacctcccaggttcaagcgatcctcccacctcagcctcctaagtagctgggactacaggtttgtaccactacgcctggccaatttttgtattttttgtagagatggggtttcaccatgttgcccaggctggtcttgaactcctgggttcaaacaatccacccatcttggcctcccaaagtgctgggattacaggtgtgagccaccgtgctcagccaactcttatcytstaagaaatagttttgatcttgtttatttgttttttagcgttacaggaaaacataaaaaagaaagaaaaagaaatctcaggagtcccagaagcaattactgtaaatgatttgttgtgatatttccttccagtgttttatccatcctatttaaaaatatgtatttgaatagttgagattacatgacatcatatatagtattatagattactttttgcataaccacgtaacgtaagcttttcttcatgcctttacaaattcttgagaaaattcaattttaattgcttcaacaaagcgcatcataaagatatctcaaaattgcatacccattaatttccttgctattggaatttgggatggtctcaattttttttttttttgacggagtcttgctctgttgcccaggctggagtgccgtggcacaatcttttttttttttttttgaggtggagtctggctctgtcgcccaggctggagtgcagtggcacaatctcggctcactgcaaccttcacctcccgggttcaagcaattatcctgcctcagcctcctgagtagctgggattataggtacccgccaccacgcccagctaatttttgtgtttttagtagagatgggattttgccacattggccaggctggtctcaaactcctgacctcaagtgatctgcccaccttggcctcccaaagtgctgggattataggcacaagctaccacatccagcctgttcttaatttttgcacttacgaataacacttaatggatatccttttggccatttttataaaatgtgtcttgggattttctgaaatgtttttaaagcccattcatgtgttcaatagaccctttcatttgccagttgctgtgctgggtgatggggctgtagcactgatcatgacagtcctggtctctgtcctcacgggaagttctgtcaagtggagaaattgacaagtcgccgaataatcacagtgcactgtcgtcaggactgtgatgcgggaggtcccatgtgctgggggaggtcacagactcagggaagagttcttccaggaggcgacaacaggctcgatgggagggaggaggaattggctgggtgcaagagcaggcagggcggtcttcaacagaggaaggagaggtggagacactgacgtataaccggggaataaaatgaaacacagacaacatttactcaaaagggatcgtagacctgagtttaaaagctgaaaatatataacttttagaagaaaataaaagaaaattatcatgaccttgaattgggcagagttctttgatgtgacaccaaaagcaggatccctggaataaaacgttgacagattggacttcatcaaaattaaaagcttttacgcttccaaagacaccattaaaagaatgaaagttacagactggaagaaaatatttgcatattaaatatctgataaagagcttatattcacattaagaactcttaaaacttaataaaaataaggcaaacaacctaatttaaaaaatggacaagagatttgagtacctatttcaccacaagatatacaaatagctcataagcaacctggaaggatggtcgacatcattagtctctgaactggcaccatgtgaggctccagttcacacccgctcacagggctcaccatagcagggctgcaaggtttcggagaagctggacgcctcgtgcgaggccgatggggatgctgatgggacatcccttttgaaaatacattggcagtttcttcagaagttacacataagtttaccatrtgacccaacaactccactcctaggtacctgctcaagacaatggaacacatatgttgacacagaaacctgtgtgcgagtgttcatagcagcatcgttcacagtcagaaaactggaaagggcccagatggccatcagctggtgaatgggtcagcagaatgtggtgtgtccctgcagtggaacaccactccgcaatgaagggacgaagggacacgtgccccagtgcagaccagcctcagaggcgagctgctgagtgcaagaagccagatgtaagaggcgcagagcgtgagtcctctgatgtgaaacatccagaaagcaggtctytagtggcaggacacagctcagcggctgcctgagactgccagtggtgtggggactaaactgattggaagtgctcctgcgtcatctctttggggtgctgcaagtgttttaaaactgggtatcaggctgggcgtggtggctcatgcctgtaatcctagcattttgggaggcagaggcgggcggatcaccttaggtcaggagttggagaccagcctgaccaacatggtgaaaccctgtctctactaaaaaaaaaatacaaaaattagctgggcatggtggcaggagcctgtaatcccagctacttgggaggctgaggcaggagaatcgcttgaacctgggaggcggaggttgcagtgagccgagatcgcgacattacactccagcctgggggacaaagagtgagactttgtctcaaaataaaaacaaaacaaaacaaaacaaaaaaacaataggtatcagtgatttgtaaatttaccaaaaatgattgcattgcatacttaagctaggtggattttatacctgcacatgctgtttagaaagatgaattttggcaaggcttcagtgttggatggacacatgatttccgccgagcctgccaccaggacttcccgggcctggacgcttccaagcacattagcttgaacagccagacgctcagactcccagctctggctttggctgctgaaattctgccactgctgtccgtagaactgtggcacccagtgggcgctaggctaggaaggacactagcttcagctacagtgtcacggcacgcgctcacaggcctgtgcagggcaccagccgcccaacgaaagctggaggtgggcactgagagagctcataaaggagaycgtggctccatctccagcttagcaagctccggccagcgctccagcaaaagggcggggggtggcttaaggcgaagaaacgctaagggcagatcaccaaaaaggaaaaataacttgagaagaggtactttaactttgtcatttgtcctgctaataaggtgtcccygaaggtccctgccagctgtaaaaggcagtgaagaaagcaggtcctctagctgcttctctttgyccaccccacatttttctcctgtgtttagaatcatttccaaagataatgcctctgaccccccatttttattgtcctgcggatgcactgtgacgggggtgcrtgcatgctctggtacctgctacstctcaacaagatgtgctgctgtgggcggccaccacggcaccgagcctgggccctggggaggaatgtggatcccagcatggtcctgatgaggaccaggggctggaggaggagggtccagtggaaccgatttggagttaaaatgtttgctttttatttcttattttaaaaaattgtatataatgtatatatttttctaaggtgacttcctgaaataaaatgtgactattctttgagttttgattgttattaatctaatatgaacattccagtgactgattcattaaatttactcacaaacgtttatcgacacctaccatgtgctttaggctctgtgctgtaggactagcaattaataaaaaatgcaatgaataaaaaatgccctcgacctaggccrctgcccttgtatgagctctcagtctggaaggaggtactcagactaactagagtcaaatttgctaactggccctgtaatataaaaacaaagtagaggttgaccctgtctttggggttcgggaaggcttcacagaagatgtggtattaaactgggccttacaagatccacaacaattggtcagataatcaagcatggaagaaaatgcaaagaagagggaacaacaagtcaaccaacccaataaatacagaccatggcgcaggagaattcagcgctgtgatgaaaacacagtgggtcagatgagatgagatgtccagaagaggcaggccttcagagacagaaggcaggtcactttgcgaagcagtgtcagatggccaggcttgctttgcagggaacttctcaggaaaggcctctgcygaggagacgcgcagaggagcagagctggtaggyagccagtgggatgtggcagagagcattccargatgggagtcgcgggtgcccagatggagcctggcgggagtggtgccttgagcactgacagtgatgagggcagaggtcaggagcaggcggcctgatggcatctcctgtggaattgcrttgtccggccctctccatggccaggcagccatacagagatgcactgcacagggtgaggctcagcaggaggcagctgtgaagtgtgcagcaggccactctgtcccaggcccatcttgactactgctagcgtgcttttctgtgtcgcacagtggttcaagtttgagatgcttattaatttgttcaatacatacttagtgagtacctgctatgtgccagttgcctggctgggtaggagctgataatgcaagataaaaatattgtcacggccgggtgcggtggctcactcctgtaatcctagcactttgggaggccaaggcaggtggatcacctgaggtcaggagttcgagaccggcctggccaacatggccaaatcccatctctactaaaaatacaaaaaaattagctgggcatggtggcatgagcctgtaatcccagctactcgggaggctgaggcaggagaatcgcttgaacccgggaggcagaggttgcagtgagtggagattgtgccactgygctccagcctgagygacagagcgagactatctcaaaaaaaaaaaaaatttgtccctgtcttgaaaaaacttttggtccagtgcaggggtggggagggcagagctacaggaagggcagctgagcccacagagtgctcgggggacacaggcgtgccaagcttcaggcaccagtgactcccgttgcacttcctgtgctgctgagacccaggggctccctcaacacagacctcatatgaggggccatctccttaaacaagagagtctcrtcgccatagaccttactcctacctcccacagtttgcccatagtcccacattggagtttctctctgccaagaagctcccggtcctcatctcctcctaggagactggacctgacccttgcccagcctctgcagcccctccctgggggcctgaccttggctggagtggggtccctgctgccatctctttagtgccatggcctgttcaggactcagctccttttcagtgccagcccgattcccacccaagctccactgctcatgacaactgggatgctgcagctgggaccgtcagggcctgtgttaggcccaggccctgtgactgccagktgaagcgttgttttgttttgtttcaaaatcctgttgtttgagacacaaaatagtgaatcttggcagtgttttatgtttttccgataccttctctgcaaatccacattgactataaacttttgcttgagaaaggctgcctgctgaaaggtgggaaaaagcccttgatggtaaggacacgagtccaattttccttccttgacagaggaagtttatttcttgactcatgaacgttaaagayatttaaattccaaggagctcaccttgatttattatgcaattgtttcaccaaaatttggtttggatgcagaagctcctctatcagagtctgtatctggaagcccccaggaaacacgtgcccggcaccatgagcttggcttgtgttaagcagcatttcttcccttgggtggcagaggtctgagtctggaacattcttttctgtcctttggaccaatagtgtgtgacaccaagtgcttcggcgtgggaagsagatccgactccgatcctgtgtgctgtgaccgggagcagggccaggaggagctgggcattggaaagactgctggagagtgtctggagtggggtggtccacagtccgcttagttgacttcatgagccatttctggatgcactaagcacacgatgttggctcaagtatgctggactaattgtggctctctgtggaaatccttcagggacaggaagaaggtagtggggtactcaggaaaccttcaggccccaggagaacatgttggcctccccgctctggccacctcctctgtctgcccctttgtcctgtggccaaacttctccagggagccgtgtgtgtgtttaacctcacctgtcacatgcctctatttgtcatcygctggcatttgtccccactgtgctaccagatatattttctctgtgatcaccagtgacctccttcccaacccactgtttgcagcctgtggattgggaaggatgcaaccaggacaattagttttgtggattcagttaaagtcaatagaagtcaggtgagggctcacaggctgagagcttgagtgcaggagcctcggggaggccctggcttctgtgttgcacgttcatctggcttggctgccttggcctgtcccgtagtccagggcctcacctgactggtgtgaggatggagccccacagatactgcctgaccccagggcctggcccagctgccctcatgtgacgccaggtgttggtgggcattccttacagtttgtacctgtaagaaggggtctgtgggacagcttctgtttcctctttggcctcagctctatgttagcagctggaatggttggtatacattttcctcttaaatctatggagtttcccaaggtacttctaagcatgacattttttagattttgagagaacagcggcctcatggtttatttgaatgaattcatcatgtaatttttataccccataacttagtaattaagtatttttatgcttcacatatgcctgagaaatgaaggctgagtgagggtgttcatgtttatgacacacaaagacctggacgtgtctgcatgaggaaagcatgaggcatgtggcagctcactttccattcctgagagctggatactgaactccatatatgaagcccagatttcctagcycctgtttctgaaatgcatgagtatggtgattcttctttgggaagtgagtaattttcaaatggccttggcttcttccttctttcttctttaaatttcttcttcttattttagatctgcacattcattgcaaccttcttctggtgatgaaatatctactaatgtatctgtccagctttacaatggagaaagtcagcaactaatcattaaattggaaaatattggaatggaaccattggagaaactggaggtcacctcgaaagttctcaccactaaaggtaggtattgtaagcagctttgaccctgggaatgtttgtattgtttacttgtagaagagatactttaaattctcagttttcagagaatctaaaarcttctttgtggattcagttgaagtcagtagaagtcaggcgagggcttacaggctgagagcttgagtgcaggagccttggggaggcttggtgccatcatgacagtgggaaaccagttcttcatgaaagacacacagcagaagacagtgggaccgagcacacacctctgtacccccagtgccctttcccagacctcagcatccatcagctactcagcagaactatttcttcaatgaatgggagagaagcattagcaggcctggaaagagtctgtttgggatccaacccatcatgcatccagctcgtgtagtttggggtcaggggacctgtgytgaagtttggacttcaccatttactagctatttgtccttggggaactgttactcctgtgcctcgatttcctcttggataaatagggggggtagtatttagcacatacattacaagagtgaactagggaggtcgtgtttggcaggacacctggtgtgtcagaggctggcgagtgcattgatcaaaggggaatgtattgtataggaggagggaaaagtatcaagagtaatatgtggaaataaaaccgggtaatttaatacagttagagaaattgtaggctagtgagaccagacagagaatgaaaaagggaaagcaagttagcaggactttggggtgttttatgtgcttttgacgtatgggtgagatgaaccaggcatacaaggggagtttgactggttctggttaagtttccagtagatgatgtactaatcacatgttacttcctggcagagggctccctccccatgctaatgacattataatgcgacaaaccaagtttcttagaggtagagccacagaccctctggttagttccagcttgagggaaggtccagggctgagcttgggagaatttgcaggcaaagaattatgtcatgagagaatgagtttggagtgtgtaagaaagggttaatttgggcttgtaccgctctggagaatttcagggtatcttgtattcccatatttcttccactgattttgatagaaatctgtgtctgtaggaagtaaagcacgaagctttgcgtccgcattgtctaacccattctcccggtccgtgtctgccctggaaggagccttgccctggggagggacccaggcttgtcctctagtgatttrtgtgcatggtcacggggctggagccgtggggcagcccaccttgtgttcttgctcaggagggccgggtgtgcccagagcagggagtgggcatggagcaggaagtcacctgtagcttgtcggtgcacactcattttatattttcttgtcttgaatccttcccttttctgtgggttttttttttcctttttcctttcagtgctagtcacacaacatggaataacaagtgtattttttattgagtgaggccataagtggcaaattgttatatgctaaatagttattaaaaatgcaagtctgatgtgttcgtcttgctcccttgtccctgaggagtggttcttgcattcatcttaggcttcgcttcagccccaaggagatcacagggaggtggtcccatcccctggggagccggggcccagtacagaacctgctggcagttgttaatttggcatggtttctgcataaagatggcagaagagtagcatttttattctactctttctcttgaaatctcccccgaacaacaaagtrtgaagaaacagtgaaaataaaaccattccctgtgaaacaaggaaatcatttcaaccccccgtaacaaagcatcggccacaggtgtcgtggaaactgggttagagggagggcgagagcggaagtgggactctgggaggactaaggaaaagctgttccccgagtaggcaacgcagcacccaaaagtaccccaacaatgaaagccaggcagaggggcctgggcagatgcctggagcagcaggaatgccgaggggttaccttttctgtgccaggcctttggccaagaaaggggaggcctggggtgggaggggaaggaggcattggagctcactgatcacacaacctgtgtgtgaaaggcttcactgcaagcctcacctgcattttcaataacaaaaacacgggcggcctgtctctaggataagggaactagtggcatagcagcccaagccgagctggatcacagctgtcggtggccaggtccctccttgtgtcactccggggccaggcaggagacaggccacaccagaacagaaagaatcgctatgaacaatggctgacaggtgcagagtgtttgagaggcaaagataatgtaaagcaacaggaagtgcgaggagggaggcagctcctgccctgggctggcacagcctgtgaagaggttggacgagtgtggcccagaagttgagaggaagtacccaggagcggcaactgagacctcagaggagtgtcccggctccggtgctggagtctcagctcggggcacccagacctctggggagggcactgtctggccctactgttctgtaaaataacactaagaatggtacctacatctcattgatttaactgagaattaaatgagataatatgtgtgaagcacttgagacagtgcttggcatgtaagcactcagatttgttctcacacaagttactacttgctgtggtttaggtgtgtgtcctctccacctctcatgttgaagtatcatccccagtgttggagggggggctggtggggggttttgggtcatgggggtggatccctgatgaatggctgggtgctcgtctcatgggaatgaatgagttttcactctgttagttctcattagtgctggttgttcraaagagcctggtgcctcctcccctctcccctcactgtgtgactgcctgctcccgctttgccctcttctgccatgaatggaagcttcctcaggccctcaccagaagcagaggccagctccgtgcttgtacaggatgtggaactatgggcccaaataaaacctcttctccctgtaaattagccagcctcaggtattcctttatagcaatgcaaagtgaattaatacactgctacttttgccactactgccaccacaaccaccggcatcaccgctgccaccaccaccatcaccatcactaccactgccatcaccagcaccaccatcactaccatcaccaccatcaccattatcaccatcgccaccatcaccatcatcaccaccaccctcactaccactacaccacaaccaccactctctccactgtgaccaccaaaaccaccatcaccactataaccaccacaaccaccactgtcacagggnnnnnnnnnnnnnnnnnnnnccaccaccaccaccaccattactgccatcctcacaagcaccatcaccatcactgctgctaccactaccaccatcactaccaccaccaccactgccactattgctattgccacagacaccaccactttgtagagttgtcatgaggattgaagttttgtgcatcagatgtctagccacttctctgcctaaggctaccacygtttgacttctaatggcatagattcatttcacctgcctttacttggtgtttgcactcatgttattcattcttgagatgagagtggtgagagtgaggtatataatggtgtagcattcgggtttcaatttgcttttccctgatgattggtgaagttgagcacttttccaatgttctggccactcgtatatcctcttttgtatgaggactttgcccttttttcccccattggttgtcttctctctctctgtctctatctctgtttctccctccccttccccatctctcctgacttggaggacttctttatgtatacccttggtgtgagctctttgttggacgcgtggcgtgaccatcctctcccatactatgatttgtttgcctttacctcttagtggtggctttggatgaacagaaattcttaactttaatgtggttcatttaatcattttttcttttaaaaatgttgtttatttgtgtcttattttaaaaactttgtatagtctttgagaaatttaatgatactaccttaatttcatgctttcctacccaccctccttttgggaccaatttgggtgaggtagaaagtgcttctctggcataaaatccttcatctggtactctgaacttaattaattggttatagagtttggttgatacttgaacaagcaagctaatattgaatwacagaaaattacagtctacrtggcaaacttttctcacatctcctgtaattyaacttgccctcccagcttagcaactggaaaacattttttccttacctcaaataaactctgtggtaatcgtgtgcccattattcattacaaaatccccctttctttctgaagcaaaagtcttcacctgcttctgtcttcagaaatccatgagtggctgctgtcgccctggcccccgcggccctstgtggcccagcctctgccccatgcttggcttcatctatggccacctctcctcttcagctggagtcgcattgctgtcaggagctaattttggcttcctggatgctcctgccatctgccatagacacaccctttcctccccgggcacgccatgctgacttctcccacccctcctgcctcctcagctccggagcatttatcctctgggctctggcttggctgccctttctggaaagcctgcctaagcctgggctcctgggtctcctttgctgcctcaggctgctctgacttagtgccacaggaggtcttgccactgtgtatggtgatggcttctttattggtctctttctctaatcagggtatggtctctccaaggcagtgactgggttttctcttctatttccagggcctggcacatagcaggtgctcagtaccgagtaattggtgacggaaagacatttggtggcatggccctatcagccgcatttcgagaatgaggctgatgggagcatgcctttctctcctgttggctgagtggaggacgtagacaagcgtgtgggaaccactgtgcrattttgaatgtgcggcacggctctgccttagatgctcccctctccacgcctgctctgtgcaggtcactgcctctgctgctctaccttagacaccgcccccttcccggagaggccttcctctgcttcttggtcatctgaggtctcatctcaaggtccagcttctgtcccacctttctaggctaccttagcctttggtgtttctctttttttttttgagatggagtctcgctctgttgcccaggctggagtgcagtggcgtggtcttggcttgctgcaacctccgcctcccaggttcaagagattctcctgcctcagcctcctgagtaactgggattacaggtgcctgccaccatgcctggctaattttttgtatttttagtagagatgtactttcaccaagttggccaggctggtcttgaactcctgacctcaagtgatccatccaccttggccttccaaagtgctgggattacaggcacgagcgaccgtgcccgaccatccttggtgttccttatgtctctgacttcatctggaacttgttctgtatcaaccatcattccatcctcaaacttttattataagaatactgaaccatgcagaagagttgaaagaattttatagcaaacacttacatacaaaccatcctaggtactgtaatgaacattttgttatatttgccttattacatnnnnnnnnnnnnnnnnnnnntattacatatctatccagcctcctatccatcctttaatccatcttatttatttatttatttatttatttatttattttattttattttttgagacagagtcttgctctgtcacccaggctggagtgcagtggtgcgatcttggctcactgcaaactccgcctcccgggttcacgccattctcctgcctcagcctcccgagtagctgggactccaggcacctgccaccacgcccagctaattttttgtatttttagtagagacagggtttcaccgtgttagccaggatggtcttgatctcctgacctcgtgatctgcccgcctcagtctcccaaagtgctgggattacaggcatgagccactgcacctggccaaatccatcttatttttttttaatgcagtttaaagtaagttgcagttttcagtatattttacccctaaatgctgtagcacatgtaccattaactagagttcacttttttttggtaaaatacatgtacagtgacatgtgcaaatctcgtgtaccatttagtgaggtttagaaatacatggatctgtctaacgcaaacccttatcaggatatagaacgtttccgccaccccagaaaattcccacatgttccttcccagccaatccctgccccagccccggggcaagccacactttccatttacctggtcggcctagagagcacttccaagcgttgatgtagaaggtggggagcactgtggcagcgggacagaattccaagggagatgcttttggcggtggttcatgccgagaccgtcaacatggtcgtcttctctccccagccctcaagtgtagtcacccgtcatgccttgcctacacttcgtctgtctttgttattgtgtggttttctgtggttctctccagtcgggtccccagtcagtctgaggatgcgcagggcacatagggccaccctggctttatgcacagggaaagtgaaagcagaagaggtgggtggccagcctcargtcacaggtcagctgcacgaggagccggcataaaaacaaaggcctcctccttcccagctcttgtgactttacctgtaatcatgataaacgtaaatagacggcatggtagagccattttcaaagcaacagggttacacgtgaaaaatgaaagctatcattcttttttaattcttgttccaagctgcggtacatttacatgtggaattacatnnnnnnnnnnnnnnnnnnnnnnnnnnnnnnnnnnnnnnnnnnnnnnnnnnnnnnnnnnnnnnnnnnnnnnnnnnnnnnnnnnnnnnnnnnnnnnnnnnnnnnnnnnnnnnnnnnnnnnnnnnnnnnnnnnnnnnnnnnnnnnnnnnnnnnnnnnnnnnnnnnnnnnnnnnnnnnnnnnnnnnnnnnnnnnnnnnnnnnnnnnnnnnnnnnnnnnnnnnnnnnnnnnnnnngagacagcataggacttggttgtggattgatttttatttttaagttatccttattctgagcccattgagcttagcttctttaactgtctctaaaatgtctgctgtataaaattttgccacacgagatgaaaaacccccttctttgggttcccatatgattctctttgtactttgatagagttattttatatctcagtactacgaatagcttttactcagctgggttggtgggtggctcacgcctgtaattccagcactttgggaggccgaggcaggtggatcacaaggccaggagttcaagaccagcctggccaatatggtgaaaccccatctctactaaaaaatacaaaaattggctgtgcttggtggtgggcacctgtaatcccagctacttgagaggctgaggcaggagaatcgcttgaacccaggaggcagaggttgctgtgagctgagatcgtgccattgcactgcagcctgggtgacagagtgagactccatctcaaacaacaacaacaacaacaacgaaaaaccccaaaagaatagcttttactcttagcgctctccacataccaggtgagtggtacttcatggagttttttctgatgaaataatcacaccaagtgtaagaggtctttttgggtgggcggtggtggtcgtctgtttatttcactgctgcatccttagcagctaagaactaagagcaatgcttgccgcatagtgagtgcttacgtagtattgacactcttacccgctgcatagggttgtggtgagcgtgaaatgttaacgcaggatggggaaagctcttgggacaacgtcgagcttgtttgctttacagatagcagttgttcttggtgtgtgcatcatttctgcagaccacgtttgcatgccggtgcctggtgcctgcaggagcctgcctgtggaccctacaaattgtccttccccttttccttttccttccatccctgacacctgggaggcaccaagagtcccatgaggggccccctctagtctctgcacacatcttcactccctcagaataaaccgctttttcttcagacatcaatcttcagataaagaagtttcttgctttgttttctcctctcatcttcgctttcctgacttattttaattcttactattacagactccctttaaaatcccctgcattttaagtttatggtaaagatccatgatattaagggtcagacagacctttgtgggtctctcaggggtctagactgtcgttggggcttttatggggtgagtgtgtccctgtgttcacaaattcctaacacagagatgagtgggtttttttttgttgttgttgagatggagtctcgctctgtcgcccaggctggagtgcagtggcgcgatctcggctcactgcaagctccgcctcccgggttcacaccattctcctgcctcagcctcccgagtagctgggactacaggcacccaccaccacgcccggctaatgtttttgtattttttagtagagatgggttttcaccatgttagccaggatggtctctgtctcctgacctcgtaatccacccgccttggcctcccaaagtgctgggattacaggcatgagccactgcacccggccacagagatgagtgtttataacccaccccatttctggacaaggagggtctagcgatgtcatgtaattcttctagtttgaattcacgtgtaagcaagttttttttttttttgtcttgttagacagagtctcactctgtcgcccaggctggagtgcagtggtacaacctcggctcactgcaacctccacctcccaggtttaagcgattctcctgccttagcgttccgagtagctgggactccaggtatgagccaccacacccggctaatttttttcttttgtatttttagtagaggcaragtttcaccatgttggccaggctggtcttgaactcctaagcccaaatactctgtccgcctcagcctcccaaagtcctgtattacaggcgtgacccaccatgcctggccacttgtaagcaagtttttatgtgtagattgtgaaagaggtgaactcttgcttttgcttagtcatagatttcattgtaataaagctgaaattaagaaacattgactatattagcttttccagaaatgttcacagatatgtgtatatgagtgtgatacaaatagaaacatatacatacctgtatacataaatgcacgttcacaccgcttaatttcttcattcttctgtttaatattttaacaaaaaatgatggctccgtattgttataattaaaaattcataaatgttttgaggcgagattctctttattgcttttctcatgaatgttgtaccacagcatccctggagttaggagctaatattaatggcttcttacatgtctcaagttcacagcggcagtaattcctctgttattatcaacgtaaagtaaccaatttcacctgatagcccttacctaaatgctagcatttaaataatgactattatttctgaaatgaaatttcacaggggaaagaaattggtgacagatgttccactgttaatcgatggctctcttgttattcctgcagcatattactgtgtaggattctgcagagccccttcagacacccagttctgtgccacaggaaggatggggaaaacaggcccacttttgaggtgcaaacacatattaaatcggacgaccaagctattcagctttccatagtgctgtggctatagaaaaatcatctctgcactgtgaatttcctctcttatttcttagctataaataccttggttgkttggcatcagaggggaataagctgttcccatgtgtgtggatttgcttgttatttgaatacgtcactcttaagctacagaacttaatacacaaataagcagtgtggttagacatcttctgagcataccttatgcttggaaatagtagcattctgaaggtgggactttgaacattcttcagttactggcctgggcgcggcctggggtggcagcgtcgaatctcttgcactstgctgcttctgtgtatgtggaataggccggcctgttgccctcctggtttctgtgtggttttcctctccctttcgtgggtgttgctgttgctcgttgcctctgtcgctkcgggttgtccagcacagtctctgttcagctggcgtgatgacgagaacacgggttttggcgtctcgtattgtttagctttatgacttgtcttgagcaagttgactgagtgctggaggcttggtgttctcgtctggatacttaccaggatccagtccctctctcacgtggtcatcccagaacacacgctcctgtctctggaggacctaacacagtgcttagcacagggtgggtggggtaggagtagctgtttagttgcagtcccaagactgatggtttggcttccttggtctgccagggcctggaaaaccagaacatccaaattgttaaggctgacttgaaataagcaaaggcatgccccgcttgaggaagtcaggtgcctttgtctacatttcctgggtccatctctctctctcccctgccctcccmctccgctctctctctctctcccttccccctccccctcctctctctctcttctttcccccgccccgttttttttctaggatgattcagaaactgtcttagctttccccttgttctcagactttctgggatggtgaaatgtaacaattccccgggtgaataaaggtatactttcattaaaaccatagcaaatccaaaccagaagccatttagtagagtcagcataaggcctgctcataacacatggaaggaagccgggaaagcaagagtgtaagaagcaccttgggaggccatggggagcaccygggaaaggcaagagtgcgagaagcaccttgggaggccacaggcagcgctgacrgggaggagacgattggctcctgctgacaaagggaaacctgttactcgtgcaattctcaggacccgaggggttcggtaatgagctggctgaagtgccatatgagagctacccaccctgctgggctttctaactttctggtctggtctgtttccgaggtgcttttattaggctatttttacataattcttttcttaaaaataatcacggcaaggcagggcaaaattttagaaatcagtctcggagaaaagtggcttctacttcttggtattgtyatagagtggagtgtcttggggagcgggggaaaggattcagttcctctgatctctgcttcagttttcacatcaagtcccacttgcatatctcggcgtggacagaggtagagatggagctgaggacagctgcagcagccggctccgggtagccaggccagcagactagtcggaagcctctaggtcaggcctccctcaattttcaagttacttatgatggtcaacgttataatatttaggatcagatggacttttgttagagtcctggctttgccacctactggctgggtgacctggaccaagttwcttgtrtctgtgaccattgtcccctcctagtggagctggcactccatggctcttctggttgttatactacatgcaaggcacttaatacagtacctggcattagttagagcttggtaaatcctagttcctcctgtaaggtactgttatctttgatgctgctgccattgtcaccttataaaaatgtcaactcatttgtcacctttctaaaacatgttgaaattattttcctatccctagtttcttagcccagcgttcagggaaatccatcccatggctggctgcccacctttttccttccctttctttcttgcacatttccccagtacccactgtgcttcaggtgttgtgccttggggagcaggaccacagtcatccctgtcctcccggagctctgagagtaatgggaggctcaatggtaaacaggtgcaaggtgtcccgtgatagcagtgggcagggcgggggcagcagagggatcgtcctctctgctcttttttggagtggttgctccctctggtgctcacctgtctgtcttcatggctgccagctgctcttgcctttgctggactcctcagcagcccgtactgagcacttcctacatggtggccatcgtatcgggcactggggacaccgggctgagtgctaccgagggctctgccctggggagtgcagaatgttctgccacagcccttgtgctgcagctgtctttgaacacacttttatgtatttggaactttgctcactcccagatgtcctctgtgcatccccaagtctgtccctcatttgcagttccgtccactgccacctcctgaaagctttcccgagcccttcaagtagaattaattatgccacttctaccgtccattgccttgcttatattctgttacaataacacttacctcacttggctttgtattattcaacaatcaaacatttacatcacattgacatgccagtcaccgtgcaggcacatgaataatgcatgaaccctgtcctgagagctcacggctcagtgtaggaggcagacatgtgcactgaattgaactgaattccgactgcacatcctgtattatttctactgcatgttgactaaccacagtgagtgaatttactggtgtgtctcctagaaagacattgaaattcctgaatgactaaaagtcattcaacttgctgcccccccccaccgtatacacaattgcagcggctttctggtacggttcagcattttacacatttctagggtcacgctgggagaagtttacaaaataagctgatcttaagacaaagtgaaatgccttttaatcagttctgtgagacctgtcatgttcaacgcctcgggagcatggatgggaaataaagaactcagggagggctgaggggatgaaggtgtctggcctgccacttgggagctcctgaaaatcaaactcccacttagttgtttggggtctttggtatgtcacgtctctgtaaaaaaaaatgaggaaaaaagtgcacttcttaaaatagaactacagcatgatttcacaggctttcaggattaagccagtgaacttactaaggggtaggttgtagagcagagtgttgaatcctggctatacccacttctgcatggcctgagtagcttccctaaaatgggtgtgatagcaggacctattcagagaatcagtgtgtggatttaatgagacaatagacgtacaggtcttagtacctgttttacgggagtactccatagagcttagatggctggtgatggtgatttaagtaacagtaactagtatgctaaatgtttgtctcctcccccttctcttccttccaggttgtgttgggcaggtggtatttctttagtttcatgtctccattacaagccactcctcctgatctgggtgtctgacgcatcctgcagccatgactatggggaagcctggtgggcgggcattcacagtccattttgacagggttcgtctctcagttgaagcacgtttaagaaaagaaaagccatcccaacaggcaagaatagtgctataattatagtttttgaatttagttgtacactcctgataygctagactgagagctgaaagaatgagatattttatagaggtctgggaccctagcaggttcaccttttacttccagctactaggacagcaagtcttatttcagttatatgctaccctggcttgggcaattaattcagcaagcagttgttgaacctgttctatgtgtaatggtattataaactttacagaaattttcagatagagagaagcctgatctctcatctggtcccagctttcaggggcttctcctgtagccccgataccatttcttcctacaatcagagacaacctccccagagggcaggggctacatcttctttatctctgtccccagaacctagcatagcgcctgccatgaggatattttaaggctgtgcagtaagtgtccattgaatgaatgaaatgggcagcaatagaatgtaaaaaccaagtctcatcacagtgctgcagagcagacagaggactttcatgcacatgacctaggcgggttctgtgtgccaggtgccgcagaaagtccttatgctgtctcattctgtctccacatcacctctaacatggtctccatgtactgacagggcgtcttgggatgacagaggacatgtgactgcccatgttcaaagagctrgtaagatggcagtattaggacccagattcacgtgtgtctgaccckagagctcatgtgcttggccattatattttcttttctgccatatcttttcaaagtactctctcccttcaccttcatgagcctctccttgtgtgtgctttccgcctggtgatgatgctggttgggttcatgggttcagataaggggtgagaggcagattggtctttgccagtgctggatctgactcttggttctgttacttattagctgttgggctttgggtaagttgcttaaactctctgacttttagttgcctctttaatacacatgtggacaatgtagctgtaatgtgaagtcagaagataggacttaatagatggttgtttsagttattgtcttgtgttctccttcctccttcctccagagtggcccttccatgctatgttagcacaggtagtagaaaggagaggtagaacttacctaattagtttgcactagtggttttcattagcctgggcaaattttttctaggcatttgatcaccttccaatttgcatggctgcgacagagttcatccaccacctcagagaactttattcagctggcagagttgagtctggggacttcaacagtgataaacatgccccatttgattgttgtccttctcaccagttcacatgattccctggccctcttgtaggacaccatagaaagcatcaccattggctcagaacccacttcactctcgagccacgggccttagcaagatcagtcttgcacgtggatttgcaggccagatccgtggggcttctctctatactaaattggagggtggtggtagggtggtgagcttcgactcgagtgaaatgttagcatggttttatatccgtgcatgtgtgtgtataggtgtgagcgtgtatatgtttgtttataaaagcgtaatgtatacttatcgtcaaaaattcaaaaaaatataaaacaatttgaaactacccatgatctcatgactcaaggacaaccaataagagcagataggcaggtcttcgttttctttttcgatgtcagtgttttcatgtagttggaattaatcgtatattcactgtggtattccgcttttttcacatagctcttttccgtctgttctaagcgtgatgtctgggcacacgtgtgtgttctgcctcatgcactgttgagtgcctgctggtggccaggccctgtgagccattgcatgggaaggggtgctgatggcagctaaccctaacgtgcactcactgaatgccagggacagggttagacactctcaggaatcacttcgtccacacagctctgataaagggttgtgaagattgtccggttaggagaaggaaactggggcttgaggagtgggaggaataactagcattggttgagtacttattctaagctgggcactattgtaagcatttgacttccgtcaacttgttgattctgcatgacgacccattttatagatgagtaaactaagatacacagaactttggtaacttatcgaaggatagccggccggagccaggatctgaacccagggccctttgtcctgaagctggggtttgtaactagcacacaccctgcctcccaaggtggtgaggttcaaaggcaaggtctggtccctgccttccgtttttgaccgtttggtggaagaatgagctgcttggtacctggatggtgttccactagaggcgtgtgtgttggagcccagagcagtgatgtgggatgggaaggcatcacaggaaaggagcctccaagttggcttgtgaaggacgcatagagtttctgtatttgggaaagtgagcggggcattcctggcagagggagtggtgtgtgcaggcgggtaactagggcacaggggtgaagagcggggaaggagagcagccgtgagaggggattcctgggtgcccatcccacgatgttgctgttatgtgccattgcagccggagatgagcctgagagccctctgctgcttcctccgcggggtgggctgagctgccacagggcaggacccaaaggggcggctggttcttggggcccgtgtttcagaaatggtctgacaggacacttgggaggggaggctsttacagggcctcagtatctcagctgtattggcggttcacggggaggttggccaggacccctgcagccctgggataggccatttaaagaagttggcacacacttccaatgttcttgaggccttgggccctggcccccagcaagcaggccccattggttttctgcactggtttcatgtggcctggcctctcttatcccattctatcctgaattgattgactggatcgaaaaagaaagacaaaatgccatttatgaatctactgggtgcatatttatataatgttaagttcctgggtcatcaggaggatcttggtgctgtaaatggtttggaagggaaagcgatagcttccattttggggtcaggtgctggcaaaacccctagagaatgtatctagcaggcggtttgaatttctggagtgcagtttaggtgagagatcaggaaaatttgtaaagtttaattgtgtttccagactaggttagtgccatgtgcttcaagaacaaaagaattatcagcaaacatctaaaatctttatgttctatagattattatagaggaagaagatggcaacagccgtgtgtgtgaggagttttgagtgaaatgtcaaatccattacttgtgccagggagcgtgtgaacgcggagaacaagtccagaattagtcgcacagggtcaccctccctcttttgaacctgcccaagccctcctgctccctcaggccgtgtctgaatggcggtctctccggggagtttctctggccctccagacttgtctgtcgtgtgctgtcgtgtacccaagacagactgacctggtcatgacatactttgttgtcttgtgtctagttttctgcctaatttctgcctcctctgtcagaccatgagccctgggagagcggtcactggcctgtttgcccactggtgtgtttttttgtgcttgctacagagcttgacacacaggagacactcaataaatatttatctgaagaatgactacttactttgccaaaggacagtgatgcagttctcctcacatgcacatcccagtgagagctacaaacagaaagatcagctcacacagttgggtgcagagtgctggagcctgtcctggaggcatgtgcaggtgtttgcaggcatggcgggagggcttccagcctaagaacaagggctgggatggttgcatatctgagtagataccctggacctgggtattaaaaagctctagaaaatccagccaggcagagaaggtaggggaagacatttccagtagtaggcacacgatggggcagagttctggacttaagaaagcattcggcatattcagggaccccccatgctaggagtctattggaggtgtcaccagatgtcaacttctgaaaggacgtgtgcttctttcctccctcccctgtgcgctcgcatggcacggggtcctttttcccactcctgggctcctgtctggggaggcttcttttcaaaccaaggtgggtctaaagtagtgtcgtcaggatggcacctccgagtgccattggaggagaagtagaaggaaggtggacaggttggctcagcgcagaagaggcccaggccagtgccagcactgctgcgtggagaagaggcagcaactgcgttctgagctgccagaggactgaggcacggtgaatgggtgtgagggccagggttcacctcttgactctgggacatcctagctttgtacccttaggaaagctgcttgatctctctgaactctagtttgctcattcatatgatgtggataatgctggcatatggagattttgggaggagctaagggtatgctgtaagctaactactctgcactatggcggagactcatgcctcctctggccttagcatatgaacttcagacagtgcctggcacagagggagagctcagacacctgaacacttactgggactgttctgtaatggaagtagcaggaagtagtagacatggaaggctacgagcccccatcattggtggtggtgttcttgccaaacctgaataattataagagcaaacacttaactgagactcactgggcaccgtgccctgtcctaagtactctatatgttttaaacccgctaaccctcacagcagccctagaaagtaggtacaggtatttctccctgctttacttgtaaaagaaggggaagctgagaccccagraaagtaacacagccaatggcaagctaggaaggtggggatctggggtttgaacccaggcctgtagtttcagttgtgtttaaccacagcttctgcagctgcccacagaygtgtcggcacctacagaagagcacagtggaaaggaactccagcgtcttgtgggagggtagattctcagaatacacatagaatggcaaccaagcggaagcaggtgggcctgcccgggggtcctgcgtggaggaggtcacatcgagtaggcagagaactggcatggcttgagagagcaggtgggaaggaagaaagtcagttaccttccttactaatgagccaagatgtcgtcagarcccttctgaaggagtgggaagaaagctgcgacccaattgatgatgtgattttgtgtcagactctccttttccttctgctttctcacctgtaagatggctttgaagttcttttcccatttggagacagatctttgttctttctctgactgagtgacttaccgtctaaaggataaatcatatatgtgagtatccacacattcccctgagcagccaagggccaaatgttrtgtgttgaagcgggtttccagacagagaattcagtagcctgttgtcatcatgaaataccaaagcgaccagygttttgtaccctttgcccccaaagcttgactgaagtgtttagatttttatcctgtaattagagtggctataattggatatgattcactttctttgactttaggtgattcttgttgacccattccatctcccactttgagttttggataatactttcctccaattctccatttccctttcactaaattcctataagaatctcatccaacagccacagcttcttctgttttggggacggagtctcgctttgttgcccaggctggagtgtagtggcgcgaccttgactcactgcaacctccacctccctgggtcaagtgactctcatgccttgggctcctgaatagccaggactacaggtgtgcgccaccatgcccagctaatttttgtatttttagtagagacagggtttcaccctgttgcccaggctggcctcgaacgcctggcctcaggtgatctgcccgccttggcctcccaaagtgctgggattacaggtgtgagtcactgcgcccggtccacagcttctcraaaycatctgaatgtagggattcattcctcagactgtcgttaaagttgactttccaggaaccagcctgctcaacgattccatcatccttttcccagccatctgtcttttcccagatcattctaaaatactgtgatagtatcagtttgcaaagcatctgaacaccatccaaggtggtggactgggtgatgctgaagggcagctaatatttatcaaacatgtataatatgccaagtcttccactgacagctgaatgacctgttacatatgctaacctccttccatgatttcactggttgttgggaggattaagtgaggtaacacgtggagtgtctggcacatttgaggtgttctgtgaatgactaagtaaataaatgaatgtgatgtggtttctaaacacttttcaaggacgctgtcccctggatctgtctctctgtgttagtatccttctttaaggaaacatggagacrtaaacgccgtctgtcagacgtgctccagagggagcttggccagttctgcaggaccgtgccatggtcgagcacacctccggccaggaatatgtctgcttattttgcagctcagtttgtcctcrtgttctggagttagcacaccacgtatcttttttctttcatggggattttggtcaagctctccgtcttcccctgagctcctgtgaggttcacttctgggtcttccgaccaggactttacatttgaacttcaccatgaaatgtcttcatgcaggaagtgaatgtgactttggaatcatttggatctaggmttctagacygattccatagttggtgaccatggataagttacttcatctctctaaaaccgtctccttattcagaccraagacgttcagcataaaaaactggttcccagaaaggggatagtgggaaaacagcaagtcgctcctgcctcctaggctggaggggcaccaggaggaggacctttgcagagcctggaagctgggcccttcctgggaggaggagggccccgtgctcatggcttcctgtcccctgtgttggtcaggagggtttcttgttctaccatgtggggacagccagagacctagcatgtgcacagggcatgtgcacctgacagcagttcattggtcacagacactcacagctggggaaggaggataccatgccacgtagggccatgtgggctgcactcaggaacagagagagcagctgcccaggggctgggggaggcgggctttggggtatggagagggagggctgcccccggctccccagggaggatgtgactggcttatttcagtcccttccaggctggcagggaactgacacccactgcccaggatacacagggctgcacctgctttccgcacctggaaacctgcctggctgagggaccctgtatctgcaggagcagagtcaggaggggacttgtggtgaggccgtttggggccctcccagttttgccggatgtcaaggcagcatatcatactgtgcctgggttttaggaactggagccgtggagagacgcagctacttcagcgggcaccagcagtggcctccccatgtccccttcctgtcccccttcctcccgtgttgcctgaggttcttacagtgctgtggtcttcttggtgcttttacagatagtactttattgaatctgtaaaataaccctgtggtgcagtaattgttatccccattttacacacgaagaaaccttgactccaagggatcattattctccatggcactcgagttagtcagtgtcaaaaaggcaccaaagtcaaggccatgtgactctaacattcaagactttttattaaagaccatggtgtatttgccagaaagcaagggaaacacctctccccggaggcccttcccaaggtgccgtccttaattctttgatttgatgttttttttttyttttgagatggagtcttgctctgttgcccaggctggagtgcagtggcatgatcttggctcattgcaacctctgcctgccgggttcaagcgattctcctgcctcagcctcccgagtagctgggattacagaggcgcgctgccacactggctaaattttgtatttttttgtagagatggggtttcaccatgttgtccaggctggactggaactcctgatctcaagtgattcaccctgcctcagcctttcaaagtgctgggattataagtgtgagccacagcgtccygcttgggttttgattttttattctctttttgtgaagaggtgtctcatattaaatatacactttccctactacacttggatctgtttctctttaaggtgatataatacagaaaatattcattgtggagaaatttagtttaactctgatttagtttataakagcaaaacrgcatttatttggtcaatgagaaggagttgctcactaaggcgtcaagatggcttggcttgagctcggtgcctctagagatgagcagttcttcctcctccctgtgcctccttcataaacaggggtgattgccttgcaacacttcttggttctggaatgttcttgtcactttgatcttacacattttaaaagctcttctttttccttggcttttgagaatgcatcagaattttctaggggattkgtaagtcccatactgcctcagttacagcatcctcatcactgtcattgttattattacagaaaaattgtatggygacttcttgagctggaagctagaggaaacccttgcccagttccctttgcagcctgggaaggtggccacgttcacaatcaacatcaaagtgaagctggatttctcctgccaggagaatctcctgcaggatctcagtgatggtaagcrctttcctaattttaattagcacgtcagggtcctagatactgtgtagcaacccccatcccttgatgcctgctgtttgctgtttgtaactcacttgtcattcattaactcaagctgcctgagacatctcctgggcactttgttaacagagtgtgttactgtatgtgtctgaaagtaataaaagtactttttatctaaatgatttaattctcactctttattattttgtactcatttaccagcaggtcattctaaattagtggaatgtaggaattactgcgttttttcaagtataactgctgtgattctttagacatctaattagctgtgatgataaagttttccttcaaagtctgatgatatctataaggaggtggagtgtggaagaaatggaaatttatatttgttgtaacattaggactgattagagataagatttcatagattggctgggtgtgatggctcacacctataatctcagcactctgggaggccagggcgggcggatcacctgaggccaggactttcagaccagcctggacaacatggtgaaatcctgtctctattaacaatacaaaaattcgtcgggcatggtggcgcatgcctgtaatcccagctactcaggaggctgagggcaggagaatcgcttgaacctgggaggcggaggttgcagtgagtcgagatcacgccactgcactccagcctgggcaacacagtgagactccatctcaaaaaaaaaaaaaagatttcataaattaattatgccaaattatgaagcattcatttggaggcagtgtggagtctttcagtcaactcaggctcccctaacaaaataccacagacagaacagcttaaacaaccaagatttatttcctcatagctctggagactgggagtctgagatcagactgtcagccgtggtgattttctggtgagggagggccctcttcctggcttgcagatggccaccttcgtgctgcgtctccacgtggaggagagagggagctctggtgtccaccccttcttacaagggcactcatctcatagagggggctccatctccattgcttcatctaaccctaattacctcccaaaggccccacctcctaaagctgtcccactgggggataggccttcagtagatgcagctggggaagggggacgcasctcagtccctaacagacgccctccatagagtttgctgtctgcaccctctgcagttcaaatagtcagcatgagcttcttgtatagtgctggtatttggtaaaatattctttttatattattaacaaatgtagaaaaacagatttagggttggatacattagaaaatgaaaaaagttgagaggatttcaaattataccaagacttaaaaatgtctgatgacacggatttttttggttggtgtgtaaacggctttatcccgctgaactgcattttttctttttaatcagtagacagagggttacataggttctgacttcttcttcccaagaagggggtttggcagaataaatggtgcccagcacctgcccctggaacacttgggactggatattaccccagggctatgtcttggcacgtggactccaggctagcagtgagggaatggtgaccgtggtttctcccatggcctgccagggtcgtcttattcctgaggaacagtgtggaaggcttccatgtggaaggcttggctttttgtgcttggttgtttgaatttgcatgttcagtgcagacctattttgtcctgttatgactgtgcttctgccttttgttatagaggggactagggcagtctctctgcccttctaaggtcagagagaaaaattgagcaaaattgcaatttgggacttgtagcctgggaataccttcttctatcttttaaaacaaaaccaaatcaggcctygaattatggtcaccaggtggtttgtaaatgtgaggctggcctgattgctggtcatggcacgtagtggttactcatgagatgccccctttattaataacagttaatagaagctctggctggttgtttacatagtatgtggcagaaagagacagcaaatctctaaggtaagttttaccttagaaaaaccaggaaaccaggtcaagttttatggaggaaaaggtaggcacgaagaaccacccagagcttggtccatggaggctgccttgttacgtgcagttcagtctgaggaagcacgagacaatcacggcgcccttatgtgaagtggctgtgaactcagtggcagaggctcatttgtggcctctgggaactgggagacgaccccctgtagctcacagtctaacattctcagagacatctaatgggggaccacgtgtggatccaatttgattctcaggcatggactcgcattaattatggttactgaagttaaatgacgcttaaaaaattcacagcaacctggatagctgttgcacaaaccgggatcctggattcagtgtcggccatagatagctggaagataattaatgtttactgagcattgtcacatgttgtgtataaagactgggctagccactttttttctggcattatttctatttaatctttgtaaaaactctataaagtaaatgttgtaattcccattttataaacgcaagtgggaagaatgttctagattaaaggagattgaagagctgtaacaatcaaatgccgtgcatgatccttaattgtatcctggatttaaaaaagaagactttgttttgggacaattgaagaaattgaatactataatattattgtatcaatgacaaatatatcragtatgataatgaaattgaaattgtagcagaaaattcttgttcttaggaaataaatgcagaagcatttaagagtgaaagatcaggccaggcacggtggctcaygcctgtaatcccagcactttgggaggccgaggtgggcggatcacgaggtcaggagattgagaccatcctggctaacatggtgaaaccccgtctctactaaaaatacaaaaacaaaaattagccgggcgtggtggcgggtgcctgtagtcccagctacttgggaggctgaggtgggagaatggcgtgaacccgggaggcggagcttgcagtgagccgagatcgcgccactgccctccagcctgggtgacagagcgagactccatctcaaaaaaaaaaaaaaaaaaaaaraagagtgaaagatgatttgcctgcacttactttaatagggtgaaggaaaaaaaatacagtgtgaatgtgaatctagagagaaataaagtaaaaatgtcaaattattaaaaagaagtgtctttaactatttacaataccaaatatgtggaatcgacctaagtggccatcagtagtgaattggataaagaaaatgtggtacatatacaccctggaagactatgcagccatagaacagaatgaaatcatggcctttgcagcaacrtggatgcatctggaagccattatcctaaaccaatgaatgcaggaatagaaaagcaaatacagcatattctcacatataagtgggaggtatgcattgagtcctcacagacataaaggtggcagcaacagacacggrggctactcgagaaggcagggagtgaggrgtcagggakggaaaaaccagttgttgggyagcacgctcactgtccggatgacagaatcactcatttcccaaacctcagcatcacacagtatactcatgtaacaaacctgaacacgtacccgctaaatctaaaataaaagttgaaattacaaaaaaaagttggctttagataaagagatatagatcttcatttcttgtracttttctgtaggctcgatatttttcaaaatagtaacaagaaaaagattttgtagagcactgtttggatgtattattttgatttctaagtgaattttagaaattgtttctaaatgaaacatcagaaagcaaattatttaccttatcttcaaattcttggcagatatctatcttcttcatataactagcctagggtaagagaagtcaacttttcacccacaaaatagtatattcttttcctatgatccttataatacttgaaatctctgatttcttggaattttatgtttaaaattagaagtcctggaagatggtggcaaactgtcttaggttttgaatatatgaactattcagtcaaacagactgaacaactagaatagaaaaaccaaatacccataggcaaaaatatatagcaaaaccagttaccagagtatccccacggaccccaaaatrtaagtagatgyggacaaaccactaataacaacacggtttcaccgtctgcacaagaggaagcyggaaacacacacacccaggaatccccacacagccagcaggtactcattgggyagctcagtgggccaagttgagaacagcagctgaaatgtggaggagtttgtatgttccagtagcagatgagtgcaaataattcctctagaacaaagcctcacctgtggagaagctgctgggaacagaggtgggatagcagaagcaaggaaagagaagatctggctgaaactaggggaggagaacagagttaagtggtctagaaagtaatttcttatattcttgagtaccacccccaaacacagaatacagtgtgtagatttactagaattagaagagctatcctgaatcatttctcctaaacattcatgaaaactagtttcatgtaaagatggtcaacagaaaaggatcatggccaaactctatgcagagtgattctagtgaaaacataagcagcgagataacatagaagaacgtgctcagaagctgataaaaattacaaaaacccataatgagctaaaagacatgaagaagaagtacaaaagaataacataaatctgaatgagaaaaactcagagatgagatggatataactcaggaaagaatttgtaatagaataaatttttttttccagcattgtagtttctagtgagttatatatacctgccagatacattaagggaagcagaagatgaaaagagagaagaaaaaagaatcgagagaaagatgattaaagagaaagtgacacacttagaagctaggcaaagaagatctaacgtacatgcatgcatgcatacatatatacatacatatatctgctatgagacaccagagaaggaaacggaaacaatggaaccacaacatgttaaaaactataattcacagaaaactttctgtaattaaaaaaaaaaacccttgaaactgttgcatgaatgggtacactgtatacatgagaatcttgacttagaatgagcgggacatattctagttatattactggacttaaagtcttttgggcttttagacccagatagcaagtgatttatgaaataaagaaaatcagattatcattggactttttgacagcagcagtattccagaagccaatagaatagcatgtatctagactatgtctagctactcatgtaatgaaaatttaagccagagatttgtaggcacagccacactaacttttaggtatacagggcttagacaaattgttgtcaacacgcaagactggaagaattaaattctcatgatttcttgaggattctactagggaagcacagccaaagtaactagagagacgttgtcataaggacttgtggtgaacattaaacatatcgttgcttgtatagctaagaccaaatgagcattcaaagggagaagatagtatgtcatggtaatctgctcttacagtatccatcacaataatttaaaacatggggggagcatgggaagtcatatgcaaaagtaattttttttttttgagacaaagtctggctctatcgcccgggctagagtgcagtggcacgatctcagctcactgccacctcctcttcccgggttcaagtgattctcctgcctcagcctcccaagtagctgggactacatgcgtatgccaccacacctgggtaatttttgtatttttaggagagacggggtttcaccacgttggccaggctggtctcaaactcctgacctcaggtgatccgcccgcctcggcctcccaaagtgctgggcgattacaagtgtgagccaccatgcccggccccaaaagtaatttttaaactgttctctgtaattgttttggtagagatagtgttagtactcatattctgaaactaggtatcagtgtagggtaaagtaaatgattaattctgtgataatctcattctatcatctgaatctagttttgaactagggttctcatatggaagacaggaagtaactgatgtcagatatgaagttaagtaaaaaccttgtagtttagaatttgaataaaaaatagcaagaaatcatgaactatttgaaaagctatcaatctcctagccttgtacagtgtccgagtctagaaacggaccagtccagcagcagtgagcattcctaatgcccacctcctggtcttgaaacacactttctcactcagagaaaaataaccagttctagatgtggagcaggaaacagagcaggaaggtgatcttggaccatcttgtcaaacttgcagcaaaggagtgattagagagcattgaggttgtgttgaagggctccgcctgaagaagtgaccactggcaatttgagcatcagtaaagatgcgaactgtgtttcagtccatgagttctcaatgctacttgagagaattgttcgcccttggaaaatgatggggaagtgatttatcattttgaaaatggtaagcaatgagtatttattctgccttttcatgtagactgcgcgattggacgatctaataccagttgatgaggggagtctctctttatagaagtatttgggctaacaatggagataaggaggatagaattcggatatcatcattttgccatccctaatagattaatgagtcgagacagtaagcatccacataacaaaataagagacaaccacacattatgttcctcctgctgggagaacacagcaccttctgtgaattagcagtgtcccagaatcacacctgaggctgatcagcgctctggctctaactgctaatttacaggacttcagaaggcagaaaaacttgttaaactacaccacggggacacagttggcagtccagactccaggaaaccctgcagtccatgaattggttctctcaacaagtaaattatcagggggaaaaaggcatgaagttctggagatagatgatggtgatgattgtacaacagtgtgaatgtgcttaatgctgctgaccccgtacatttaaaaatggttaaagtggtaaactttaaattatgtgtattttacagmcacacacacacacacacacacacacaccacaaaacaaagagatgaaaaggctatctgtagtttaagagagagttaaatgacgcatttaaaaacaggcacagctaaactgtagtttcattgctgcatgcttacgtggtaaaatggcaaagagaagcaaggcagtgactagcacaaagtctgggtggtgggccctgtgggcgagggaggacgtcagcattgggatgggcaaatcgagggcttctagggggctggtaaaattctgcttctggacctgtgtcgtgttttctagggtgtttgcttcataataattcattaagtgatacctttatttttggtggttttgtcaatcagtgttgtatttcacaataaagtgttttttaaaagaagaggccaggcgcggtggctcgtgcctgtaatcccagcactttgggaggctgaggcgggtgaatcatggggtcaggagatcgagaccatcctggccaacatggtgaaaccccgtctctactaaaaatacaaaaattagcttggtgtggtggcgtgcaccttaatcccaggtactcgggaggctgaggcaggataatcgcttgaacccagaaagcagagattgcagtgagccgagattgcgccactgcactccagcctggtgtcagagcgaaactctgtctcaaaaaaaaaaaaaaaaaaaaaaaaaggaattggaaacaccttagtaataatacttctgcgtaacagacagctttgtcatctgatgagattgaaaaattattttatccaagaaggttttcatgaaggaattatccagaagatcgagccaggctgctgcacgtgccctctttgtctgagggacatgtttgagcacagggagctgtcgggaagattgataaattagtgttttgattttattgggattgatgtgtcacatgaaaactgcctttgggttgccgtttcttgacggtgggatgaaagcatcacctgctttggtttccttttcaattaattaattatttaatttggttttctttctctgtgtactttttggcttttggttttgtaagagaaatgtcaactttccctgctgacagtttctgttagacatgataattaactgtggcatttcagtttcagtatgggaaatagtgatccctagtatcacagaatgagacgagacggtagatgtcagctaatcaatttggttgacagaacaggaacctgagtcccaggaaggtggaatgatttgtctaaggcctcacacagcagcaccaggggccctgcctgctgcggagcttgtcctgctgttatccactccttccttccctttgggcagcggtccccaacctctttggcaccaaggaccagttttgtggaagacagtttttctgcggaccatggtggcaaggggatggttttgggttgaaactcttccacctcagatcatcaggcattagattctcataaggagcgtgcaacctagatccttggtgtgcacaggtcacaatagagtttgcactcctgtgagaacctgaggccgctgctgagctgacgggaggcagagctcaggctgmaaagctcgctaggctgccacccacctcctgctgtgcggctcagttcctaacaggccaccaggggttgcgggcccccgccttagggaacaaacagaacagtatttctaggtccatctttgtggtacctataaacttctggtttgctgggaagtgaatgtcacaattctggtggacaaatggagacttgcttttttcaaaaatggggatatgatagcagttcatgtaaggaatcttcctgtctttgtcagagaggagggtaatagagagtgggcggcaaacctggtcctttaagtcatctgctgcttttgtatcttgagaaggggacaggttgactttggtgagtagtgcccattttatcccatgaatttgaacaccatggggaaaatatgcttatctgtatcatagggctctcccactaaacattcattcatcaaaacacaggggcaagtgtgtgcctagtttcagctgttgtcaacatgccactttttttaaggcttttccccactcttgtatcccttcctctcagcacatggtctcttttcaaagatccacagaggccatcaggcagaaaccttctctgcttcccctctttcctctgggatacacttgtttttcccatctgtttcgttgtagaggaagatgggctcctcctctcatcagaggtgaatcgtctgacttgtgttccggatcaggtatcctttctctttggtcttttgaacttgcccttgtttttgtaggtcacggcccatggaccacctgcatcaaagtgtctttgctaaaacgcagattcctcggcccacccagctcttcgacatccctttctgtgggcgctgggctgcgatctgtgtttctgacccattctctggggggttctgcgcactaagctttgagcagttttgtaccagtccctcagccgatatgcccaaatcctcttctaaaccatgggtttctctctggctactccttactctttccccttcactttttcatccttcttgtacttttccgccattgaaatcaggcttttaacctccctccccctccgtggttgccacttactcatccttgggagacgccagtgactggccagtcctcctgtaggtggggagcttccctcccctggcccgtgccgtgccacactgactgttcccgactctgcttcactgctgcatccccagctatggatgttcctaacagttttgtccttaatacttaccatacactatatttttcctaaatgatttcacaggctctaacatgatggtaatgactctgaaatgtctatttccggtcttgaattccatgtcaatgtttttagctggcttcctgactttttcacctggcagccccgaaaacacctccagttcagcttgttcaaactctgatggattgtcattctctccagacgggctcacctttctgtgtttcctttggtggcaaaagccattatcatctgctgggaagtgccggcaagagtcctggggctgttgcagatggttctctcaccgctggagttccatccgttcttccccaaggctcatctgttctttctcttaaatatccctccatcttctctccctctttgccttggtacacatgccaaacacgttttatctgagccttcacgggagcctagttaactctttcgctgtcactagcctggccctcttgaatccatcttctggtgtgtcttacagttttctcaaaaacaaatgggctcctcactttggtgtctaagtctctatgtaatctggtcccagtctccctctctctctctctctctctctctctctgtctgcctcttcgtgttgctgggcccttgcatgccgtaccctggcctttgtgaaatgcccttcatctgtgctcttccctccacctggaatgtccgtctctctttttctgccaacccactcggcccctccctcctgcaagcccttgagtgtcccctccctccatgtcctgtggtggcagagctcgagctcatccttccctgagtctcccacgtagctgccgtgtgctctctcctttcccagtatgcagtgaggcctggtcagagcagcttcttggcatacgttaagcaagtgagggacggaaggcacgctgcgaaggctgccgagtgttccacaccctgagttcagagacgggagagctgtctggctgtgaggatctggtgttgctttctgaactctgaatgaagggtcttttaaaatctttttaattttaattttatttttttgagatggagtctcggactgttgccaggctggagtgcagtagcactatctcagctcactgcaacctctgcctcccgggcttaagcgattctcctgtctcagccttccgaatagctgggactacaggcgcacaccaccatgcccagctaatttttgtatttttagtagagacagggtttcaccatgttggccaggatagtcttgatcccttcacctcatgattcacccacctcagcctcccaaagtgctgggattacaggcgggtgccaccgcgcctggcccaatttttatttttgagatggagtctcactctgtctcccaggctggagtgcagtggtgtgatctcagctcactacaacttcctgggttcaagtgatctcctgggttcaagtgattctcctccctagtagctgggattacagggacacaccaccatgcccaactaatttttgtatttttagtagagacagggtttcatcatgttggacaggctggtctcaaactcctgacctcaggtgatctgcctgcctcggcctcctaaagtgctggaattacaggtgtgagccaccacacccggcctgaatggtctttgaacaggtcctgactaaagatgagctggatgccaccagcagggatgcaggtgacagggtggccctgaataaaggctggtctggacagcttagatgacccaggagcaggaggggatccccgtgggaatggcaggcccaggtaggctgtggaaggcctgaagttccagaagtaacttggacttcattgaaagatactggagagccgctgacaactttttaaaagaaggctggtatgatgggaaactctgttttaagaaggtgagtggggctgggtgcagtggctcacacctgtaatcccagtgatttgagaggcagaggtgggaggatcacttgagtccgggagttggaggccagtcagtgcaacaagaccccatctctacaaaaaattaagcaaaatgagctgggcttgggaggctgaggtgggaggattgcttgagcccaggagttccaggctgtagtgagctgtgtttgtgccactgcacgccaacctgggcgacagagtgagaccctgactcaaaaaataaaagaaggtaagttggctagatttgggagtgtcatctgagattcacctacctgtgtatggcaggcggtaagtgtaaccacccgaagttgaggcaggaaggtcttaaccaggagtgtgccaggtgagctggagagcaagaggcgatgtggacatgcagtggtaggggagatcccgtagcctgggggggtcagaattctccccagtcctcccctcggagcccctgcgcactgtcaccattggacgctgctgggtttgcattacacaatttagtagcaggtcaagtagtttcgtgagctcccattagaatctcttctgtcccccctagaaaaatgcagttctttttgcctgaaatgcctcatgtttatcaggcgaaagacaaactgcctgtgggaagttggaatcagttcagttctttgtgcagaactggagactagggtgaaaaaaaaacatgtctatttggcatttcattatatttggcttcttcacaatttaatgataacggatgcttccacttatcattgtggtcaggaattaattttattcgagagccatcgctcttgaacgcattatattcactttcataacttgccccttccccccttattgtactctgaaattgggacagttattcagtgtctttgtcctcatctgctactgctcttgaaaataaatactaatttttggaattcgtagtcttattttttaaagaacagtgactcatcctgaattacccagaattcaaagacaaaggtgattggaatcttaatgccataatatttctttttctctttgcaatttctatttgcctgagtttttcccacaaacgtgttactaagaagaaggccagggatttcatggaaacttgggttctttcctgaggccagagagcccaggggctggcgagagcagaggacctggcggagtgcacggtgtgttggtgtaggtgtccaggcgcctcccacgcatcccctccacggccgtgaggaggtggatgcggcctccgtgccagtgagtcccgagcaaagggaagcacacctgcactttggtccttctcactccaccaccctcatctcgcgggcagggccggagtcttacttgttttttgttcctagcgcctggtggctgcatcctcccccaatactcttgcttttcttactgcctcagaagcagctctctgtcccattcagttggagattcttccttttcctctttacctggaaacactggaactcccgagggccccatctgaggccctcttacactttgttcctaggctcggtctctccagacgtcctcatgtgctcatgcagctcagcgcccctccacccccagctgcccgcctgcctgtgggctcctgatttgagggggctgagggtggtgcgtctgggtggaggctggcgtggggcttccctccgtgccctcacactgctgccgtcttcgttgttcttccctctgctttgactccgtgaaacagaaagggaggctggcctggtgcccccaagccagctgctccaaggagcagctttctccggggcctgctccctcttcccagtgagctcctggtgggaagcccctatgtctgcagcgcccgggcccctccactcttgccagcccaccctagccttgggcagttcctgaaggttccagctgaagctttttgttgctttgcctggtgtttgctggagccccggcgtcagcacgggggtcgcgcttcccctgcaggggcctctctctccattccaggctagctgttttccccgtggccccagctctctgatcaggcagggaaagttaattttcagtatatccaactcttttacctcgtcacaagaggggcgcattgttgtttccagctctctacatcttcgagctgaaatcaattcacatcttacagtttaattcagatctgcaattattttcggattatgttggccatttgtcatattatgcgctacttttgttttgtgttcggtgggttatccgcctttgttctgaaggaaaaaggttaatgacgcgtcggacagcctgcccagcgttatatttagcccgtgccatctccccggagtctgactcataggcagtaatttcacagcgtggcggcgcagccgagggaaaggtcagcctgctcctgcttccctggagctctcaggagcaccttcctggtgctgggtctcctttggacactgaaagttttccaacacccgtaagctgaatatgccccagacatctgtctaataacctgtaagtgcacgtctccctagccactgttagcctgtaggtggggaggttgactcacttctttgatttaaatttgggttggaaaataacttcctaaactagcaggatagaatgaaaatccaggtgtttgtcattcatcagcaacaggtgatccccattgcaggcagccggaaccgacgtctcctggaccactgagctggctgttctcattactgccctttccgcccaggctggcggtgactcaccgtgagacaagtcagctaggtgttcaggacagggatttcagagtatttttgtccaaagaggaaagggatgatttctacggatcactaccagttggtttactgttagctcatcgtgttgatcacaccaagtcttgccaatttggttttctaagtattttcacgccttctcctcgtgtccgcgtcactgctctgattcaggcccttgtcatttctcatctttgccattttagtagtttttggattgggctcccggctgctaattttgtccccttttccactatcttccacattgtcaccgcagtcatgtttctaaggcagaatctcactgtgcccctcttctgttgggtgacttctggtggcatcccgtcaccctcaggacaacctttcctggggcctgcccgctctgctcttgctgctgcctcgctgtccccctcctccctcctgtggtttatattccaggaattctgaattagttgcaccgtgctctcatatttactgcaagaatagaccagtggttctccagcttttctgcactctggaatcacctgggggtctttaaaaaacactgcctggctcctagtcctaaatttggagatttaactggacttacagtttttcaaagcaccccaaaagattctaatgtgcagcaaagtttgggaaccactggtatagactgtcttctgcttgttttcttgaaaaactcttactcattctctgaatctcaaggcagttgttccaaattctgggtttctccaggcagacctagttgctgcttattctctgttccctgcgatgatgagttttgaggtctgatggggcaagtctccctactagatgattgttcaggagctttttggatgttctttgtctgatgatcttccacatcaattttattttatttattttttatatttttttgagatgaagtctcactgtttcgcctaggccagagtgcagtggcatgatctcggctcactgcaacctccacctcccaggctcaagtgattctcctgcctcagcctcctcagtagctgggactacatgcgtgtgtcaccacgctcagctaatttttttatttttaatagaggcggggtttcaccatgttggccaggctggtctcaaactcctgacctccggtgatccgccctccctggcctctcaatttctgggattacaggcatgagccaccacgcccagcccacatcaattttagaatcagtttgtcaagttcctcaaagcagtatgttagaatattgactgggactgcatcaaatctatagattaatttgggggagaagtgacgtgtttatggtggttagtcttcctatctatgaatattgtatgtctcttcatttatttttcattttaaatgtctttcaaaaatattgcctcatattctctataaaggtcccacagattttactagatttattccctgatattttttgttaagtggtgtttgaagtctttttttatggaagtgtaacttacatacagtaatgaacacaaatgttaagtttatagcttgatgaatttttatgttcatatgaatctatgtaaacacccagctcatgatataaataattttcagcaccctccagttctcttgagacctgtggcagtcaatagctgcccacaaagataattgtcaattatgacttctatcatcataaattagttttgtttttacttaaattccgtgtagaagaaataagtgactgggcactctggctcacgcctgcaatcccagcactttgggaagctggggtgggtggatcacttgaagccagaagttcgagaccagcctggccaacatggtgaatccccatctctgctaaaaatataaaaattagctgggcatggtggcacaygcttgtaatcccagctacttgggaggctgaggcaggagaatcgcttgagcctgggaggcggaggttgcagtgagccaagatcacgccacagcactccagcctgggtgacaaagtgagactctgtctcagaaaaaaaaaaaaaaaaaaaaggaaatacagtgtactttcttttgttttcttttttcctttggcctaaagtgtcacaactgtatactcttaatgtctccctgttagaagtctgaaatcagtgtctcttgtttttttccttcttcctccacatgatatctgagatgcatgcatattgtgtgttgcatttgttcttttttatggctggatggtattgcgtgaaaatactacagtttattcattatacttgtgatgaacatgtgggtggtttttacttttgggctgttatgaatgatgctgctatagacattcttgtgcatgtatttggtagacataagctcaggtttatgttggctttaatagatccatagccaaacagattttcaaagtggttcttgggatttctgtacatcccagcactatgtatgaactctctcttgctccagctcctcgccacccattggtattgtcagtgttttaaattacagctgttctggtctacatgtggtattgtctcactgtggtattaacttgcttttcccaagtagccagtgatgttgcacatctgttatatacttattatttggatatatacttttgtgaagtgtctattaaaatattttcttcatttttttattgggttatttaccttccaactgatttatagtagtactcaacatattttggatattagtccattgtcagctatgagtattgcacacattttagattctgtggctaggctttttactttcctgatgttgtcttttaatgaagagaatttatcaattttttaaattagatttcttaactaaaaattataaattttcagccaggcatggtggctcacgcctgtaatcccagcactttggaaggccaaggcaggtggatcacctgaggtcaggagttagagaccggcctgaccaacatggtgaaaccctatctctactaaaaatacaaaaaactagctgggcatggtggcaggcgcttgtaatcccagcctactcgggaggctgaggcaggagaattgcttgaactggggaggtggaggttgcagtgagccaagattgtgccattgcactccctcctgggcaacaagagtgaaactccaacgcagaaaaaaaaaattgtaaattttcttagatttcttaattgtattataattattttcctcttggttagcactaatttttgtttaggaaatctttacttacatcaaggtcatggaaatattatgttttcttctagagaatgtattgttttagtttttgcatttaggcctatgaaccatcttgaattaacttgtgtgtgtagtattgtgtggcacatattaagtactcacaagtatttgttgaatagagagcaggaattatagaagatttggaattatgtcatacggtcttaaattatggaagtaactaattcttaatgttctcttctaatcaggtaacaggacttacacaatttccttctttctgggtttttataaagtggggcacggtttagcaaagaaagcagtcatagttcttttttttctctgtcttcctcacaaatacttattgcatatctgttttattccatgcactctgctactcttgggagtgtctagattaaaataagacacagtctctgccctctaggagctcagcgtccagggtggcaccatccacagaactttctgtactggagggaatggcctgtgcagtactgtccaccatggcagccaccagccacatgtggccttggtcacttgagacatggatggtatatctaaagcagcagtccccaggctttttggcaccagggttgggtttcatggaagacagtggtttctggatgaagttgttcgacctcagatcatcaggcgttagattctcatgaagagcgtgcaacctagatgcctcgcgtgtgtatttcacagtggggtttgtgatcctatgagaatctaatgcctctgctgatctggccctccrctcacctcctgctgcatggcccagttcctacaggccacggactgggggttggggacccctgatctcaatgactcattattaattgtatttaattttaattactttaaatttaagtacccacatttctctagtggctactgtattagcataagtctagtgagagggataagcaatttcacaaataaatgaaaaattataactgctaaatgctaggtacagaatatgtgatgctgtgagtatataatcagggttcgacttaatttaaagggctgggaaggctttctctgggaataattactgaggtaagatttacagaaggggcaggacttaaataggtgaaaagggtagggtaggaaaaggtttttttttttttttttcttttaatgtgtgtgtaaaaactctgtggcagaaaagagcaaagccagttccagggactgaacatttgtgtgtgtggtaggggagagagagggtgtgtttakgtgtgtgtgtgtgtgtgtgtgtgtgtgtgtgtgtgtgtgtggtggggagagagggagggagggagggagagagcgagagagagagagagaggaagtgtgtgtgtgagagagagaggaagggagggaggggagaaagaagcctttataaagttagtccttgaggctgggcacggtgtctcacacctgtaatcccagtactttgagaggctgaggcgggtggatcacgaggtcaggagttcaagagcagcctggccaagatggtgaaaccccgtctctactaaaaacacaaaaaattagctgggcgcggtggcagaggcctgtgatcccagctactcgggaggctgaggcaggagaatcgcttgaactcggagggcagaggttgcagtgagctgagatcgcaccactgccctccagcctgggtgacagagtgagactccgtctcaaaaaaaaaaaagtccttaagaaacttaggccataggagttaaaactaatttgtgcagaagaaacattttgagggatgatggggtgagcctttactttggagacttttaaaaatcaatgctctaccttgaaactgtcagctctgtgatttctttgattcggctgactgtttaatgaagagataatggctttgcctgtcttttagggatgcgcagtgctttggtacaactgtgaagaacacacgaaacactcagattatactttgaatttctagtttctaaaaggagaacaagcacatgtcacgctttggcttgggaaaccaccattcttcctttattatcctatgaaataggccttctactttaatctcaaactgacagtgttctggttttgtttccctgatttttatcctaaaataacgtatgttaattgagctatttctgtggctttctttggagaattgatgttcatttatttgtgtttctcttcaagtagaaatggagtaacacgtataaacaagatacaaaagacacaaaacctggggtggaggcataagaggattggaacctccgtgctgttgagatcgtcactgttgatgcgcagtgacgttgaatgtctttcctcaggtcagaggggccggggcttcgactccatgtctagtgctcctttcagcaaattgcttctgggcaagtgaagagaacacctttaggacttgaacccagacctgcatgtctcttaatcctttgggacttcatccagtgactctgctccgggctagggtaatagagagagaaaaggacaaaagcagttcatactaccttgtgaggaagccaggttcccccagttcctcctccctccacttgctccccaagatcttggccaagaagttacctgccttctgcttggccagttctagtgacaaggaactcattactctttaaagcaatccattctgacattcttatactacagagaagtgatttatggtcaggcgcagtggctcacaccagtaatcccagcactttgggaggccaaggtgggaggatcgtttgagcctaggagtttgagcttgagcctaggagtttgagaccagcctgggcaacatagcaagacccatctctattttaagatgtttttttaaaaaaaacaggctgggcacagtggctcacgcctgtaatcccagcactttaggaggccaagacaggtggatcacctgaggtcaggagttcgagaccagcctggtcaatgtgtcaaaaccctgtctctactaactgctaaatgctaggtacagaatatgtgatgttgtgagtatataatcagggtttgacttaatttaaagggctgggaagacttttctgtgggaataattactgaggtaagatttacagaaggggcaggacttaaataggtgaaaagggtagggtaggaaagtgttgttttatgtgcgtgtaaaaaccctgtggcagaaaagagcaaagtcagttccagggacttaacatttgtgtgtgtggtggaggaaaaaaaggggcctttactaaaaatcccaaaaaaaaaaaaaaaaaattagctgtgtgtggtggtgccacacctgtaatctcagctacttgggaggctgaggcaggagaattgcttgaacccaggaggcggagattgcagtgagccgagattgcaccactgtaatccagcctgggcgacagagcaagactccatctcaaaaaaaaaaaaaaaaaaaaaaaaaaaagaaaaggcagtgatttactagcagttttaaaaaataatctttggatttgaaagcctagcaacaaactgcttttctctctttttgctggaagatggtcatttacttattcattcatgaagtcattaattcacaaagtcattcattcatgtccttattaggtgcttttcagtgcaggcatacagttcttggctgccacatgacacaacttcagggagtgtccgtgcatcactgtccctggaaatgctggcctcggaggcgtgtcctgggcttcccatgtgccgggcagcacctgaggctgtgaggcatttcttatcacagaggaactaggaaatgacattagctcattcattcacccagcaaatatctttctccatagctactatgtgctaggcactgtggcaaactatttggatacagactttaaatgcaggcttcctgcccctagcactctatggtctagtaaagatgtcagtgcaggtcactgttgtaagcgcccagatccaagtctgacttcctgtgtcagtcagagggaccccctaaaaggggtcctaaaagccccagccacagtttccacttctcttgatgatttccgcagaagagggcctaccctccaggaccgatccccagtgctcacaaatgccttccttacctgtggctgagtcctcacctgcttcagtttcatccacttttttttctttttttttgagatggagttttgctcttgttgcccaggctggagtgcacagtggcgcgatctcagctcactgcaacctccacctctcaggttcaagcagttctcctgcctcagcctcccgagtagctgggattacaggcgtgtgtcaaccatgcctggctaattttttttttttgagatggagtctcactctgtcgtccagactggagtgcagtggcccgatcttggctcactgcgagctctgcctcctgggttcacatcattctcctgcctcagcctcctgagtggctgggactacaggcgcctgccaccatgcccagctaattttttttgtatttttagtagagacagggtttcaccatgttggtcaggctggtcttgaactcctgacctcaggtgacccacctgccttggcctcccaaagtgctgggattacaggcatgagccaccgtgcccagccctacttcttttttttcttaaccatctttagaagggaagaaaatgcaataatatccttctgctaacaggactgtccagtgctttaaaagtgctttgtagttggttttctgtgtggccagtgtctttgtccagcaaaggagatcattcttaccagcaggtgccacatgcagtcttggttggacgttggctcttggagcatgttatgtgcttgtgcctgttgtgagatggccttgctgctgtgtgaatgtttacatttcccctggcaggtgacagtctggactccctgtgaaatgactgggaggaagtgtctgtctgtgtgcactgccatgtggagttatctgggaccctagaaggaaatctcactctcagattttagggctgcaactttaaaggaccttttctgcctatgtgatgttgctttgtacgttttagaggccaagggaatatttggtacattgaaaacatatggaggccaggtgtggtggctcacacctgtaaccccagcactttgggaggccaaggctggtggatcacttgaggccaggagtttgagaccagtgtggccaacatggtgaaaccccatttctactaaaaatgcaaaaattagctgggtgtggtggcgtgcgcctgtaatcgcagccacttgggaggccaaggcatgaacctgggaagcagtggttgcagtgagccgagattgcgccgctacactccagcctcagcgacagagtaagactctgtctcaaaaaagaaaaaagaggccgggtgcggtggctcacacctatatataattccagcactttgggaggccgaggtgggtggatcacgaggtcggtcaggagttcaagagcagcctggccaagatggagaaaccccatctctactaaaaatacgaaaaaaaattagccaggcttggtggcaggtgcccataatcctagctactcgggaggctgaggcagagaattgcttgaacccgggaggtggagattgcagtgagccgagatcacaccactgcactccagcctgggcgacagagagattgtgtctcaaaaaaaaaaaaaaaaaagaaaagaaaaagaaaacatacggaattgactaaagcacaatgttcgatgtatctgcttgcctactgctttctgtgtttcccattcttttctacatctttgaccttccttctgaaattattttctatgtacctgaaatataatatttagaagtccctagtgagaacgtgttggtggtaggttctcttagtttttagccaaaaaatgtgtttgtcaccgtcattcttaaaaaaaagttctgcatatacctaagtctagtgtagcagatgaattttctttcatattttgaagatgaattcttatgacttcccttgctgctgggaggttagcttctggtctaatcattattcatttggatataatctctcttttctctttatcttcccccctaccctcaaagtgtgttgtactgtaacacagttgtactacccttttagtttttaaaaaatatttgttgtgatagaattcacgtgaggcacaattcagtcacttttagtgtatccacagggttgtgcaatcgtccccacagtctaagtttagaacaagctgggaaccacccagaacatttcacgtgttcagctggtagttacagcctcctgtacatggaggcttctgatgtcagtgagggcagaggactttacgtctggtcccactgcagggagcatccaacagaaggaagaccaatctcaaagtgaggctgcccatggggaatgtggactgttgccatttgaatagtatgtgaaggccactattcctgtatgattattttttctttcctaagcatattccaaagtttctgaatgaacgagcatgccgctttctttatggaaattaaggatgagtattggctaatttcttagccaactgcttctactgctttggttttcttgaggatattttatgataaccagatgggcttttttggcacctgtagattttatgactaaatgagaaagcatctttaaaatatattctacctggaacagcataccctgacaaactcccactgagcgattgttgcctcctgttgcctttgttaatgtattttattctagtttatttttggtgcctctcacaagagagtaaaatgtattcaaccttatgcattagtgtctcttttgaaagtgtaccaaaatggacacatccctgcatagatcccaccactggagatagatgctaagcccctgcaagggtccttgtgatcggtttagtggaacgcatggtgtacagttttgacccagtgatgtgctacagaacaaccttggctggtgagcttttctggaagctcagtgtggggactgaaatgtattccttgggtcagttttgctgggtagtgaccaatccagttgtcatgaggcctagttctggctgtgcttctgatgagctgtgtgatattgagcaaggtacttaccttctcagagcctcagcttcttcatctgtagaattggtaagagaatgcctgactttgcagggtgtgaagagttggatggtgtgcactgagcgcctggtgccaggccacggacgtggcccttggccctcacccctttctagaagagctgtttttattgtgactctgctttttctttcccctgcacaaattctgctttcagctgtcattttccccaattgtcatcatggttgggatatggctgaattctagagagaagtattattttagcatacaaaattgtctttctgaatttcccacagagttgctcttaatagaaaagttgagcactataaatgggaagtatgaaattctctctgaaagctcagttttattcatgatgatctaccagactcataccattcttaaataccctctgtcctgataaatccactaaactctttagtcctcctactaggccgccttcatctgtttgtaactttttttgtcctgtcttcctattaattgtcatcccaatctgttctctgttctatttgtgatagcctgtgttggcagaaaaattggctaaatgattgaacataattttctcccctccaccccaccccagctggagagagatccttcccaggcgcgcccagtgatttgcttccctgctcacgacatcttattccatctcatctctcgccatccctctgcagctgcccccttctctccagctctgttcctgtatgggcgaagggctcagcttcagttttccgaaggctggcttctgcctcctacctgtccccatttgtaatttatatgcttcttgtgttttgtatctttagttggatttgagaacagacttctgtagtctataaagaatccatggagtggctttcttagtatttttctgagcttgaagatgacaggttttgggggtttcttggagattttgaggtctgtgtccaaaaaggaggcaaatttcagatggaattttaagacttttttctttttttttttgcaaagtgctcatatcccacagcctcctagttctaaaacattgctgatttgtgtttttcygaagtacttttacatcaaatctcattgagttttttagttggttcctgttttagagccaagaaaactaaggttcatagagttgtgtgttgcccagggtatctcaatgtgttgtggaaggagggttgcaggcaggccccatacctggatctttttcttttttttttcctttttctttttctttcttttttttttttttgagaccgagtctctccctgtcacccaggctggagtgcagtggtgtgatctcagcttactgcaacctctgcctctcaggttcaaccagttctcctgtcttagcctccccagtagctgggactataggcatgcaccaccacgcccagctgttttttgtatttttagtagagatggggtttcaccatgttgcccaggctggtcttaaactcctgacctgaagtgatccgcccacctcagcctcctaaagtactgagattacaggtgtgagccaccacgctggcccatagctggatctttataacgtgattcagaggaagacaaaccggagtcttttcttcctagaatttgtaaatcaaatctcaaaggagggcttttcatgtcccttctcgtaccttctgtttgttctctggatacacactgttgatgggatgttttcatctctggccatggcaggatcaaggccaaccttgatcccaccagaaccacatgggatgaagaaggagctgctccccaaagaaacgagaaatgctgggcagacaaaagccagatgttcactctgctttcctctacaggccaaaacttctgaccatttccagaaatgaagaatttaccattgttataagtgtaaaataggattggtatttccaaggcaaaaacaaacaaacaaaaagaatctgggtccttcaggagataaaagcgttggtgtaatttgcgaaggatgggagccttccctcgggaggagctggccaggctgtattacgggtcctgtgtatatgtcagagagaggggtggagatacagagagacacacagacacacacasagatgagatggcaaaaatacccctttgggcacctggccttcactcaacagaggacggcttactgggtgaagtcacattgagtggtctttcataccatgcttgcttagaggtccgcttgacctggttcctggggtaacatgctagagaaatgyggagtttacgttttgcacatggctctgttcataatactagtacccttcacagcaggcattatggtgtcgtggagagattttataaattgtgtccatggtgctgagagaaatgagaaaaaagagagaaaataaacycattcaaacttaacagcttttgattgagtctttacaaataagtcttcgcacatatctacctgatgaaatttcagttaaccaggagttggttgttgaatgtgactttgggatgatggaatttttattgagcgtgtgtgtgtaaactgtgtgcgtgtcaactaaatactggatttgaccctgtaatttattcattcatttagttactatttactgagggcttacaatttgttagagcctgcatcagctactatgaggggcataatggtgaatctgacaagaattcagtcttcaaggagtttgtagtcatgaaggaatgtaagacatgcataatttgctgcagtaggaataagaacagctctttttactgaatgcttgccccgtaccaggcgttgtgataaatccttcctatgcaataattcgtttattcttctgtataacctcacagtatatgtgttctaattattcccatttaggggatgatggatttaaagcttgtagaaggttatttgacttgatgaagttcattcagccaggtagaaggggagccgcacctcagccccgacccctctgatctcctaccgggctctctgcmtgtatacagatcagcaggaggtaggcacgggtctcaggacagagaagatgctggaactctgaggaagacgtacttgctttccattaggacagctaggggaggcattatggaagaggtagcatttgaactgagaccaaaaattggggcatattaggatatcagattgtcagagggaagagaattaccaatacataaaggtaaaaaaaaatgggggtagaacaaggagtgacaaggaataaattctggtagaaaaatggcctaccagttgcagggactgacatggttcaaagctgggccttaggcccagtgagggctgctttatttacggtctaccctttgctttgtggccctacctgaagcttcccagatttgctatccactctccatggggaacactgaacaccactgtttttcacatcgagtcctttgagtatgtcaaaggttctgctcagattctgctcagattctcttggtgaactcttctgaaatctgcaggcacctctaggggatgtttgtcaggctcatgtctctgtctttccccctctgctagacagtagccctgtagttcttgttagctctctgatgcttgcatggattttaagactactttgtccatgttttctagctgttctcagtggctgagctggtctgagttgtctagcttgttatgaggagtagaatcttctgaagttcatttcatgcctattcagcctgagctgcttgtgggacatcaggtggacctttgctgcccacatgcagtgcttgaagaggggccagttgggcacctccattttcttctaagtgcagagaggaccctgctcttaagtgtttgatcacagtcttcatacgtgtcttccataggcaccaccaacagaaacagatcagtttgtcatttttcttattgtagatgcacaatgtctgattccttcatgtgctattttgggcataaggtgccatggacttttcaagtagactattttttaacgtaagataatttagcttttgaagatttgaagcctctaagtagaaaattgcttaattcttctttacccagttgaatattgtttgtcatcctgaaaattgaactacttaaggggacataccttagcaaatgatgcttaagagaagtgtttttgtttttttttttttaaattatgaactatttctattatgcttggttaattgcatatttttgcaaagagatattaggcatagggccatgggcctaagttattgcgaatttggaaatatacattttgtgtcaattaaaagtaaatactcttcatcttatcacaagaagctttagtttcttaataagaagttacttagatgggttcgtttgagatatgcagccattgaaattttctttcccaacaactgtgttaaagcgaaaaggatcctaggcttagaatcaaaagcaccgagtgtgagtttcagacttgccacccgtctacccatccatccatccaatcaagtttactaaacatccattcatgtgtggtacgatgcctaggatcaatgactgccagtatgactgcgagcaggttgtttattgctgttctttaaaatggggacaagtttcattaccctcagcaaactaacgcaggagcagaaaaccaaacaccgcatgttctgtcttacaagtggaagctgaacaatgagaacacatggacacagggaggggaacaacacacgctggggcctgttgtggggtggagtgaggggagggagagcattaggaaaaatagctaatgcatgctgggtttaatacgtgggtgatgggttgataggtgcagcaaaccaccatggcacacgtttacctatggaataaacctgcacatcctgcacatgtactctggaacttaaaaagaaagaayaaataaaacgagggcaagtttagaaagcataaagtgtcatactgatgtgagtccacatcttaccaacctcactttctaccatttgctcttttgtctctgctgttgcatgtatcttaagtcaaaatcagtatgaacgtgatttcttgcacaagttgcctctggtggtttgttctcttggcctggtttacactggaagtctgtgatactcgccatactcataggtagacttctcccgcatgccagctgggttctgttagggagctgcagctacttgaagataactcctcaggaggcagtatctttacgttcttgagaatatataaaactgcagtcaaatatctcattcattccgccaggtcttctcttctgttaaatggtgtatcatgcagaggccttggagaccagtgcagactttgacatttcctcttgagtgctaggggcagggtgtgagccccctttcctcaggagactctgcgagctgtgtggggagttgacttagggaaaggagtgaaggcaacgggggagaagagccaggaggaaaactacagtgactctgagttggtgcgaaccacgaaagccatccctggacatactctcagagctagcaggatttccttttgggttggacatgcgacgtgagatgcagagaggacttaaagatgattcgtgggttagacccgtcaatcgatagatactgttaacaagtaagaaaaaaacccagatggcagagtgtggctcctcggaggtttaagtagggtcttgtggcagagagtggtggctgcttgaagctgggtgaggaggtagcacttagactaaggtcaagcggcaagagagagctggctgcacgaagggaggggaactcattccagcctgaggagcggctcagcagaggcccaggagagagatgggctctgcgtggtccaaacgcagagggaaggctggggcctcggtcatcacatccaggtggtaaggagctgtcctttttaaggactgatgcactctcagcttttactcatagtagatgtgaatatgtgcttatggaggacacatcaggcagctgtaactgatacaaggtagaatagtcaggacagaaactggcatgctccttacagtcacagtttttgaacaaaatcccctacataaacaaaaacaaaaacaaaaccagcctgggcaacgtggtgaaaccccacctctaccaaaaatacaaaaattagccaggtgtggtggcgcacgcctttagtcccaggtactagggaggctgaggtgggaggatcaccagagcccaggaggcaaaggttgcagtgagcagagattgcaccactgcactccagcttgtgcgacagagcgagacccgtcccaaacaacaacaacaacaacaaaccccaaaaccaagctgacgtgttacttatgatttttgttcttattttgtagatggaatcagtgtgagtggctttcccctgtccagtccttttyggcaggtcgttcggccccgagtggagggcaaacctgtgaacccacccgagagcaacaaagcaggcgactacagccacgtgaaggtgagttggtatggcagacggcatctgccacgtgccgttcgggcttctgcaaagccgtttctgaagcacagctctgagtccttttcagaaaggaaaggctatgtgtatttgaaagctggattcttggtattctttgttcttggacaatgttttggaaagccgtcacagtgaagcttgagtgcattgtttggtgttgcaaactcttatgtccttggaacacggagattccgtgggctgaatccaggcgtgcggtgattaaagcagactctctcctgccgtttctctattcatttgaaaagtttatttattgcatacctcagttcggatgtttaccctgtacatttttcttaatcttttggcaacccttcccaattgttggtttggaagcaccaaggaagccaagacagatatgccggtagcaagtgaatgtcagtgcaaagctacgtgccgcgggcttgtaggccagcagtgagcagaggtggctgctggctccgtggagaggcctacacaagtgctccggggttttgagtcttcagcacatgggaagctctggctgtttgagctggcccagggacagcgtgtagagcaggaggactgcagggcctaagagctgtgactgggctgcaggcggcaatgtcactttcaggcacacttgtgttcaggaccagcctttgggatgctgtttacagtcctcatgccaaatttaagagggcagggactggttaggaacatcagaatcgcttggccaagatgcttgtgagtcagtgatacagtggactttgaggcattggagctgctgtcactcaaccaagaggaggggtggaggagcatggggtgctatctgatgaggtcatggcaagaaggaataggccagttctggttgatggaggtcatgtcagtggattgaacttggaaggagctagttttaggggaagagtcctctccccttttgggctctgcagtaaagaagggggttgttggtagcggggagtgccccattcctggagagcttctgtttgcacggcagcttggttactgtgttgctgggctcttgggttagccraggggactggtgtgggagaagcttcccagcagaggcagcaaaggccccagagtgcaactgcacggcacatgcacggagctaccaagtacgggagggtgctgtctggtgggcttgaggcagactttctttgcatgtctcataattttttgtggaaagctggatcttttaggtaatggttcgtagcaagttggaggctgagccccaccaccctcccctggcgctgcgtgttgctgttcttcttgtttgtccatcagttttgcaacttgccttgacttaccttcgtggagtctgttttcctcagtgtgtgacgtctctgctttgttggtgattttctccttcctgtttttactgcttgcctggattcccagggcgtgccccaggtgccctggagctttgtgggcagccagtgtytgattagaggttgtgytgaaatgyttcagttcagcaggccttccaccattccccgatggatctgcacgtgccttggggattgctgtcaaactgcagggctgtttgtttcgtctgaattcacaaggcctcacattgagccagggtcagtggctcatgggggccctctctggtttgtcctgaacgtgtgagggcttgtgcatgtgcacagctgcccaggtttccagcgttgtgggaccaacaggctcgtttgccccgtgtatagtagcagacccatgacatggagacagcagggtttgcagcgaagagatagtttaatgacagcaggaagccacacgaggaggtgggaggagacccttaaacccatctccctgaggaattctgggctgcgggttataagggggtcgtggaaggtaaggacctgaaaagctggggtcattggttgtggtgagggggatgaaacatcaggatgtggaaactgcattctttgatgaattaactctccgtgaggtccctcagacacctggcataagtggggtccttcaggccagcagatgtcggtagttacactggtatgcgggaccggaaggactatctcaaagggaaaacgtaacgttttgtaacgttcaagcggctatcgacggagctcttaggggaactagggtcttggagcaaggtctgtgtgattctggggcaattcaggctccggcagcgctgaggaagcaggccgggcaggctgccctcgcgatgatcgccgagtgtgctgcaggcttttttgtttttccttctccccttcctttcttccctgatttattgtataaagtttatagaaacggtttcactggggtaactggggtctcaccaaggccttctgtgctcttgcattcactggctcttcctgctgaatttctggcgggtctgctgttttatcatttccccaactagttttgtgactttaggccagctgcagtgttaccttccctgactgtttcctcctaaaatccagtttttttttttcttttaatttgagatgggagtctcgttctgtcacctaggctggagtgcagtggtgcgatctcggctcactgaagtctctgcctcctgggttcaagcgattttcctgcctcagcctccagagtagctggaattacaggcgygcgccaccacacccggctaatttttatatttttagcagagacgggstttcaccatgttgaccaggctggtctcgaactcttgacctcaagtgatccacccacctctgcctcccaaagtgctgggattacagatgtgagccaccacacctggcctcccactgttatttttgacaacacccctggacatgtgttttccaccctctgatccaaataaagtcagcctcttccagcaggtagcagagcagcagacagtcttctgcttgtctctcctggccaggtagaacttgtgtgccaaggagttgggagtagcaggggcagtggaaccagcccctgtctaaaatgccacagtctcccttgctcttaccaagattaacgagattgtcatgaataaatgcttctcaatttgttgtatgcctttggtcagtttgaacatctttaaatggttgttcttgatgactttgtccatttgcatctttgctttttgggcagaggtttagccaagcttcccactaagcaattctggaaatcccacccctcagacctatttaccttctggttattctttcagagctggggatagaatgaaaaatgctgatttggaaagatgttcctttgggcctactaacatcttaggtgtttattcctaaatgctggtggagtagtggagaggttcgagtgtcgtggtggcgtcgtgcagctctgctggccgtttgctgtgagaccagctgcgattttctgtatagattattggcacgcttttatctgagcacttgaactccttctagactttcgccatgacttttttttttttttggagacagagtattgctctcttgcccaggctggagtgcagtggcgcgatctcggctcactgcaacctccacctcctgggttcaagtgattcttgtgcctcagcctctgcagtagctgggattacaggcgtgcaccaccatgcccagctaatttttgtgtttttagtagagatggggtttcaccattgttgaccaggctggtctcaaacttccgacctcaagtgacctgcctgccttggcctcccaaagtgctgggattactggcatgagccaccgtgcctggctcgccatggcattgaatatactagcttgctcactagtgtgggccctttcacgatctgtgttccttgttacggtagggattcactggcacaggcaggccccgggaattttggggagcaggtgtttacatgtgtctgtaaactgttttgacacagctgtagggggtatatttatttgtattatgctgtaagtccagatgcggggttatagaatctttcgtgggaaaggagcctgactagtgtccccttctggtgytactcctcatgcttagatcctgycagaggccgtccactgctacyggcaccctctcattgcgcagcctgttctcatcctcagactccagtccctcacagagtttactttcaaccctgtgctgcttcgtgtcttcctcccaccttccttgtgccattccagacttcctcccgagtaggacctcctcaaggccacagasgatgtccttgttttgcctggccatcgctgtatcactccatccattytgcagtggaccagatgtggcgctctcccttaagcccctagcagcgctgactgcagaggctgggttcaggcttccttctgaccctccctcactctgcctctttgctgaattaaagcacaacgtatattgtgctccagttgtgagtcagttatggtgccccggggttgggacacagtgatggatttcaggggcctcctttttaggagccctcgagttgggggctgtcatacaagccagtaactcagccttgtccactgaggaccgtgttaagcagcgtgccgtgtgatggggaaacaagggtgcatcatggctgtcttgacttcatggaactcctgggctggtggctaagatacaagtaaataaaacaagaaaaagtggttagaatacaggtgatcctcgttgctatggctgcacggaggaagtcgaggaaggcctgtgagaggaagttgcactcaagtggagtattgaaggaagaagaagctggggtgagctagcaggccagagtggagagggcrttcccgaacctgcggctggcaggtgcagaggcccctgaagtctgtgtgtgtatggcatgctgctgcaggcctgctgtcctgagcacgggagcacggagagggctgagaggagacaggccaggctgccaagggtttcagaggcacgcggagtttgttggttccttcctttgctttgtgttccactcatacttcttttggggggcatctctcacatttgaggtactctgttagacaagaagaggattttttctgtgtctcacaggataggctcttacagtttagggtaacatttcaaaatctaggagatgctcttcacacttggttgggtcttggtgcctgtggcatggattttgttttcttcaattgagtgttgcaagggtgaatgtgctgtttttctttggaatcattataaatgtatatagatagagatgaatgttcgtacatgtatttaaatgtaatgattaaaatatcattaccgtttaccgaggaactcttgcatatcaggcacttgcatcgaaattgtccttttggattcccttgagagttgtttgagtaggtgctattatcctctaaggagaaaactgaggctccttgaggtgatgtcacactctccaagttacccactttggtctctgtcagttacactgtgacaccttcttctttcrctacagcttttctgaattttacctgtggacagagtcccaacgcctctgtatcctgcactcgaggcctttgatgccttccccttggaccatcatttcatcggttctctgtctcattgctgccttgcgacccccgtctgcccttggaggccagccactttcctcgagtggcctgggcaccctcctccacggctttagcgtgggaactgagaggaagagaactgacgtttatggattggggtctgccgggcagggactgtttgggtgcttgacattcccaggtttcctcaatccttgtaaatatcctatgaggtgagtggggaagcggaagtttagggaagacttgcccaagttcgccgcgtctgtgggtggtggagtcagggcatgaatctttgtcttttcctttttttttttttcggagatggagttttgctctgtcgctcaggctggagagcagtggcgtgatcttggctcactgcaacctctgcctcccgggttcaagcaattctcctgcctcagcctcccaagtagctgggactacaggtgtccgccaccaggaccagctcatttttttttgtattttagtagagatggggtttcactgtgttgcctgggctggtcccgaactccggagctcaggcaatccacctgcctcagcctcccaaagtgctgggattacaggcgtgagccaccgtgcccggcgcctgccctctgtgtctcttctaataatcttcatcctgtggtcccacccttaaggaggacaggatctgatgggaaaggtccgtgaagggccttcyaggtaaaggtgctgtgccacccacggaaggagcgtgggtgcgtcctgggtaagagggagcagttgggtttgcctgagatccatcagtagtgaatgtggtggatttcaaacctgtgcaatcatgcggcattttctggttgtcgaggtttgtcttctgcgggacggctgagcctctctggggaccggagcgggagctgtgcaagtgaagtggctgacagtgctgtctgtggggacatctattgctgtaggggcatctggcaccatgagcttgttacagagcccttctccccgaagcaggaatgatgtgatttaattggaatcgtgctaaacctataaaactatcaccgaggaatggtgtagtcatggaaacaagtaattcagtgaaagctgctcctagggagcaccccgagaagtgggaaagataacatgtgtttctcaggttttccagaaagatgccttcctccatttagctagagtgactgtgtctgtccacgttcatgactgtctttcctgcrtgcctcaggaggaatcttctagggttgaaaatagggactgtgtgaattggatgcatcttagaaacaatatttatgcaagccagcaagacagtccagcttttctgactctcagcatccccctctgtaaaattgaacgacaatgcttccttcataggattgttgggaggcttaaatgataaaagagcctggcaggggaaagaaagaaggttggaccaagttaggaaataattcattggaacttcattcttgtatgtaaggaggaaaatgagatttggtcagtgagtccaggtcagtcacagtcctgctggttgttaacaacaagagcagctctggactaggcaggggtgtaagggcctctggaacaggtagatgtcgggtcccctgagtagctgggagtctggtctttgcccasatcagctgtgggcctttggccaggtacttagtgctgcctagcctggcttcccccaactgcaaagccaggctggtgtctaccctctgagttggatatgacgtgcctaaaacatgtcatcgtaaccagaacatggcaggggctccattgagagcccttctgagaagggcccaaacttggtgcccacatcacggactggggctgcagaaatgcccggcaacaggaggcttttccctgagttggactgtgtgccgtgtggcactagaggtacccatggctttgcctgttgaaggcatccaacttatgcacagccttcagagctgcatagagatgtgggagccagctgagacctggaggataaagcattccaagtggctggaacgactgtgaacagtcagggagcggacaccagcatgcacggctgcagccatttatcgtggtgtgctctctggctctgaatagattctactaccctccatgtgcaatactgctctgtaaacactccacacctgcttatagcttgctggaaagcagttttgaaatcctaacgaaactagtttgccaggaggcggggccaggcctcccttaagctctgtgcatggttggctttggggagcctgttggttcctgctcccccttgtcaacatcttatctcttaacatttgagcaggtaggtgtaatagctgtagcttcattcatgggaagctcctgtgggagccagaggttgtgcttcactttaagaaattagaaaaaaaaaaatgtagattaaacccaaagtcagtagaaaaggaaataataaagatcagagtggaaaacaatgaaataggaaacagaaacccaacatagacaaagcaaccaaaagcttatttttggagaacagttaatgaaattcatcagcttccagccagattgatcagagagaagacacaaattaacagtattagaaatgagagagttggcataacacagattttatagatattaaaatgataagaatatattataaaaagtttatgctaataaatgtgaaaactgagatgatgtgacaaattccttagaagacacaaaataccaatgcttacacacagatatagacaaccacaatagacatagccacttaggaaacagaatgttttgttaaaaccttcccatataagatcatgagggctcagaaagaaaattgaaatggaaaatataataaaataaaaaagtcaacaaaaaagaagattagaaagtaaaaaaacaaaaaaacaaaaaaaacttttttttttttttgagacagagtcttgctctgtcaccaggctagagtggtgcagtggcacgatcttggctcactgctacctctgcctcctgggttcaagcgattctcctgtctcagcctcccaagtagctgggactacaggtgtgcgccaccatgcccagctaatttttatattttttgtagagacggggtttcaccatgttggccaggatggtctcgatctcttgacctcatgatctgcctgcctcggcctcccaaagtgctgggattacaggtgtgagccaccatgcccagccaaaaaaaacttcttaaaaaagacaaaagaaaaaaaacgccttcccatagagaaaattttggggccagatggcttacttatgcatcttaccaaacacttaagggagaaataatatgaaatctatgtagactcttccttcaggaaacctaaaaatgaaggaatacttcttaagtcattctgtgaggtcaacatttctctgataccaaaaccaggcaaagagatcatgggggaaaaaaatccccaaagagtamaacccaaagcactacagaccaatatccctcctgaacacagatgcaaaaattttaagcaaaaattgagcatctactatttaaccctatgtaaaatattgacggactggggtttatctggggaatgcaaggttagcttaacatgagaaaacctgcaaatgtaattctgcatattggcaaactgaaaatggaaaactatgtatgccatctcaagagacagaaaaagcgtttgataaaaacccagcatctatttagaatgaaaactctcagcaaatcagaaacaggatggagcttcctctgcctgatgaaatgcatctaccagccctgggcagctacccctgtccttcaccatgagaggtggcctgcgcttgcctgaggccagccatccgcatctgcttacctggctggatgaggcgtgtcttcttgcattgctggtcctgagcgcaggctctttgcttggctgggccttcttgctcacttcctttcattcatggcatgctcctctgtcctcctgggtgagctctgaggtcacctggtctgctgagccttcctccgcaagtggcacacccagagtcaggcccttcttcctgtgtcctcgtctgctgtccgttcccacctggatggtagcacctcccacactgttactgttgtcctttgcttatattgctgagctccccatcactgtaagcgcctcgtggccatgggcttgtgaagcatgccttctgtacacatttcttgacccggatattccagacagtgaggccagacagcccctctccatggggttgcctgaagattctcttcattagtgaggcaaagcaaggcagtaaagtatgttttatctcattcgatcagaataaagcttaactctgggttttttgggattctaacaacattcagatacgtcatgtaaaatacgttactttagcttttaaaataaagaattgtgggatgtttatgaagtttctatatacttttatatttttttcttaagagacagggttgtgctctgttgctcaggctagaatgcagtggtgtgatcacagcacactgtagccttgacctcctgggctcaagtgattctcctgcctcagcgactcaagtagctgggactacaggtgcgtgctaccacacctggctaagttttgtattttttgcagagacaggatttcaacatgttgcccaggctggtctcgaacacctgggctcaagtaattcacctgcctcggtctaccaaagtgctggaattacaggcatatgccaccatgcctggccttccagctaattttaaaaaaaatacttttttttatttttaatttgttgtagagatgtggtctggctttgatgaccaggttggtcttgaactcctggcctcaagtgaacctcctgccttggtctcccaaagcactagggctgcaggtgtgagccaccacacccagctaacttttacattttaataattacagttgcaaatggaccaaaagaatctgtaaagacaacttaggagcaaatgtattcaagtttttaaaaaaaaaaaaaccctaggatatacaacaaatagcattgcttcttaatcaagctgtgttacaaattaaaaatggtttccacgagcccttcggggcctggrgrgcagcagaatggctgttcccatcagcggcgaggaaaacacgtattatgccagttactccttgaacacttacagcagcctgatttgtgtgaggagcatggccacaggcttgcataagacatgcttctgcccttgaaaatcttgcagtagagccgggggagagaacatccacagaagcaatggtgcccagcgctgctcttgccgtagaggtgtgcagttgggactgtggccttccttggggacaggcagtgccttcatcatctgtttgttcccaagacagccatgtaatcgtcggtttgctgggtgggaaagggggtgcgggtacagggaatccaggagagaaagggcttaggcaagggagggagatgaagctagcgggggygtggggggacatggaagagagaaggcttcccggagaaccggctgggattcttcaggcagacggggggatggggaagtccagagagagtggaggaaccccccacttccctccagcagcagcagccgccacagtgtcctgtccagcattttccgatgctcacttggtgctgggccctgcgcctggagtttcctctgcattgacggtgcgcgttcaccacagacctgtgaggcgggggtccctcccagcattcctgttttctagatgaagacagcggcgtggccctgctgggtgccttgccctgaatcacctcagtagttcagcggcagaggcaggctcggccctgggccagctgatggcagaattcacggttccggcccctctgctaggctggcacgcccaggcatggcaggcagccgaacaggccgaggccagaagaagagcgagacagaggctcgggatgtgacgccgaggagatttagcgcggtgacagtgtttacagattacttccctcatgactacaacttcccatcattcaagtggaaatgactgaacagcttagaaagattaagttagcccaaggtcaagcagttactaagtagaagttaaaattcaaatcaggatakgtctgaatccaaagttcacgctrtttccgtgatatcctgctgcccctttacgtataatttctaagtttcccaacttattatgggatacaaaacattctgtctcaattcaaaccatatttatagagcagtggagtataaaccctttagcctatctgaccctcagtttccaatctgtgaaatgcagataataatactttctccggggctattgtaaggagttaagtttctgctattagccttggtagataagaaaagcttacaaaatagcaaatccaattcagttccaaattatttctaatctgtcccagtaatagttacagagacagggaatttctttccacaaagtttaagcataaaagcttcaaaggaatcctttaatctgctcaacaatttcaaaacttaataagaaatgtagaagtaagagatgcagagagagtctgctgcatgtggaattctaacacagatgttaaggacagagaagggggacggcctgttccttgagttcctgtcctttgccttgcatgatgatcactgtctccaggaacccctgtgacatttcatgtaatccattccttcagcaaacatccagtgagcacctagagcatgcccagttctgaatgctgggggcgtaacagtgaacaaggcgacgttcctgagctgacatccagcagaagagacaagcagcaaacaaataccacgtggacaaacaaggaaagacacgggagtgactcctgctcgttgttttaggcggatcgtctgcagaggcctcaccacagagatgccacggaagaggcagagtgtgtccacrgggccccttcagggcctatgtcagtgatggtttgctgtgctgagcaacaaacactgtctgaacaacaycaacaccaactgccagcrttttaaatgatggtctccccttggtatacacgggggattggttccaggatcttccatacacccaaatccacacatactctagtcctgcagttggccctgcagaacccctgcatatgaaaagttggccctgcaaatatgtgggtttcacatcccaccaatactgtgtttttgttgcacctttggttgaaaaaaaaatctgcttctaagcagacctgctcaactcagacccatgttgttcaagggccgatggcatgtatgtgtggtttccccagtagactttgtgtccatggatcagagtgggataccacaggaacctytgcacttcyagtgcctgctacaggggctgacatggagcaggctgtcattaaacgttggatgagggaacaggaaagcaaatgaaatgacctctaaagaattgctctgctcttccagtgtgtcttcctgttgatcataggctgctacatctgatcatgccagcaacttaaggcagtggcatctgcgttaaccagaatcagcatcacctggaaggctggttatgccacagcttgctggaccccatttgcagagggcctgggagtttgcatgtagaataagcccccaggtgctgccgctacttctggtgtggagaccacagtttgaggaccaccaccttaagagatgaaatatttttcaatttgttttgacattttttgttgtctttaggactggaccacaagcatccttacggacacttccggtgtgtctcatagaaatggtacatggtaagctctctcaaagtagcttagtttggggtgcctcagcgactaactgataatacctgaattcctgagaaggaattttaataaacatttgagattaattttttttnnnnnnnnnnnnnnnnnnnnnnnnnnnnnnnnnnnnnnnnnnnnnnnnnnnnnnnnnnnnnnnnnnnnnnnnnnnnnnnnnnnnnnnnnnnnnnnnnnnnnnnnnnnnnnnnnnnnnnnnnnnnnnnnnnnnnnnnnnnnnnnnnnnnnnnnnnnnnnnnnnnnnnnnnnnnnnnnnnnnnnnnnnnnnnnnnnnnnnnnnnnnnnnnnnnnnnnnnnnnnnnnnnnnnnnnnnnnnnnnnnnnnnnnnnnnnnnnnnnnnnnnnnnnnnnnnnnnnnnnnnnnnnnnnnnnnnnnnnnnnnnnnnnnnnnnnnnnnnnnnnnnnnnnnnnnnnnnnnnnnnnnnnnnnnnnnnnnnnnnnnnnnnnnnnnnnnnnnnnnnnnnnnnnnnnnnnnnnnnnnnnnnnnnnnnnnnnnnnnnnnnnnnnnnnnnnnnnnnnnnnnnnnnnnnnnnnnnnnnnnnnnnnnnnnnnnnnnnnnnnnnnnnnnnnnnnnnnnnnnnnnnnnnnnnnnnnnnnnnnnnnnnnnnnnnnnnnnnnnnnnnnnnnnnnnnnnnnnnnnnnnnnnnnnnnnnnnnnnnnnnnnnnnnnnnnnnnnnnntgcttttattgcatttcttgctaaacaggaaaaattgtgttagatttgctattgagaatgactgacagaaagccaatatgtttgctttgggtaaggacatttaggtgacattattagtttctaaaaaatccaaagcagtttaaatagagacaacgtcaaacaaaaagaattctatcccccacccctagaaatatctccactactgaaacaggcagaatgaaggagggaaaaccttatatttatttggcttcaaacagatctgtaatgaacctcagctttttacccgctttgttagagtggacgggttacttcaggccatctttgaaatggagaccatccttagtatgtcaacaggagttcttatggtgaaggaggttgcacagaacccaactgcagggaatgctccgcttcctgagagctgaagagacgcacggctcctgcctgccttctccaggtgcagtctcatcatcactgggcggagtcgttggcactgtccttgtctgtcaccccactagacttcaagctccgtgaaggcagaagtgctttcctttcatctttccccatgcgtagcagactgtctggcacatgacgggtgctcgacagatgcttgttcccactaaaagggtcacagacggcttgggaaggaggcaggcaaaaaggcgcagggagtggtggaaaggcattctaagccaaaggaccagcctcagcaaaaacaaggagaaacgggctttttaaatatatatatatatatatgtatgtatatgtatgtgtgtgtgtatgtatgtatgtatttggggcaatattgttgaagtagggccataaaagatgaggtcagagcatgtaaggtgagaccacaagtgaagaatcctgaatgccactttaaagatccagactccttaatgcagactgtggagccaccttaagaccgtaagggagtaataacactgtgactcacccctagccagaatttattagttttgtaaatcaaaacttgaatatcctagatttttttccttgttctgccaaggaagacaggatacagagaattttctgacattcatttcaaggcataagatatcctatgataaagaaaattattgctgtataaataatagcccctcaggaaaattgtaagacaagaaagaaaagcaagaaagcaaacgtaagactgcaagcagaaaaagaattagatgttgtttagtctttggctgactttaaaagcagttctgtaacataaaagataattgttttatctttctgaaccttatagtcctagtttactgataatttttttgaaaaattaggaaaggatactgaattttcccgaatgcttattatgtatcttttgagatgatcatattttttctttctttctttgttaatgtggtgacttagatggattggttttagaatgttaaaccaaccttgcattctggggataaaccttacctggtcatgatgtaacatccttttcagcctcaaaacaaatgacacacttaggaataaatctgacaaaatgtgtgaaggatcggttcagtgagtcatagggaagatggtgagggttggaaataagactgaggatgagggggtgggccagagtggccacttgtcagagacttctcctaggtaatgtcagtaatactgtgtgggaatcagcatctggagagtgaggtgaaaggacaagaatggttgcatggttgggcagatggtgactctgggtagctgagatggagactgtaggaggggtggtgagcgggagcccacattcgaattaggttgcccaggcctgcctgaactagctgtctggatggcagctgagctacatttaagagggctcctgggtggggattcctcctcctcatctgtattctcattaatccatttgagttgttctctttgatttttaaaatagttcatgtagtgcattcatgatttaaaatttcttgttttcaagtaggccgtgaagtggcagtcttctgagaatttctgtttatttaagttaaagttcttaatcttaacgatttcctctggatcagagcacttgaacattaattctgtgttaatgagatttacatagcactctctttgtaaatgatgcttttagtgatgaatgtttccaatctttctacatattgtagtttgggttcttgttcttacaaagcaaaaaataaatgaacacatttactgtagacttcaggaaatggtttcctgtatcatgcagtataaacttctgataacttttgctttgtcaaatgacttatccatgcttttggtaatctttgtatcttgtgaataccagtgatatcttatttaactcctggtgacactaagaattttctaggcagcataagttatacattagaatcattgtaaaggagatgtcaatattgctacttaatgtgatcacattgtatctactttgagtattcctacacatactttcttccttctttttctttccttttctctgtttttaaactgacatctccgtagatgatttttaaatttcttgagcaagctcctccagcgtaaccttctggcatctggcctacatcctcagcattttgatgaaattccgttcactggaattgtctgataagatttcctctcaataaaatccagtgatctttttctcactgaccttgttcatcatttctattagtctgttttcattcctgtaaaggaacacctgagactgggtaatttataaagaaaagaggtttaactggctcatggttctgcaggctgcaaggaagcctggtgccagcatctgcttctggtgaggacctcagaggcttccaatcatgatagaaggcaaagggggagctggtgtgtcacagggaaagagcaggagcaagtgagtgttggcaggctcttttatttttttattatactttaagttctagggtacatgtgcacaatgtgcaggtttgttacatatgtatacatgtgccatgttggtgggctgcacccgttaacttgtcatttacattaggtatatctcctaatgctatccctcccccctccccccacccaacgacagcccccggtgtgtgatgttccccatcctatgtccaagtgttctcattgttcaattcccacctatgagtgagaacatgcagtgtttggttttctgtccttgcgatagtttgttcagaatgatggtttccagcttcatccgtgtccctacaaaggacatgaactcatccttttttatggctgcatagtattccatggtgtatatgtgccacattttcttaatccagtctatcattgatggacatttgggttggttccaagtctttgctattgtgaataggatggcaggctcttttaaacaaccagctcttacttggactcacagagtgagaactcactcattactgtggggagggcaccaaaccatgaaggatccattcccatgacccaaacaccttccaccagaaccacctccaacattggaggtcacatctcaccctgagatttggaggagaccaaacatccaaaccatatcatcgtccatcttttcaccaagtttgacagcactggccactgtaatctcctttatgtaccttgtcctcctgcagtttgtctgtgtggagggctttcgggttttcttgatgttcttagtcttttrgagcttaataccttggcctcatgtgtgatccttccaccactcctggtacccagccagtggggaagttctgcagactcttccttagaaaggactcttagatgattatgatgttccatggccacacagagccactgcctcggctgagtccttctcacttccagcagaattcgtttgatctcttccagctggtctcttctgtctcttctgcggaatttaccttgtgcttgtctgttagctcaaccttcccgcaagcaccgattttcacatcttacttcctgctaggaaacttgccattcatcaggtgaagttccgaagtcctcacttgcattatgaatgacaagccctcacacaggtggaagcattcagcactgtcactgtcctggcctcactgagcaacactgtgagcctgttaggacacagggacttttcagacaaacaacaaatcgtttatcattacagaagcactatcagcaaagactagtgcaggaataccgttgagacaaacaaaaatgaaaggagagaaatttcacattcctcctgcccagagatcacgaccatgaagccagagtgtatatcactcaggatcatttaatgacctgcgtatatgaatacctgcgggtgtgttttccccgtaattcaaaattagatgactataaatactattttgtgtcttgctttgttcaaytagtgctattccattttctgtttcagtaattttttattgcttctactctgcagatgattttaaaatttctcccatttgatccccagattttattataacaaggtagtccaaaccagtatacaatacaggaccactcattgcattgcattttgcttttaagtttgttttcagctagcaccacttttttcttttggacgcttgttgaagagaccagatcagttgtcctgtagaatgtcttaccttttggatttgtctagttgttttattggatctgtttctccatcccctgatttcccttaaagtagaatttgtatgcaaagtcttgatgaattcacacgaaacatttttgcctagaatacttcataggtgaagttggtacttcaggttgcattaccttagaaatagatgcccagtatctggctgtcccaccactagtgaggttaagattgacctctggatagggcaatgagagcctgagcccattgtttttctccttgcaaccagagaatattctgagggtcaatactttggcagtagtacaaatatgtcagtcatgcatctaatgttttaaaatcaatggataatctttgcctgatttaataatgtcattcaagttctatgaaaggtttttctctattattttttctacttttataaagtggccttttattgtaaattttagaacttttagctcaaccactggggctatttaattacccaggaatatagtgcctgggtaaaaacagaaacaagatgctactttttttccccctttactttctaatttcaaagtaagggattgtttaagagcttctgcagaagttgagaagttgggttttatttcccttttctgtttttgagtatcatggtggatgcatggatttccgttgattcacttacagtcattattctgtttgttcacttgtcataatttggccaaagagagctttcttaagttggctctcatgccattttgacatgacttactaatctttgaaagcctcattgcttttttttttttttttaattacagaagatgagcttttatctcaccaaacaaccgtaatgtgttgatatctccatttggaatgaggaaactgaggcttagagcagatactttgtaaactaatgtggctaataaatggcattgttgtggtgcaaactcatgtgtgcctgactccaaagtctttcccacgatgctggaaccttccacattttttccttagagcccttcccaacctgccatagctctgatggtatgtcagagctgagcctgacataccagggccagctgagccttctcgctccctctcgcctgacacggcactgctgctgtgtgctgtgccaagcttggtcatcatcctgtcccccagcctctcccagtccctggctgctccccttttcccattcttcccttcataagttctaggatgataatattgacttagtgtttgagtgggagttagatgtattatataaaaatgtccccagcatcaaaatgactcagagtatgactgtatttttaaattaaatatcaagacctatcatctgacaaaacatatgaatgacaatgagatataatatttgaaattagatccgttctggggaatcaaagatattttgtaacagtatacacagtaggcattggtaagtaaatgagaactctatgagctgttttctggaaaagtttaaaataaaatttgtcaaatatcaaatgattgttataaaaaaatcagtggaggcagtatccttggaaaaatccagaaacagttttgtttgtttgttgttttttacatcaaggcagatcagcaggtgaacagtgtttgggaaatataggacgggagaccttctctcaagaaactacataaacaactgtaattaattccattgtgaaaattgcattctggtttccaatatctatacctcagcttagaggaagcaaactggctggacccgcaggtttctgttttctctttcggaatattttgctttaggatgccttagacagtcacgtgcttcccagccggccacagtcccgcctctgcctggctgtccacttgcctccgtcacactcttcttccccctctggactcttagaggcctgggtctgtgagccctgcatccggcgttagaatagcacggtggtgacatgctactggaacacaggaagaatattacatctgttttcatctcatccttttgaaaagtacctttttatttcagaatggttttagatttacagaaaagctgcaaagatggaacagagagttcccatgtatccctcatatcagttttctccattgtcagtgttgtacattactagggtacatttgccacacaataagaaaccaacgtgggtgcgtcactgtgagttaaactctatccttgattcagattttactcatgtatccgctcctgtccttttctgtcctgggtcccattcaggacgctcgatgacatctatcctccgggtcttcttagtgtcttccggtttatgatggcttgtctctccttgtttttcgtgacgttgagagtactgaggagtgccggtcagatattttgtagattgcgcctcattttgggtttctctgatattttccttatagtgagaaggagtcgacgtgcccttcttatgccgccgccgcaggggtgcccacctgacttgttggtgatgttgaccttgatcgcctggccggggtcgtgtttgccaggtttctccattggaaagtgactctttttggtcccctttctatattctcttcctgggaagcaaatcactaagtggagctcacactctagggctggaggcaggggctgggaggatgggaactgagctcccccttctggtgggggtgcatctacagacattatttggaattctttacgaaggtcttgtcccggttggccttgcttctaggcccgttcagtggatagcgctaggaaacctatgcatctacacatctctgtaattatttctgtatttatccatctggttaaacatgagtgtaactgagtccagtcccacagggctcattctagctttcctgtcttgtttatctgtaacttccctctcyggccgtgagaaactaggtcccaccagctactcttcgttgacttatttgactccagtgtgcatgtaaagcactttcagagctgctcctctgcaccctgtgagaagcagctttaccaactagagtacacagtttctgtggcattccttttttaaaaaaatttttatttaaaaattatttttaatttttgtgggtatgtagtatgcagttccttttatctttagccctatggttttcagtcaaaacattgtcttccaaagttaccatctcatctgttttaatacttatttttgcattcttttaaaaatgtactaatatatactttaaataaatgtgcctattggggatgtattctcaaaagtgtttttttaagctcataagagtctgcaataaaaaaatggaagatctgtggatatagattgtggtgcgggtgatgcaaaaatatttacttttgactttgggatgcttagtgatttattgagttgagcagatatttattgagaaagcagcatgatgcagtggaaggaagaaaggctctgggggcgtagatggccctaggttcacattccagcttgatcacctacgaactgtgtgacatcaggcaggttacttaacttgtctgcataattatttcctccagtgacgttggttaatatgcatttcacaggatccctgtgaggtgggaaggtctagacctggatttgtgtctttacatgtatccagataccagggatagtccacactcttgctactcacagtgtggtttaccagctaagaacatcagcaccccccaggagacctgtcggaaatacagacccttaggcccctcccagacctcctgagtttggaatcacattccacagacccccaggtgactcaaatgcatgttcacgtgcaagaagccctgctttgtactgtgctttgagaagctgtgagccatacagctccccagctccacccattcttctctctctctgaattctcctgggggtccaggcctcagctgcactgttgctccccccaggagtcccgcactccccgcttgccctgtgccgggtgttgccgcgttcagcctgctgtgctggcatcatctgtctccctctttccgtctcactgtggtgtccttcattgcaagcactgtatctggcacgttgaatgtgctaataaatatttgctgaatacaagaacgtccttggtgctaggccaacttctcagactaccagaggagagacatggttcctgccattcaggaaatctcagcccagagaggaggcagacttggagtggacagtgacaccatacgattgtaaccacccaaggggttcactttgcctgctgcctagacagagcggattcattaagacaggggaattgcaatagagaaagagtaattcacgcagagccaactgtgcaggagaccggttttattactactcaaatcagtctccctgggcattcggggagcagagtttttaaggataacttggtgaaagccagtgagccgggagtgctgattggtcagggctgaaatcatagggagtcagctgtcttcttgtgctgagttggttcctgggtgggggccgcaagatcagacaagccagtttatcgatctgggtggtaccagctgatccatcargtacagggtttgcaaaatacctcaagcagtgatcttaggagcggttcagggagggtcagaatcttgtagcctccatctgcgtgactcctaaaccataatttttaatcttgtggctaatgttactactacaaaggcagtctagtccccaggcaaggaggaggtctgctttgggaaagggctgtttaccgtctttgtttaaactataaagtttctcccaaagttagttcagcctatgcccaggaatgaacaaggacagcttggaggttagaagcaagatggagtcagttaagttagatctcttttactgcctcagtcatcattttgcaaaggcagtttcagggtcaccctgtggatgctgtgaatgctctgaggaggaagcagagacagtttccctagaatgggtgttgcttaagctgagccttggagactagatggccagtgcaccaagcttccttctcatcttgctgcacaagatgtgctggggaaaactagccttctctcgtttctggaattccaccacagggcgagatacagnnnnnnnnnnnnnnnnnnnnccgtgacaaatctcgcgttgttttcttttgttctgttctcttttgttttatattctgtgcttttgaagagatatggctgttttaaaaagcaacagggagctcattaaatgaaatatccctaagggttggattgtggcccaaatgtcaatacgtatctggtaaggaaagaggaaattaaaacccacatcactgtatttcatctagatagtccttgataccgaggcagatgcatctcaatagcagggctgcataccatccaaacagcaaaacaaaaccaaacaaaaaacaaaaacaccccggggttcgaattcagcctttatttcctcagccccttttccttaggaaagtcaccgtgctgctctgggcctcacggctctcatctgcaaagtgaggaggaggcgcctgccctgccctctttacaggctttttaaggggctccaagtgaagaaaggatttgtgtgttttaagactgcagtgctcttatgttaacatcggctcgtgttagggttctcaattccaaagctcattcccgctttatttgcaaaatattatcctacatttgtctcaaggtcttctctttcttctctctccttttctctatcttctcttcctcgcccactttattctcctcctcttttcttcctagtgtcctgatccagtcccctcacttgttatcaatcccacagttttctgtggagaagtgatgaagcatgcattcatctatgatgcactcacctatgcatgtagtttacatttaccgagtgttactctgttcctggcaattgctatgcgctgtggatataaaagatataaaatgacattttctcaaaaggagttcacgcgtggatcgttgtgtgtgttttcatgtcacaggtatgatctgtatagtggatcgttgagtgttttagtatcacaggtgtggtctgtacgtgaattgttcaatgtgttttagtgtcacaggtgcgatctgtacagtggatagttgagtgtgttttagtgtcacaggtgtgagctgtatagcggatcattgagtgtgttttagtgtcacaggtgcaagctgtgtagtggatcgttgtgtgtttgtgtcacacgtgtgatctgtacagtggattgttgagtgtgttttagtgttacaggtgtgatctgtacagtggatagttgagtgtgttttagtgtcacaggtgcaagctgtgtagtggatcattgagtgtgttttagtgtcacagatgtgagcggtatggtggatcattgttttagtgtcacaggtgcgagctgtacggtggattgtcgagtgttttttagtgtcacagatgcgatctgtacaatggatcattgagtgttttagtatcacaggtgtgatctgtacagtggatcattgagtgtgttttagtgttacaggtgtgatctgtacgatggatcgttgagtgtgttttggtgtcacaggtgtgatctgtatgatggatcgttgtgtgttttagtgtcacaggtgttatctgtacggtggatcattgagtgtgttttagtttcacaggtatgatctgttcggtggatccttgagtgtgttttagtgtcacaggtgtgatctgtacagtggatcgttgagtgtgttttagtttcacaggtatgatctgtatggtggatccttgagtgtgttttagtgtcacaggcgtgatctgtacagtggatcattgagtgtcttttagtgtcacaggtgtgatctgtacagtagaaccttgagtgtgttttagtgtcacaggtgtgatctgtacagtggatcgttgaatgtgttttagtgtcacaggtgtgagctgtatagtggatcattgactatgttttagtgtcacaggtgcgatctgtatggtgggtctttgagtgtgttttagtggtcagaggtgtgagctgtacgataggttgttgagtgtgttttagtgtcacaggtgtgatctgtgaagaatacatggtcaggggtgtgtaagtgtaagcatacaaatgctcatagggattttaaagcttcaaagacagttgataccagagctgggtattgaaagatgagtaggtattgaggttcctttgggaccttccagtcagcgagtgccctaggtccaggcacagaatgtgcctagtgtatttcaggagcctcagttacagttggcctctgtgtccatgtgggttccacagctgtggattcaaccgaccttggattgaaagtattcaagcaaaaaaactgcatctgtactgaacatgtacagacatttttcctatcattagttcctaaataatacaatataactatttacatagcatttacattttattaggtataataaatctagagagtaagttatacagaaggatgtgcatgggttatatacagatgtgctattttatatcagggacttgagcagttttggtatccaagagagatcatactgagggagggggatgactgtgggtggggtgtgaaggggtgcgggctggggagagactggataggaggagttaggaaggcagagaaaggaggacagtgaatgtagaggcggaaaagatagacaggggcctttgccatactaaggagtttagattttaaatgggtggtcctgggggttttaagcagtagaatgtctggatggaattaattttcagagagttcaaccctgggagcgctagggttacaatgatggattaaaaccgggattagaatttgtggctccaaggaagcactggagctgggactggaccctgtgttttctgaatctgctttttggacttttcccagaatgttgccttgtgcaaaatgacaaaatgtgttagcttctacatactgggagccttctttgcgttgggcactgtgctgagtgctttgcatgcattgctagtcattctcagaccagccctgaaagataggtattacagtcttcatttgcagcgatagtttgtccacaatcgcacagcttggaggtggccttggtcacctgacctcaaagtgcatgctcttcccattagcacagcgggcctcctgtggactggtttcagcctttccagtggactttctagcagtaggcacaattaccaaccaagcttttttttttttttttttttttctgaaagtacaargatcccttctgcccttatggaactttgtgggagagtgtcatttctttccttctggctcaaatctgaacttcttaaacttgccagtgatataaaaaatggacagtttgtgctagtatatgttttcagctcaactttgaagatttatatccaagacttacattcagctgactcaggtaagaagctaggctttgcaatgcctacaacrtgaagcttctccctattctgaaggcaggtcactcwgtttgggtgaaattcgtgttcatgattttaaagcttagatctgcaagaatctaggccttagttctaagtgtgtaatttaaatttattcccgtgggggaaatagccaatatctccagtagaaaagcacttcagaacacattttcacattttagattgatgagccagggatttgaaagattatttagaaaatttcctccaagcaactctggaatgaaggtatatgtggcagaggtgtttgaaacctgtctttccccagtgaaatacttgttttacttctgcaagatttaaacagccattcagctgggcatggtggctcacatctgtaatcccagcactttaggaggccgaggcgggcggatcacttgaggtcaggagaccagcctgaccaacatggtgaaaccctatctccactcaaaatacaaaaattagccgggtgtgatggtggatgcctgtaatcccaactactcaggaggctgaggcaggagaatcatttgtacctgggaggtggaggttgcagtgagccaagattgtgccactgcactctagcctaggccacagagggagactccatctcaaaaaataaataactaaataaacaaacagccattccttgggtgtttggggaaaatatccaataaatagtggctagtagtttttatatgattagttggaatagttaatagttacccatgtgacaagcagttcattcaatgcatctcatgttatgtctggttcttaaacctcgtcggagcaggttttgcaggtattgaagcgaggctctgcataatggggctgccctgactgcacagctggtgcgagggctgtgggcgggcagcttgctcctcccctgcaccatgctgcctgtttttactgctagaaaacacgccccaggcactgtgccaggaggtttctgcagatcaccttgctctgtggacgattgggcctgttgactgcagaagtcagccagtgacttcttctaacagagtccttttgcctacgttgaggtgatcatgccatggaatatggcacccatcactctagcatggctgtggggaaaccattttcagttaaataagtgaaatacacgtgtgccactcttgtgaccttgctttaactttccgaaaccctttcttaggcttgacaatttactcagcctgcttggccttcattgtctggatctggatttgcaaattatagatgttcagggaacctgtgttgaagcctggggttgattagaaatgaacacagctgatttagagtcttttgcttaaccaaagcttcaagatgttaacatttataaacaagagaagggataccatattttttcaaatktttgctatatgccaggtaccatccacaatcttttcaaatcctcattttagtcctgagtgatgcttctcaccctttggtggtggctaggcccagagaagtaagtaagtgatgtgttagtgtcatgttggaaagggtaggggaggagatttaaactcagggttacagactctcagacctgtgctccttccactgtgctatggggtattagccggtgacctctgccttttcgtggacagcatagtatttattgggggaaatttggggctgggcaagcatttgggctttctgttaggttgttcttgcattgtgataaagaaatacctgagactgggtagtttgtaaagaaaagaggtttaattgcctcatggttctgcacaggctgtacaggaagcatggtgccagcatctgcttggcttctggtggggcctcaggaagcttacaatcatggcaaaaggtgaagccagagccgatgtgtcacatggcgagagtgggagcaagagagagattgggaggtgccacacactttgaaacaactagatctcacgtgaactcacttgtcaccaaagggatggcgccgagtcattcaggagggattggtccctcatgatccagacacctcccactaggacctacctccaataccggggattacatgtcaacrtgagatttggtggggacataaatccaaaccatatgaggctttaaagtcagacctgacttcaccactattagtatcccccactggcaaattactgagtttctgtgagcctcagtttatttgaaaaataagaataatatggatctcaaccagctcttgtgagcatggatgaaatgcgtatgagagcatctggcacgttgtcggccctcaataagagttagctttgagtttgtttcctgtctgtcttagtgatcaaagcctgagcgaatgcacttgtgccttggtgggggcagatgctgagcattgtagaggctattgtaacccccaccctctcctaatctggcctctccgagagactgcccgttcttctcatttgagaacagggattaacagcagacgtgactttggtcctggacactgaacttgagaatccgattgttggagaagccctcaaccatgcagcatctgtttggtggcagcaaaaacacgctgtagtcctccaaaggtttgctttaccctctattcgtctctgttcttatatatttgaccttctttctttgaaaggctgggcaatgaaacttggcacgttcttgaatttgctaagggtttaaaaaaagaaatctacttctcaaatagcaactttctagagtgaggaaggagggaaagccatggcggagaagaagctagcagtttgttcttccgcacagctttttgcctctttctctttgcagcctccttttgtgtaacacaatgaccaccttttctcaagtaagatctggttcctccaggctctgcctctgggtgtacctgggcggttgggcccagtctctctgaaccaattaattcctgcttgtaattccactgctcttcatcccttaatagggattagtcattgttttgttgttgttgttgctgctcttttgagatggagtctggctctgtcgcccaagttggagtacagtggcacaatcttggctcactgcaacctccggctcccgagttcaagcacttctcctgcctcagcctcccgagtagctgggattacagtcgcctgccatgacgcctggctaatttttttgtatttttagtagagacagggtttcaccatgttggtcaggctggcctcgaactcctgacctcaagtgatcctccagcctcagcctcccaaagtgctgggattacagacgtgagctaccgcgcctggccggattagtggtggttgttattatagccgttttctatagagttttagtaacttgttcacttctggtttccgaccagagctcctggtataggacagtggtcaacaggcgcttgttagctttgatttctctgttttctcagttcggttgatcacatctttatgagtatttgtgcttcaaaacttaccaagaatgtggcaatgcctaagatagatgagagagctatggaggccgtgcgtctgccctgtggaacctggctgttattcccggactggcatatgtggctgctgctgaggaggaggagtttagtttgtgtgcatgaggtgtggagaggaggggaagataagaccatagagagagctgaaaaccagatggcttgtgctaagagctgcaaatgcgaagcaaaagatttgggagattgtttttatttgtgcttatttttttcctatcacaaagtaatgaatgatccttgtaaaaaaaaaaaatctggaaacttgggaagactctaaaggagaagggcaaaacattccccaaaatctcactacccagaaatgggtgctactctcattatggcctatttccttccagtttttctccacgcatctctttaggtagctgaaatcagaccttaggagccgtctaggcctctattttactaaaattatgttataagcattttcttatcctatgcaagcttatttttaagttactgcttggtagaactgtaacgtgatttataaaatgcctcccctcttgttcgaggcttgggtcgctagtttttcccagtgataacactttggcaagaggagctggtcttctgaaatagtgagctggcagaacttctaaggcaaggagttgtgtatctgatcttttagggcggtcacttctgtggccatgcggaaacgaacctggcaggaggaattcctggagacagcagggaaactgttccttggttccagcattctttcagcaaatatatgccaggcatgtgttaggccacttaggaagctgttgaaagagcacaggcagagaaatgattcaattttgcagaaggcagttttagtgaaggtggaaaggagggaattgatgtgagaaggatttggttgaaaaacaatatttgtgtatggtatgggttccatacacagaagcatttgtagtgttatttgggccatgttgtggatggcaaagccatcccctgggttagaaacaacgggaggagggctggtttcagagggtatttgggaagttacagggctgcctgttggccattcaggtggatgtgtgctactaacgaagtcaatttcagctggaattctggagggaggtccagcctggtggtatcaattcgggaccatcagctgtggatagtggtcaaattgtgtgtggttccttggaatgaatcaagagagaagaggagcaaaggtagatccctggggaacatcggtgttgaagggggcagtcaggaaagtgaagagagacttgaaggaggaagaggtcaaggacatttcaggtctgggtgccagcaagtgtgaggcagaggctggtaaaggggaatgccatgtttaaaggcagggataggccagtgtggtcgggagatctgtgccatcaaggtcagagttggaggggtttggagttttgcagggagcagrgattcagtarggataaagatataagctgtgcatagaaacaagcttgtagcagaatagagagttccaacttcccaacagctgtgctgagaagtaatgtgttttggagttcagaggagggagatgttacttaatccgagggcccattagggcagcagtcagaggatcaggagagatgcattcattcacgggtttttattcatgctgtcatatatttattcaattctgtgtttgtgcgttgattttattatctgtatgttttgtgtatctacttatggataccagggattgtttaaaatttaaatccctgaaggcagtgacactgtcactcattcttgctggggaaatctcccccaccctcaacctgctgaagaatattctattcctgctcgcacatttagcttctccttctcccatgatctctgggaggccaggatggggagcactattttcttggctgctcctggatattttgtggggagtaaactggaaaaatgagaagagccagatgagcccagaggatgtacaggtgtgggaggagcccagttcctctcccgaccacactgacccatcactgcttttaagaacctgtgggattttgggaggccaaggcagnnnnnnnnnnnnnnnnnnnnnnnnnnnnnnnnnnnnnnttgagcccagaagttgagaccagcctgggcaacatggtgaaacctcatctctacaaaaaatacaaaaattagccagacatgatggtgtgtgcctgtggtcctagctactagggaggcagaggtgggaggatcacttgagcccaggaggtcgaggctgcagtgagctgtgatcgagccactgtactccagcctgggtgacagagcgagaccctgtcttaaaaaaaaccaccaacagggaaaggccaggacgacgaggagaagttggtatctttttgttagctccagagtttgtgctggtgaaagaaggttaggatgtagaaaagggatttagagacatacagtggctgctcttcagtattcttcaagggtccaagtgaagaactggaattttttcaatgacatgcaacagttgacctgtgtttcaggaagtatagccttgagctgagtctcagccatgtgggaccctcggaagcagctacagcttcttagtataggtcgagcgtcccaactccgaaaaccccaaattttggagcatttcagattttccgagttgggatgctcagccagtacgtatattgcaaatacagttgtcccttggtctaggtggggcatcggctccaaggcccccgcgtatactcaagtactctagttggccttgcagaacctgtgtatatgacaagtcagccctctgtttatgtgagttttgcatcccacaaatactgtattttccacccacgtctggctgagaaaacccgcatatgagtggacctgcacaggtcaaacctatgtagttcgaggggtgactgtattcagaaatctgaagaaatcccaaatctttttaaaacacttacggtcccaagcacttgggaaaagggatacgcaatctgtagagtaccgtgtagagacgagtatcgagtgggtgtggttgacctgatgctcactcccactggaataaaaataacagcatttatctctgttgtgttttttaactggctttcatccatagatttattgatttgcttgattcaaaaaaaagggaaagattttgcaatgttgggtttaatttttagtgttaaaaataattaagaagacctgatgattctgcacctgagggcaagtgtttcaccagctgtacattcccactcacactgtcaagatcccagcattttaggattcctgtttttctacttgcttcaattaattaagagtaatgaagagatgcagaaacctcgtatttggtgaagtatacagtgaagaagaaaaggatacttataaattgtattgcttatattacaaatataatattaaatatgagtagccatttaataacttttttttttttgagacagactctcgctctgtcgcctaggctggagtgcagtggcaacctctgcctcccgggttcaagcaattctactgcctcagctacccaagtacctgggattacaggtgcccgccaccatgcccagctaatttttttgtatttttagtagagatggggtttcaccatgttggccaggctggtctcaaactcctgacctcaggtaatccacctgccttggcctcccaaagtgctgggattacaggcataagccaccatgcccagcctaataacttttaaaacaagacagaagtagttctattgagcaaggaacagtgataaaaatgtatagaaattgtacagtgactattttgtagctatagaaattctttaatggggttctttaaatttgctttgtaaattggtcaaattaagtttgagaaaatgttttactttgaagtttgtttagtaatttataattttcacagggctttattatcttttgcattatttgagcttcataacagacttgtgacaatagcttttgggtaacaataccccagcgtcacagacaaggagcctgaggcatggaagggtcctccttggcagccaccccttctccttgacttttttgttggctaattcctaccctcagtgtctggggcaggccttgagggcctcctggactccacaacagcatcctaattgcaccctgagcctgtagttcctctctgctataaagctacttaagcacttcctaaaatatatatttgtttgcatcagttctcacctaaaacccttccccatctccccatcagctgcgaaataatgccgggttcccgagcatggcgcccgcgacactgcaccacgtggcactgcaccacacagtccccgcccctcgctggtggaggcttcccctggtcctgatgtgggartgcggctgagccctgggcaatgacatgtacagggtgggcagcatgaccagaactccgtcttctccgtctggtgggacacggcaggagtgatggcctaccttgtactcgcaggatcagaccacaccctggggtaggtagaacagcaaggtggactcggtcctcagccccctagagctgccctgttaggcctgaattgcctgggcgtggcagttaagggagagagaaacgcacttccacagcccttaaggcactggcattttggtgatggcgtagcacctggatctatgtcctgaccaggccacctgtcyagcctcctctgtgcaagtgggcctgtccagcattccctgccgtgccgagttctctgactccacgtgcgtgtgtccygctggactcagagccccgggagggcaggggtgcgtcctgtccttatgtgtgctgtgtgaggagtgcctgtcaccagtgtgcctgttggatgcttsccatgtcttctacygtactcagcgtacatggtggtctctggctatgaaaaatgatcaattctatagctgaattgatgactgaatctgagaacatagtgggattataggtattagcctgccattattggcaagctatctcatggaaagagtgctctyctgtctagaactggtatcatgaacttaagaataaaaaattattttatttttrtttattgcttctttgcaaatctaaaatgttgtgttagcagtcaggagagagggtgctctggggagggatgggctcggtgacagagcagacaggagagggtggtgggcgcaggcatgttctttttccagctgggtgctggatttagatgtgtgctttgtaataattcatggaccttattcatattttgtgtgattttctgtatatgtgttttacttcattataaaaatggtatttaggatgcttgtaatgccagcactttgggaggccaaggcaggtggataactgaggtcaggaggtcgaggccagcctggctaacatggtaaaaccctgtatctactaaaaataaaacaaaacaaaacaaaaattagtcaggcatggtggcttactcctgtaatcccagctgttcgggaggctgaggcaggagaattgcttgaacccgggaggtggaggttgcagtgagccgaggttgtggcactgcactccagcctgggcaacagagtgagattctgtctcaaaaagagaaaaaaataataaaggtatttaagagatagctaattttaatgattctaaaatataaagatggtttaaaaaatgagcattacttctaccaaatagacaarcagtgtcaacttttggtgaactttcttccaattctttttttttccttgtgtgttgcttttcaaagaacagtataacacttttaaaatggaaaaagagccacctgccatatcttcggtaaattagactagtgtagacttaaaaagaggaattatctgagatgtcactgggcctcacggatatgtctgccytgtttctgtgcaggttcactgctgtcctgctttcttgtcagctgtggccctgcccccactctcagcccacgactgctgacattggcagtcagttctccaggcccggtcacagggtagagaaggccagtgctcagaccaatggatcttctcttctcnnnnnnnnnnnnnnnnnnnnnnnnnnnnnnnnnnnnnnnnnnnnnnnnnnnnnnnnnnnnnnnnnnnnnnnnnnnnnnnnnnnnnnnnnnnnnnnnnnnnnnnnnnnnnnnnnnnnnnnnnnnnnnnnnnnnnnnnnnnnnnnnnnnnnnnnnnnnnnnnnnnnnnnnnnnnnnnnnnnnnnnnnnnnnnnnnnnnnnnnnnnnnnnnnnnnnnnnnnnnnnnnnnnnnnnnnnnnnnnnnnnnnnnnnnnnnnnnnnnnnnnnnnnnnnnnnnnnnnnnnnnnnnnnnnnnnnnnnnnnnnnnnnnnnnnnnnnnnnnnnnnnnnnnnnnnnnnnnnnnnnnnnnnnnnnnnnnnnnnnnnnnnnnnnnnnnnnnnnnnnnnnnnnnnnnnnnnnnnnnnnnnnnnnnnnnnnnnnnnnnnnnnnnnnnnnnnnnnnnnnnnnnnnnnnnnnnnnnnnnnnnnnnnnnnnnnnnnnnnnnnnnnnnnnnnnnnnnnnnnnnnnnnnnnnnnnnnnnnnnnnnnnnnnnnnnnnnnnnnnnnnnnnnnnnnnnnnnnnnnnnnnnnnnnnnnnnnnnnnnnnnnnnnnnnnnnnnnnnnnnnnnnnnnnnnnnnnnnnnnnnnnnnnnnnnnnnnnnnnnnnnnnnnnnnnnnnnnnnnnnnnnnnnnnnnnnnnnnnnnnnnnnnnnnnnnnnnnnnnnnnnnnnnnnnnnnnnnnnnnnnnnnnnnnnnnnnnnnnnnnnnnnnnnnnnnnnnnnnnnnnnnnnnnnnnnnnnnnnnnnnnnnnnnnnnnnnnnnnnnnnnnnnnnnnnnnnnnnnnnnnnnnnnnnnnnnnnnnnnnnnnnnnnnnnnnnnnnnnnnnnnnnnnnnnnnnnnnnnnnnnnnnnnnnnnnnnnnnnnnnnnnnnnnnnnnnnnnnnnnnnnnnnnnnnnnnnnnnnnnnnnnnnnnnnnnnnnnnnnnnnnnnnnnnnnnnnnnnnnnnnnnnnnnnnnnnnnnnnnnnnnnnnnnnnnnnnnnnnnnnnnnnnnnnnnnnnnnnnnnnnnnnnnnnnnnnnnnnnnnnnnnnnnnnnnnnnnnnnnnnnnnnnnnnnnnnnnnnnnnnnnnnnnnnnnnnnnnnnnnnnnnnnnnnnnnnnnnnnnnnnnnnnnnnnnnnnnnnnnnnnnnnnnnnnnnnnnnnnnnnnnnnnnnnnnnnnnnnnnnnnnnnnnnnnnnnnnnnnnnnnnnnnnnnnnnnnnnnnnnnnnnnnnnnnnnnnnnnnnnnnnnnnnnnnnnnnnnnnnnnnnnnnnnnnnnnnnnnnnnnnnnctttgcagtgtgcttcgatcagtgagcttagatcagcgtgcactaaattgccttaaaatagtatgaagttagggctgtacagtttcagaattagcagacactaatgtatcagtagtgaagctgttttctgtctatcgaataacagctttgggaagcggccattctcaaacatatttgtgaaatcgaatttagagtagtgggcagttacttttggaagccaacattcccaagccgtatttttttttttttttagttgaaatatgtagaaaacagttgaatagaccaaggtcttagggaaaggcaggcttcggaaacatttgcctgcttcaacccagagactataatgtaaagaatttttggataaatgtatgcactggaaagcaagatttccgggtacctgaagcaaagaggaaattcaaaatctgagtgattaacagaaactaaagccaaagtgcctccttgtgataaactttgccaaccagcactaggcttgtatgctgatgtaaagaagggagttcaggctgcagctccctggtactgagtcatgaagggcttccctcagattggaccaggaaagtctggtccccagactggggagaggcagggaagcatgccatggcctagcacctgaggatgcacagatttaccataggaaacctgcagggagcagccaacccaggtagaaaactgctccatagagatacttctctggccacagagacatggacttcccataagaagtaatttctgtggagcacgagtgtacagccacagacaacaaactacacaaggaggcagaccaccatgagggggaatctacaggggcagcagatgggagaatttatacctcaggaaagacacttttaaagaaccctgtttgatatggtcagaatggtattagaagaaataaaaccacaagtatgagacaaaagcaagctaatttgaaaaagaacctcatggagattctaaaataaaaaatatatagtgacggctgggtgcrgtggctcacacctgtaattccagcactttgggaggccgaggtgggtggatcacttgaggccaggagtttgagaccagcctggccaacatggtgaaaccccatctctactaaaaatacaaaaaacaaaacaaaacaaaacaaaccaacaaaacttaactggacgtcttgtcaggtatctgtaatcccagttacttgggaggatcaggcaggggaatcatttggaccctggaggtggaagttgtagtgagctgagatcacaccactgcagtccatcctgggtgacagagcaagattctgtctccccatgccccccacctctcaaaatagatatatggtggttgaagtaaacaaaaacttaaaacacagagttgaggagttaaagaagagactagatgcaattgaagacagagtaatttggaagatagagcttagggaacttcacaaaatgggttacagtgagacaggtagaaaatgtgaaagaatagttgagagcatagaataagagtctagttggagatccaggaatagaaagcagaaaaaatcctggagagaaaaatattcaaagagatggcaactgagaattagcctgagaaatgcatgcatgaggtcttaaattgaacaagtacatcaagttttgaattttcaagtttaatgggaatgataaatcctcagatccaagaagctgaacaaaccccagtcaggatggacacacacacacagtcacataagttaatcaaattactgaaaactggttgtattgagaaaaatctttagccagaggaaaagccacaaattacatgggaacaaaactgatgataattgtagacctcttgttggaaaaaatgctcctggaagacagtggaatttgatctttcacttggtaaaaaaaaaaaaaaaaatagctgttaacttggaattctatatccagcaaaaatatccataaaaaaatacaaataaagacaaaagctgagagaattcctctccagaagacttactctgctagagtgcttaaaggaggttctaaggcagaaaaaacaatgcctcagatcttgaaatgtattagaaatggtagaaatataggtaaatatgagaataaatagaaatttatttttgaatttttacgtttccttgaaggaatattgatcacattttannnnnnnnnnnnnnnnnnnnnnnnnnnnnnnnnnnaaatatatggtggtaaattcttacattatatgtaaggttatatgatattatttgaaaatagattgtgatgagtttaagatgcacattgaaatgacagaagaaacacaaaacaaaagaatacaaagtgttatagctgataaatctatataaaatagaatcctaaaaaattcaattataaaataggggaggaaaagaagagaaaaggaacaaaaaagagacgggagaaatagcaaggtggtagaagtaagctcaacagcatctataaccacattaagtgtaaatgacctaagagcttcaatatagtggtagagactatcatactggccaaaaaaaaaaaaaaaaaaaaaaaaaaatcaagatataactataaattgtttataggaaattcatttaaatataaaaacatagattaagtagaaatggattggagaagatatattttgcaaacacttgtcataagaaagcaggaacaactttattaatataagacaaagttgaccagtagtattatcaggaataaagagggacgttttgtaatgatgaaagggtaaattcttcaagaacatgtgacatttcaaaatgtgtatacacccaataacagagcttcaacatgcatgaagcaaatagctgacaaaattgaaatgagaagtggacaaatccataattatagttggagatatcaccactcttggtaattgatagatcaaatagaaagaatgtcagtgaagatatagaagactttgacactcacaaccaatttgatctagttcacatttctagattgcttaacaacaacaaatatacacattattttcaaatacacattgaacatttggtaagatagaccatatttggggtgataaatcaagtctcaataaattttaaaatatttaaatcacatacagagtatactatgtgaccacaacagaattaaattaaaactcagtaacattaagatacattggtaagccccaaatatttgaaaattaagcaacacatttctaaataacccgtgggctccaagaagaaatcacagggtaatttgaaaacattgtgaattggctaaaaataaaaacacggcatttcataatttctggatgcaactaaagcattgcctcaatggaaatttgtagccatagatgcttacactgggaaaggagacttgtttcaattcatgagctatgttctgtctcaaaagaagaaatcaaagccaaagtaactagaaaggagaagaaaataaagatcagaaattaatcaattttacaacaatggagaaaacccagtgaaaccaagagcttgttctctgaagagatcaataaaatgcatgcacctctagccagacttaccaagataagaagacataacatatcaatatcaggaatgaaaaaggagacatcagtctttcctacagacattagaaggataataattgtaatggaaaacttcatgtgagtgaatttgataagttagatgaaatagaaaaatattttgaaagatgcacatcaccaatatttattgaagatgaaacggaatgcctaaatagccctttctttaataaaagtcagttcattattcaaaaatatttccccaaataaaatattagtcacagaatttcactggtaaattttatcacattataataaagaggaaatacaatttttataaaaattctttcagaaagtagaggagggaacatttcccaatttgtattatcaggctagctttatcctgacaccaacatcagagacactatacgaagattacagaacgatgtccatcttgagcatgtatgcaaaacccttgaaaaattagcaaatggaatccaatgatatatttattaaaagaagaaaaagaatgcagcattctatgaaatgggtggttcattgtgatctagtgagatttattctgagaatgcaaggctggttaagtattcaaatttcaatcagtgtcattcactatattaatagaatgaaggagaataaaaaccatgatcatagcaatagatgtataatgagcctctgacaaaatgcatcacacatttatgatacaaaacacttaggagactggaaatagaagcccacttgctaacaggcctctgtgctcaacagtatgcttaatggtgaatgctttcctcctaaggccggtaagaaggcaaggatgttcatattcattacttctatttcatattgtgctgaatagtctagttagtgccataaggaacaaaaaatgtgcccagattggaaaggaagawataaaactcgttattcacagaaaacattactatgcatgtagaaaatactaaggaatttacaaaaagtagagtaatttagcaaggtagtaggatacatgattaatatacaaaagtcaaacctatktctatatattatcaatggacatttggaaaataaagttaagaataccatatcatttataaaaacaaaaattatatacttggggataaatttaagaaaagatgtgcaagaattgtacattgaaaattacaagaaaatatacattttctcaagacaattataggagattgtctattcccaagacaattataaaagattgtcttgagaaaatgatccaaataaatagaaagacactgaaagatatacatggctatgggtagtaatacctcatattaaaaatgacagttcttcccaaattgatctttatattcaatgcaggtgtaatcgaaattccagcaggcttgtttttttttcttagaaattgattgctttattctraagtttgtatgacgtatgtaggaactaaaatatcccagacaacgaagctacagtaattaacacagtgtgatattggcataaggataaacatagattaatggaaacaaaataggaagtccccattaatagtaatagacccatccataaatagtcaattgattttggactaatgtgccaaggtaattcaaagggggaaggattggctttttcaacaggtgatgctggaacaactaattatttatatgccaaaaattaactccgacccttaaccccacatgtatataaaaattagatcaaaatggatcatagacttaaatataagagatataaagcagtaaagtttctagaagaaaacattcaagaaaatcttctcagtcttgagatgggtagagatttcttgggacaaaaagtctaaaacacaaaggacaaaatggtaaattagacgtcatcaaaattaaaaacttctcttcaaaagccacttttaaagcaataaaaaagcaagctcagccttggagtaagtatttgcaaaacatgtatctgttaaaaagacttgtatccagaatagacataaagctcttacaaccaatagtaagacaaataactagattttaaaaataggcaaatgatttgaatagctaattcaccaaagaagatacgtgcatggcaaataacatgaaaagatgctcagcatcacttgtcagtaaggaaatgcaaactaaaaccatgaggagatttcattatgcgatccatttgaatgactaaaaagagtgattattgcaagcattggtgaggctacagagtaactggaactctcctatattatgaatgagaatgtaaaatagtgtgactactttggggaaatgtttagctatttattgttaaacatatacttatgtgatgacccagcaattcctcttctcccctatgtaccttaggaaaatgaaaacacggattcactcaaagacatgaccgatgcccatagcagctttattcataatagccccaaactggaaacaaaatgtccaggaacagatgaatggataaacacactttaacatacccatgcagtgcaataccacgtggcagtggagagaaacgagctaccggtatgcccaacacacagatgaatctcagaaacgttactgtctgtggaagcaagacacgaaagaatgcagactgtgtgattctgttcataaggaattctggaatgtgcaaagtgaaactgtcataacaggaggcaggtcactcgttgctggaggctttggggtgggacgttagatggccagagaggaggcaggaaggcacttttaggggtgatgggaatactctacgtgttagttgtgcaagtggatacaccagtacgttaatttattaggggtggttttgcatacacttggagtggcaacattttgttcatattaattatttctcaataaaataaaacaactttcatagttcaagagagatcgtctttgactgtctttccttacctctcagcctgtcgatgtgttcagtggccctgtattttcctttgtcacatcacttagcacacactgagttgcgacggtttccttccctgtctcttccatcagactctcagtttcttaagaacaaggaatgtcttttacgtgtctgtcctcagggcatagcccgatgtctggcatgcacattcactgccgaataagtgtatgttcagtaggatggcttcaatttattgattgcctacaatgtgagatagttgtagatgttttgcatttattatttctgatccttagtaaatgtttgctacacaaataaagaatcctcactgcattccagaagtcatggtacacggttgcacactgtcatggagtgtatagcattggagcacagcacacagagaggctggatggtttaaatattctgttcaatggcagtgtcaggattaaacccgtggatgtcgtcagatttcgttgttttacatctaaatcttcagctattgtctgcacatacttaagactcagttacttttctgtttttagaattggtcttgtcagcaagtagagtttactctggagatgtgagccttacattttctaatctctttggcgttcatttcttttgtttgaggctgtgattcaaagtaggaaacatgctggaaccaactctttttcagaacctggcccgcatctcaggtgctgcttgcttaattgcgtaataaaggacctctgtggtagaagcctggaaactgctgtggcgtctcttatgccaatgtctgcttgttccctttccctcaaagaaataatacatctcttgctgacactcagtgtaatggaggttcataattcaaaaaccaattatttggggcaactattggatgaattttctttggcatccttttgttggctgattttcctgttagctgtgtgtactgttttctaaagaaacatggtaagtggttgtctgttggaaattgaattgtaattgaatagattctgagatttgacgactgaaaccaggcaacaccatgtactccccatttttgttgtctgttaaattctaaagaggtttttaagtatctttgactttcggttacagtaaaaaaaaaaaaaaaaaatccccaggtgcattgaaaaacagtttggtagttccacaaaaaacatagttatcatatgagcccacatttccaccctgggtctatactcaagagaactgaaaacatgtttgcaaaaacttgaacacaatgttcatagcagtattatttatgatagtcaaacagtggaaacaaccgaaatgcccgtcagctggtgaatggataaactgttgtagattaatgcaatagaattattatttcagcccagaaaaggagtgacgtactgatccatgctttgacatgatgcaccttgaaaacatcgttaagcggaagaagccagacacaaaaggccacacgtcatatgacgccatttataggaagtgtccagaataggcaattccatggagacagaaggcagattgatggttgccaggggcttgggggaaagcaggagggggaatcgggagtgactgctaatgggtacatgatttctttttgggatgatggaaatactccgaaattagatagtgatgatgattgcacaattctgtgaatatactaaaagtcactgagttgtataccgtttccaaagggtgaattttatggcgtgtgaattatacctcaatttattttattttttaacttttacgtttgggggtacatgtgcaggatgtgcaggtttgttacacaggtaaacatgtgtcatgggggttggttgtgtagattatttcatcagccaggtattaagcccagtgtccattagtcatatttcctgcttctctccctcctcccaccctccatcctccaagaggcctcagtgtgttgttgtttccctctatgtgtccatatattctcattatttagctcccacttataagtgagaatatgtgtaaatctcaattaaaaaaaaatcctcaaagctaaacatttttccttcttctccacttttcttcttgccctttaccccccaaactcatgtcttctgaataatgattataatggctaccatggctcaggctcctgccgtgtgtcatctgccatgctaggcacttggtatttgccattttattaattattacaataaccccattttacagatgctgacatcatcagaggctcagagargctgagccacttacccagtttcacgtactagtgagcaggtggagccaagactgaagcacgttctagtctgactactggacatattttgctgtctctgatatttccgtaccacattgatgaaatcttcctgataaatatttccaatgcatggatagctaagtttatgccatagtctatagacatatcttagactggggtgagcaaatgcttgcatggggcaagcgagtcccctactggaggtatgtggggaccagaagatctgtaccctgactgaaggcaattcaatcaccaagtttcatatgacactgagtgggctaaccagaagatttttttttttttttttttttgagacagagtcttgctctgtcgcccaggctggagtgcagtggtgcgatctcggctcactgcacgctccacgtcctgggttcacgccattctcctgcctcagcctcccgagtagctggaactacaggcacccgccaccaagcctggctaatttcttgtattttcagtagagacggggtttcaccttgttagccaggatggtctcgatctcctgacctcgtgatcctcctgcctcggcctcccaaagtgttgggattacaggcatgagccactgygcccggccacagaagatgtctttaatccaagrgttctagtttgtgattccactgccccatctgttccatcttggttctctccttcctggtaattcttgtagtagtcttgtagactattaattgaaagctgttatcagttaatgggttgtgcatacgtcagtataaaacctagtacaaatgcagaccctatggaacagcagtagcattatctctgcttatcttctcagtgtctgtctccatagctactgtctcatgcttagggccccatgatctcaggctttgaccacaggtattgtgcagctttttaaccagccaccagcttcagtatcttccctccatttcattctacactggacagccaacaagtgtagtggctcagagacagtgtgtgcagtcatgtaattggacctgagcacttggtagctgttgaccatggtcaaaggaatctcaccgaatcacagttttctcccctataaatttgggaatgatagtacttttcttgtaggttggttaggagaattatttttaatmatagtaataggtaatgttattgstgcttcctgtgtgctggaaactttctaaactcaaagcatttagcacagtgtgcggcatttctgagtgtcaggaagtgtcagctgctgctgctgctgctgcgatygtagctctcataaaactcaagtaggctgttcctttcttaagtctcctccattgtaaactccagaggtagtttaaccccctgtccactgtcagaggtagtttaactccccctccattgtccagaggtagtttaacccccctccattgcccagaggtagtttaacccccctccattgcccagaggtagtttaacccccctccattgcccacaggtagtttaacccccctccattgcccayaggtagtttaactccccctccattgtccagaggtagtttaaacctcctctgttgtccagaactagttgaaactgacatcatggtcctttttcaatccgataccatcctggcttttaattgtatctcttcccgtctctggggagtcctccctgtgtgctcagagtgctctgtttcacgttgctgtgctccacaggtgctcatgctttctggtccagtgcaatgccacagcctctgcctgcccttcctcctgaataaagagacagttcttcctttgtgtggccacagcagttggcacatacttgagtgggagcaattactgcactgaatttctattatgtatttgcttagccttcagataygaactcagcctttctccgagcctggctcagagtacctgcggcacccatagcagttgtcattttctgttgcttttctgccctcctcacgccgccagatactcctcaagacagagcccttatgttccgaatggtgacccctagcaccctcggtgattcctgcacagtgccttggttggtgcggccatactcctaccccagagtcctgctttgaatgcactaaaaagtataaatattagcatggcactggagtagagcatgggggcatctcaggaatatggacttggagttctcccaattttttcctcctacgggtccacggggtccctttgtccccctcagatgcactgccaggcagtgcaggtgctgggggctcgagagtggaagaagctgcatggcagaggacctcagctcttggtgcgctttgactcgacaggtacttttatcccttgctgtttgtgattcttgctgtaaataagtcttgtaagatctaacaggacatagctgtaagcatagagaatcacaaagaccctcaatgacttagaggatatgttttacaggtatgttcttcctgagaacttagtcttcagcagtggcctagatgatgttccattttatacatacagtaaaattttaatattttcaatggatgggtgaataaataaagttgcagcatttatttactaattgtttcttcttttaaaagagtatttttctttacctatatatgctgtcaccaatctgtttctgtctatagtgagataggtatttttttggtctctgtaatgtttatgcataagaatattaagattgaagaggatattttggttgtttagccagagatccagaaatgcccaaccccagctctaagtggtatattcagaagaggtcatttaycagctcatttaatgggaaagtgcagatggaggtttgttttcagtttcagacatcatctctcaactctctaacctgtttctcgcaacttgatgtcattcttaggctccaggtggcaggaatgtggctggccaggtgtcaggctggtgttttccaggtgggatgatgagaaaatagtgtgcacttctctgtcttcattgaaaaacctctgacccacctcttcacgacccagtcacctgcccgaggttcttggaggctggggctggctaggcctgagtctgagatctacctgtgaggctgcaggcctggccattctcaccccagcacaggagtagcgctggagctgggtagttctctagagggaaatgagggtgttgygaccagaagaggagtgagctcatgttgggctataaaacaaccacgtcgtccttgctttccttcaaagagtgctcctgagactgcttttctaaggctctttctgatcctcatcagtttcccagtgagccttcttcatgcctccttgagtctctgtagctcattctgttatagaccagagtgggatgtctatatgtccccctaattgggtttcaagttcctgagaggtaaagactatttttctacctttctcccacaacccttggcatgtgtcagattctcaacaagtgtttcagagaggccacaggcaaagaggatgtggaatttgggatcagacacacctggcttcctgttggggctcttttgcttattggctgagcagcctttggaagatcattttccttctgtgaacttagtttcttaatctagagaacagacatgatactgtctcctttggtagagtgatttcaggattatggagggtgcctagcatagcatccaacagaaattagagatcatggctctcacatgtgtgacatagaggacatggtcatacagcaactccagctgtcctcaccccactgccacttccagaaatcacagattatgagcatcctgatagggcttctgtttgttaaaacagcaataaaagaacatttatataataattttattgcttccaataaaatgcttttaaaaagtcatgtaaaagactcatatatagcagggcacagtggctcacacctgtagtcccagcacttctggaggccaaggtaggtggaattcttgagtccaggagtttgaggtcaccctaggcaacatggtgaaaccccgtctctacagaaaatgcagaaactagctgagcatggcggtgcacacctgtagtcccagctattcaggaggctgaggtgggaggatcagttgagcccgggaggttgagggtacagcttcaaccgaaaaggaaaccctatacccatctagcagccgatcctcctcctcccgaccccggctctgaaaaccaccaatctgcattctgtctctatagattttcctattctgaatgtttcctataaacggaatcatatacactttcacttcccttctctcacttagcctgttctcaaggctcatagatgccgtgctgagcatcagtgcttccttccttctcgtggctggacaatatgtcatcgtactgcccttccacatcygcattctgtttgtccaatcatctgtcgatggccacctgggctgtttccaccttcgggttactgtgaacatgtgtrtgcatgtatttgcttggatgcctgttttccatcctcttgggtctgtacctctccgtggaattgctggatcctaggctgactctctgttgaaccgtttgaggagctgtattcgacagcagctgaagcattttccatttccgccagtcatgcgcgagggttctgaattctccacacccttaccaacacttgttacctcccagctgtgttattgtagccatcctagtggatgtgaagtggtgcttcactgtggttttgatttgcactcaataactattttttatttcaaatattatctatgttcactgtaaaaaactaatagcaattttatttttatttacttaaaaataaatgaatttttcccagcttcctcagagatgtacaggctcctctgggctcatatttcccccttgcttacctcatgcatgttggttcatctgcctgtccttccaggggaccgcgagcccctcgaaaacagtttgtgtcagaacctccagcatccagtcactcattcaacaggcatttattaaaagcctactatgtcaaaataggagcagagagcagtaaacaaattctggtgcatctccccatagaacttaccctctagtgaaggagacacaataactattcaatgcataaaagatctgtgggttgtggagaaaaatcattttggggagggaaagcatgaagctggagagagtgaaatgcaccccacatctggatggcctggccccaggcctgttcccctggacactggtcactcaggcagcaccacctctcctggccctcaatccgtctgtccttgccttcgagggaggaccagacatgacagcaagaaattccaaaggaaaacagacttcactctgaggacagcgaggaatcatcaaagagccctcctaactcgtgctagcagcagttactcagcatccatgagccttgagaacaggctaagtgagagaagggaagtgaaagtatgtatgattccgtttataggaaacattcagaacaggaaaatccatagagacagaatgcagattggtgattttcaggtcctgggtggggagaaggggcatcagctgctaaatgggtatagggtttccttttgggttaaaaaaatgttttagaaytggatagaggtggttgcataacattgtgaatgcactgaaggctgccgaaccattcgtcactggagaatggttaatcttacattatgccaatgtcaccttcgatatgttattgacaaattttaaaaatcatcctgatcactttgaaatgatcaaagtacgtgatgacaaaatgacaaagttgccacactaataagatacctagatacctttaactacctcattgtcagtgcatctcgttattgagcaagttacctgatagaggagaaagctggggtttggggagtgggagatgatggcttggcatcttttttagtctcgtccatgtrtctgacatacagccatatgccacatttcatacagttgctgcatagatttctgcaaaactttaacttctccttttatccataatgcatattttctgggtgccggagttaccgttgctctttgagcaggttcattcagagcagaaccctcctgtgagagggatgctttcccttcagttaatcatcgagaaaatggagatgttcccatttaattactgtcgtttctttgtagaagtactgggtcagctttcgtgtggccttttgctttagaaatgaaagaaagagaaatacatattcatgcctatgaaatagcgggagcttaaaactcatcatcagccccatcttcgtacttgagctttcctcttacatttccaattttctttgagatattcccattcacataccttcatgttcctataactaccacatgtctaaaggtgaagctgtctttttgccagtcagacataggcttgagagtcattccagctgctgccagctgtgtggcctcagtcagccctcagaacctccgtttccacccttgtcaggtgaggatggtgatggctttccgaggactgttgtgaggattcagaggggtgctgtggtgtgcaaagtacctcatgtgcttttggcgtgtggtgtgtgtgcagaggtgttttttccccttcctatctcagtccttaaaccacttcacccctatttttgaaatcctcttataaaaatctgtggcacaaccattaatcctttacctaattgtcagtgtcctgcttatgtcccaagagccttagctctttctttattcctgtgctctgtgtcacatggatattgacatgaatcctgcatactctgatctcaaactgattgttaacaagttttttttttttttgaaagctatgaactgtcacttagattcttctgtgtcctgtgtgacctggtaccattgtgaaaatacaggcagctgccagtgaatactcctgtctgattgattcagctaccttttttggtcttcagtactataatggcgagatcatgcgttttgcattcgaacaagctaagtagcaatgatgctcactgggaggtggaggacaagttgctttctctccccaactgttgagtggaggcagcaccagttcttggctcagctgggagggagtggggcaacatgtcaggcctaggcccagtgcagggcttcagatgtggcaactgccattctttcaytggatgaggaggctgtatacacatttggaagaaaaagacggataggcaagttggctaagctctaggtgcaggtgtctagaaaccagcactcccattccgcagagctgcctgcttgctttcttgctgcgtgtgaccttccagaccccagctcagtatctgaaattcctcatgctggaggagtggaggatcttctcacacatgttgccagaccctgagatgtctggggaaaatatttccctagaaacamtactcatgatactcatgccttccctcccttctttaaccatattctgtcggactgcttgcacacgctcctgtgtgtgttcacagtcctgactccctgtgggagcttgagctccctggaggtgaggaccatgtgtccactccggtcccgaccctgggtgtgactgagagcatggccttccaggaggaacgacttttcaatcattgttgcatttggcaccctagagggttagggctggagggagatcaccttttctggcttctcttctttccagttgagttttgttggtctaagctcacatctggatattggtgtgatggcactcactgctgatgcccagccaggctgctgggaagggaaccatgggacctgatgggcatgcgttattgcacaggggttgattttggggagctttcggtcatgscttttgggcatcatgatgagtgttatcgcactgaggttgctattccagctggactccacaccacctggtcgtaggtgcacatatgcagagtgtgctgcggtgcatgcaggcggggctcctggaggagttatgggcagcatggacagtcagggcaccctggctgctccagacatcgagggaggcaggatcatggcgcttagcagaggcagcagcgtgagcagagaaaagtgcagacgtaggaagcagttgggtctcactgggtcatatcaggggtgggtacagtgaggggtgagggatgattctggggaggtaggcagaggcaccaggatagagtggctgataacctgggctcccgggcaggttgctttggtttgaactgtggctctgctcctgccttgcagataatctcaggtaagatacttgagctctatggacttcagcttcctcatcagtcaaatgaagataatggtagttcttcccttcccttccctccttccccgcatccccccctcccctttgcttcccttccctccttgcccccttcccctccctccttcccccttcccttcccctcctcttcccttccctttctttcatttctttttcttttgacagacactcattctgtcacccaggctggcgtgcagtggcgtgatctcagctcactgcaacctccatctcccaggttcaagtgattctcctgcctcaacctcccgagtagctgggcctacaggcatgcaccaccatgcctggctaatttttttgtatttttattattttattttgtttttatttttatttcttttgagacggaatctcactctgtcatccaggctggagtatagtggtgcgatcttggctcactgcaacctctgcctcccgggttcaagcgattctcttgcctcagccttcccagtagctgggattacagacacacgccaccacgcctggctaatttttatatttagtagagacggggtttcattcaggtgaactgtccacctcggcctcccagagtgctgggattacaagtgtgagccagtgcgcccagcctagtactcattttataaagggagtgttggcattgaatctgtttatccattaaaacatttggcacatttcctagtgcatagtaagtacttacacataaggcattaccttattacgagcaaggccaggtattgtggccccatcatcccagcagcctgctcatgctagactagagagaggcaggggctgctgctggtgggggtgagagatgatgcgggcttgagccaggagttaggtatgggcaggagaggctgtatacgggggacattcaggtgataaaatggacacacatcagggattggcaggacatggcggggtggattttggttcctgacttgtgtggctgtggatggagggaagagtggcaggcccatgcggagttccacctggactcgctgaggctgtgggcctgtgctgcacggaggcccaggagaccatgcctagctgtccagccaagtctgagctagagacagagacatggctgttagtaccaggcaggggagaagacagccacagaatgkcagcagccactcaaggcatgatcctgtgggagaggaaattgggccattgctgaattctgcatcccagcgtctgagggatgggaaaatgcagagctgttcacagaagagcctgaagaggaagaaggaagaaggatgggtggcagaaaccaaggcattgtccagaaaagatatacacgattaatagcagggagacccagcaggagaaatgtgaaaaatagcccctgaatttggcaatgtggatttgttgacgacttaggaaatttttaggggaagtttctatagagtttatgggcagaagccaaattatgtgctgaggagccactggggtacagtgagcagcagatgcagtccctcttttgtgaagtttggttgtaagcattgggagagaatgagtcaaagatgaggtgtggctctcgtgcatctccgtgtccccactgcctggagccgccctggcttgtgggggtggtcgctgtgtttgctgagtacatgtgggtgctgggtgacttctccccatttgtctgccacatattttaataaaagctacacagcatagagattttactccttctaaactttttgtatcttgtcttcacgaacgagttaaattagcaattcttttattaggtgagatatttttagtttctctaaaaatttctcctcctttccatttgttaattaatgctaaaccttctttttaaaatatagtttgtaagtcagttctctttttacaactctcttcttgctcctggagttaataggcttttgcattgaccttatccatgtttggagacctgaatgaataattctattctgagtcccctcccctcccccttatctcccttgaaaggcaatttattgaaacaaaggctacaataactattgggaaatctggatgtattctgaaggtatagtcaggctgaactgatttctggactcagacgtttccctagatgctggctgccatgtgagatgcaccgcacagygttcccctgtctggtccatctgcccgccaccctctccgtttcccaccaaagtcattcattcagcgcttcattcagttattcattatttcattcggcactcagatagcagcagacttggaattgattcgctttggtggaaaatggcaataccatccagaaaactggacacagaatctctgctccatgtccggcagctactgttgttttctgctgaatgctgactaggcccaggactgcaggctaggttrtgggcattgggagagactagtccctcactwcaaggcactcacagcccaagttagaaactcgaggaatttggctttgaaagtcaccgtgaggcagaccaagctgctgtgcttctggagctgagggttgatggccctggagtgggggctgtggagtgggtagcagctctgcacagggctggcgggactggtggttggcaagccctctgcgtgcatagctgccaccttcttgcaggaactgggcaggtctccagagctgaaagagtgtggactatgtttttaaaaaattattttaaaaaattgtggtagaatacaaataatgtaaaatttaccattgtaataatttctttttttttgagacagggtcttgctctgttgcccagactggagtatggtggtgcaattatagctaactacagtcttgaactcctgggctcaagcaatcctcccacctcagtctcccaagtatctaggactacaagtgtgtgccaccatgcctggctaattaaaaaaatattttcttgtagagatgaggtcttagcctattgcccaggctggtctcaaactcctggactgaagcaattcttgtgcctcagcctcccaaagtgctgggaacacagcatgagccactgtgccggcccctgtaaccatttttaagtgaggagttcagcggcaagaagcgcattcacattgctgtgcaaccatgaccaccatccacctcacagagcttcatgcttttgagtctgccctcttcccctcaactgaattattttgcagcgtggacaggcgatatagtttgttgatctttcattcatttatttaatayttactgagcacctattatgtattaagcactggacttagttctggaaatacagatcaaataagataggtactgtccttaaggcactcagtgtaatcagcagatcaataaaggaagcagtactggcctaggttagagtacgtagaaaagccttccacgcaagcagcatgtggagaagcagggggctgacaccacgtgctggtttggggcaaacacgagcagttcagtagggccggagcctaggcatgaggctgagtgtgagttcagggagtggcaggaggggagggaagaagcagggtggcaggctgtggctgtcccctgaatcactcattcttgaaagagaaacctcagtatttcactcattctcagtttcgcctggattctctcggtacagctcagtataatttacagaaatagagtggtaagccggaaactcaaggcagacagatagcgtcacagctcaggactagtgtcctaaccggtctgctggggctgctgcgggcagctgtgtccacagaggcaccttcagggaaagacagctcagggctcctctctgccggacactcgggcttggctgcgggaggctgcccgtctgcctgcaaccaggcctctttgtgtgtgtctctgcaccatgccgctgctctgggtatcctggtggcctgctctgcatctgtagcgccctgcccccttgccctttctgcctttctctccttccctcccattctcccctctcattgcccaaatctagttgctgagccattgccgtgcctctcttgtggccctgtgrtatgctggaatgaacagttgtgcagatcgggcatccctaacttgaaatccaaaatgctgccaaatccgaaactttttgagcacttgcatgacgccacaagtggaaaattccacacctgacttcatgggatgggtcacagtcaaaatgcagtcaagactttgtttcagacaccagattatcaaaagtatcatatacagttaccttcaggctatgtggataaggtatatatgaaacataaatgtatttcatgtttagacttgggtcccatcccaaagatagctcattatgtatatgcagatattccaaaatgcgaaaaaaaaaaaattggagatgtttctggtcctgagcatttcagttaggggatacctgacctgtatctgaagtggaagaccagggagtgaatcttgactcggctgcacgctagctgcgtcatccggggccagcgacttcatctctttgagctgcagcttctacctctgtaaaattggggtgagagttacctcgagtgttgtgtgtatgcgaggtacctggaacacagtaagcacccagcaaatgcctgcaggtgatgtgttctcctcccctrctgaagggttgggggagatgggcattcttgctttagatggaaacactgagtcccagcaaactctagggtctgtcagttcttagccatgagacgttttagcaagtcactgactcctccaagcctcaacttcctcatctgtaaaacggataaaaatagccacttctgatgaagtcaggcggttaatttaagcactggaaacattctrcgatgcatagcgagtgcttaggaatctcgctcttgtttcagaactcatgataatctggttcactgatatctcctccctttcattgactattaaatagggcagaaactttttttttttcaggaatcttcaagcttcctttttattttatttatttttaytatactttaagttctagggtacaagtgcccaacgtgcaggtttcttacataggtatacatgtgccatgttgatgtgctgcacccatcaacttatcatttgcattaggcatttctcctaatgctatccctcccccagccccccaccccccgacaggccctggtgtgtgatgttccccttcctgtgtccatgtcttctcattgttcaattcccacctatgagtgagaacatgcggtgtttggttttctttccttgtgatagtttgctgagaatgatggtttccagcttcatccatgtccctacaaaggacttgaactcatcatttatatggctgcatagtattccatggtgtatatgtgccacgttttctttatctagtctcttattgatggacgtttgggttggttccaagtctttgctgttgtgaatagtgccgcaataaacatacgtgtgcatgtgtctttacagtagcatgatttataatcctttgggtatatacccagtaatgggatcactgggttaaatggtatttctagttctagatccytgagggatcrccacactgtcttcaccaatggttgaactaatttacactcccaccaacagtgtaaaagcgttcctatttctccacatcctctccagcatctgttgtttcctgactttttaatgatcaccattctaactggcgtgagatggtatctcattgtggttttgatttgcatttctctaatgagcagtgatgatgagcgttttttcatgtgtctgttgggtgcataaatgtcttttgagaaatgtctgtttatatcatttgcccacttttggatggggttgtttttttcttataaatttgtttaagttcgttgtagattctgaatattagcctaaatagggcaggaacttctaaaacaggggccgcagactattttccctggcggcgtgaggaagaggaacgtggtcgatgcggtggcaggcgatgtggaacattgcagttcatctgtttggccacacagggctgccctttctcatgaaacagtgctttgcaccactgtgggcaccttacacaaggcctgtttcagaaataggattgagaatttgatttgggttttttttgctcctcttttacatgtaatgctcgattttctttggatttgcagagagacttgacttccttccttactttagctaaatgatttggatgagattcagaagacattctggcattatctatgaaatattgctttatttaaaatgcagtactctctttcttccttgcctaatgtgctgtatttgtggacatgatttggaggtaggtaggtggcagacctttgcagaggagacatcggcagatgtctaaggagttggagagcagtgggatacaggggaaattgcatgggcgrtggtcaataattcaacaattacctcctgagggcctgctctgtgcaaggcactattctcagtgtgtgsgataaatccatgactggaagaaagaaagattcctgattccgtagagcctgcattctggtaggggtgatagtaaatgtggtaatagatttaggcattttaaatctaaattttctgaagtggaattttaggtattaggtattaagaacaaaagaaaaaggcagaggaagagacttgcaggcttggcggcggcgggcgggggaggttactgtgttgtgggcagcaggacttaggcacccagcctggctctccacttcccgggtcygtccctggcagggaacttccgccaagggcagagactctgtcttacacatgctgcaacttcagtgcctacacttcagcgtctggatgttcataggtgttcttccagtagctgatggatgatggatgaatacatacatgcatctaagggaagtcacttgacattcttgagctctcatttgttaagttgtaaaatcgtgtcaaataagttcttgtttccaactttaggggaagagatgatatgaatccagggtagtgtttggcatatagtagatgctcaagacaatgttacttccattctggggacagcctgcccactgtccacagcaggggagtctgggtggctccggagcacagatgctgctcagcttgcaggactagaatgggaaggttgtagtkatttatcaaatatcgtttactttagaagtaacataattttaaaataaacatttaaatttattaaacatatatgtagttcttattgctgctgtaagagatactataaactcagtggcttaaaacaacacaaatttgttatcttgcagttttggaggccagaggcctcagtaggtgaaacgccttcactcccagcactcttggggagagtctgtctccctgccctcctggcttctgcaggctgcctgcatctcttggcttgtggctccttcctctgcctccagagcttgcagtgttgcacattcagtttcctctgacattcctgcttccttctttccctaataaggacccttgtgattatattgagagcctactaggataagccaggataatcccctcatctcagaatcttcatcttaaccacatctgcagtcccttctgtatgtaaggtcacatttcacaggttcttgggattgggatgtggttatatttgagggggggctgttacttggtctactatcatatacaaaccttttgactaacaatttcatgtcgaagaaaaaaatggatgaatgcaccaagatgtatatattaggttatctgttatagcattatttataataccagggttatcagaagcaacataaatgtccaacaacagggaatgaaattatgacatatgaccattaaaaataaaggtctagaaagactattaacatagaaaaatacctatgacttaagaaataaaaggcaagttataaaacagtgtgaatgatatgatcctgttcttataaaaatatgcatttatatatatgtgcacagaaaaatgtctagaagaatatacaccaagatgttaacaagggttatttctgtgttttgggattataggcaatttttcttctttttgcttttcactgtttcctaatgttttgacagtgaaaatgcattagtcttagaaaaagaaccccctcctttttttttttaaagaaagattactgaatttagtgaaaaagaaaatgtatgatcgaacacagaattggtatctgagagtttcactcattgaaaatgagttggatttttattttaattgcattcttagccccagattggatgacagtccccttgcttagcatctctcatggtgttacatggaatctcattgttctgctcctgaatcttcccagacccctgcactcatttcgtcattcgttgagggtggattggttcctccctcccttctcctccctcccctccacctggtccacagaaagaagagaaggaaggcttttgaatggaaaagggaggcttytgaatggaaaagggaggcttttgaatggaaaagggaggcttttgaatggaaaagggaggcttctgaatggaaaagggaggcttctgaatggaaagggaggcttctgaatggaaaagggaggcttctgaatggaaagggaggcttctgaatggaaagggaggcttctgaatggaaaagggaggcttctgaatggaaagggaggcttctgaatggaaaagggaggcttttgaatggaaaagggaggcttttgaatggaaaagggaggcttttgaatggaaagggaggcttctgaatggaaaagggaggcttttgaatggaaaagggaggcttctgaatggaaaagggaggcttctgaatggaaaagggaggcttctgaatggaaaagggaggcttttgaatggaaaagggaggcttctgaatggaaaagggaggcttytgaatggaaagggaggcttttgaatggaaaagggaggcttctgaatggaaaagggaggcttttgaatggaaagggaggcttttgaatggaaaagggaggcttttgaatggaaagggaggcttttccaatgtttcctgcagcacaatagctttctgctcattttatttgggcctctgcttttttgaagctctccccttcttgcattaaatttttgtcattctgtctgctttcacacctttttattttagcatcttctctgcaatatctccattccacagctcctctgacagccctcatattgtatcagtggcggtactcttttcttcatggttgtaacttagaaacagacgatttttcttcatctctctgagcctgaggctgcatcttctgtttctgcagaggtcatggaggaagcagggctggagctccactgcttcagcagttccattcgaatattacagaactccgaggctcccgctgcagagacaggctatggccagatttctttcaggaatcatgtggtctttctcttgtatgatagaagaaggaaaataaatatgtaattaaaaaataatttgttagtatttctacttgcagtgataataacccaagtttcacagagtacttttgtatccatttttcatttgagcctcgcaggatccccgtgtgggagcattatcattattttcacttttcagagcagaaactgaggctttaagatgttaaatgattgcactgaagttacataactagtgaatgtccaggttgcattgaatgctyccgtcaccttgctcccaggttggtgctgccagatgtctgtgtgtttatcattttcttcaggggatcataggctacacgaagcaggtggtggcgggaggtgttgagcatgcggatggtagcctggtgttgtggtggttctcttctgattcacccagctgtctgcatcgaatgttaccccttcatttagcaaggagtgagctgaggctcagagaggtcaagaagactgtcctcaattatacagctaacatgactggagggagctcgggccccccagtcccaaacctcaccactcccttcccctccatgtgttccttgtgggccataagcaagtgtattgactgttatgcctccccaagcaagttatgcccttgatcgtcagtagtggctctcagataagttattttaaaggtttgcaagtgtctttgaaaaagagagatgatatctttgttttgttagaacataacccctttcccatgaggcattgccaatccatttggcaactgttgcaaaaatcaaattatacattcaattggtttagctatcctgcttttttggacattgatggacagccagggggtcccatgtcaatagacccaaagaaatgtatcttttttggctgaagggttacgtattaaaacaaacgagattgtccttttaatttattaaagagatttcttagagcccgagggttggaggcagcctgcatgatcgcctgtgtgatcatctgcgagctcccctccgttgtaacatggatcttctctgcatctctttcccttgttcccggctttcatgtaacaggtgttcaacgaacactcttgaacatcaggaatctagttgaagctgtagcaaaggcagggctgtgtggtggctgtggcgtcctgcttggtaacagccagtggtgggagcacacgctttttcccgtagctaccacccgcagcttccactcatgggtcctggtccctgcctttggagcctcaccaagtcggccttagcagctcctaatcctgaggcgagggagtctggagtccttctctcctaagcctctctgtctttgagtcaaatggccccggtggagaaacccattgtgatctcctcaccccttttatggtatttaccaatgaaaccttttgtcgttttaacttgtagcccccagaatccacccatcccttgaatacgccttccagtcgtgagatatttattgagcctcggctgagtgccagggatggccactaagaagcctgtccgggtgaaactcacagtccagtaggagaagatactcaacagaggattctaacaggatgccctacatggtatgctaggatactgacaaggcacagtggagcccgcaggagggaactggccattcctactygagagttacagtgataaagattttgcttaacaaatactttattgagtgccttctctgtgccagccatgtgctggacaatagggacatgatgacatggtgccttcttccatgggtttatagtctgtagacatagtaatttaattcaaatgaggatattacttcaaactgagataaaagctgtgaagaaaagggatgtgatttcataggcaggcctagacaagggtgtaagaccaggtttttctggggagatgaagtgcaagctgagatcagaaggatgagtaatcgttagtgagttgaaaggaagagagggagaatgctcaaagcagaggtggcagagggctaggaggtgggagcagtggtgggggaagaattgaacacacagttttagaggccacagtggggttgggtattattgatcatcagagcaacgggagccttttcaggactgcgcttgaggaggagcaagacaatgagatttgcaccccagctgctggatggggaggccagtgtggaggcggagggggtcagtgaagagactgttgtacaagatgagggaaaacatggtgataacttggaataaagtggatgtggagccagagagaaatgggtggatttcagagacacttgggaagaagaaaaggacatggagagaggtgatgaaatcagtaatggctcacagatttctggcctgggcgttggatggggagtggaatcgtgcttgagctagggcacgtgggaaaggaaaggtgttctctttttattggcagaggtaaggtagaggcgatcatgagtttagtcctagatctggcgagtttagggtgcctttaaaacatccaagcaaagtcgacagctgtataaacaaatctagagctcaaaggtgatgtttgagctgactcttgagaaaatgattgggtggtttccaggtaaatagtagggaagggtgttcaaggcactctgaggcagacggtgtcacataagcaaacgtagaaggcttgaatgagctctgggtgccagttagagcatggggtatgttacaaaagatgcgaatggagagaggtgggctcagggcagatcctggagaatctttgataccctgtgaagaaatttggacttgatcctgaaatgtatctgcggctattgaaaggtttttagcaattgaatgttataatcaaatttgcactttagaaaaatcactgtgctggtcaagtgaaggattgatttgatgagtcattcatttattcattcattcattcaacaatgccatatgtaatatactatacgcaggtgctgtgttaaatgctgtgaaacaaaggtcaataaggcagagacaatgcctttaacgaattgattgtctatggagaaagacagagccataaacataacattagaatatagtatggtaattgtaatgatacacatgtgcacagagtgttgatagcataggagaaaggaagcttacctacattgcatttagggaagttttctaagatgaaatcatgcaatttaaaaagaatgataggggcaaatgaatggtcatagcaattgcattccaagcagaagggacagaaagaacaaatcatggagggaagaagtarcagcgtatgttaggaaatcttaatcaatttgttgccagaagtcaaagggcaaagcaaaactggtgagaaatgaggaggggcctgtgcttggacagtgtcctgtagtctgaggaaaaagctgtgacatcatgagctttgcattttaggaagatcacattaggagctgtggggagaatggatttgcaggcaagagactgagggtatcctttcatgatacaaatcagcaggaaacagaaccaaagtctcattagaaataaaggtgaaattccttaaatggataaaggataactttgaaaaaccctcagctaacatcacacttaatggtaaaaaacaaagggttccctctaaaattaggaataagataggaatgtccactcctgccacttagattcaacattgtgcaaaaaggtaataattgtgttagaaaatgaaataaacagcatccaggttggaaaggaggaagtcaaatcacctcaaaaatagcaaaataattaggaataaacctaacaaaaagaattgcaagacttgtaaactgaccaccataaaaacatcactgaaagaagttaaacaagacctattaatgtaaagacataccatgctcatggaccagaagacttaatattattaagatggcaacatggccgggcgcagtggctcatgcctgtaatcccagcactttgggaggccgaggcgggtggatcacgaggtcaggagatcgagaccatcctggctaacatggtgaaaccccgtctctactaaaaaaaaaaaaatacaaaaaattagccaggcgtggtggcaggcacctgtagtcccatctacttgggaggctgaggcaggagaatggcgtgaacctgggaggcggagcttgcagtgagctgagatcgcaccactgcactccagcctgggtgacagagcaggactccatctcaaaaaaaaaaaaaaaaaaaaggatggcaatattacccaaactgatttacaggttcaatgcattctctatcaaaagctcattttttggtagaaattgacaagctaatcctaagagtcacttttttttttttttttttttttttaaagcttaagttcctgggagaatggcttcatgcacatagttaacttaatgaatagtcaacatgtattagacactatgctgtccgaggcttttttctaatccttttatgtgtgttaactactctttatagggagcctatcagtccacataactaggcgaggaaatgggaaataaccagcccaaggtcatagagctgggaagcaaggagagcagaattgcagccattccggctccccagtgcgtggtcttagcctccatggaatatggctcttttcccagggcaaaagtgaatgccagagcagtgtggggtgtgtcgaggctgaggtgctgagcaggcagttgacatcacatctagaagtaggagagagaactagggttgtggtaaagatttgagtgtcattggcatgaagacagatattgctgtcattgtggggtggagatcactagaatgtcaggtgaggagagcagttagctgatgacggaccttctgggtcacaggaactgaaagagtattatgggttgaatgacattcccaccgcattcctgtgttgaactcttaaccctcagcacctcagaatgtgatcttacatggagagtctttacagaagtcatccaggtaaaatgaggttactagggtgggccctagtccaatgtgcctggtgtcctcatagaaaggggacatttggaggcaggctcacgtacagggagggcacatgggagcctgaagatgccgtctgcaagccaaggagagaggcctctgaggagccaatcctgccgatgtcttgatctgagccttctggtccccaaagctacaaggcaaggaatctgtgttgcttccactgctgggtttgcagcctttatcacagcagccctcccagtctaatacagagcgggaggaaggatgtcccatagggaagctcagcagggtcagagtcaccatgggacggaaccccaggcctgctgtgagtctgagcccggaggcctgagattacagctgctgcctaggggcagctttgatgctgatgccacctgaggctgtgctccccaccagcgctgagttgtgctcctggccccccttgaggagaagtaggggtgtcagataccttccctcgttctttatcccctcccctgctgtcaatctccacttccccatttctgttccggtgcagctgatttttttgaacctaaatgtgggagctagacgagtctctgttagctaaatgtcatcttgctggttttggttctgtgtatcagccagtagaagtcgtttataatttcagctctgctgtctttcaggatagcgttccctacagacctgtggtgtccacagcattgaaacaaacatacttcttttgtccttatttgaagtcactgaggaaaaacaaaaacaagctgcaagacacggtgacagaggggggtggccgagcctggaggctgcgttgagggtcttcctcctcttgcctctgggtccccggacccttgaagctgtgctcatccgatttcttcctaggttcatcttctccccaggcccctgggatgtgggtgctgcccagggtctggttgtcacccatgtgatctttacaccttcctttccctgcgtggatgatctcatctcctctctggttccagctcctgcctgctactatcagtgcccctttggatgaatcctttagtctatttagtatccatcccaaccaactcttgggcttcagtttcctcatctacaaaatgaggataataatacgtacacatgaggttcaatgattaaatgagataattttgtttttttgagacagtgttttgctcgtgttgctcaggctggagtgcagtggcgtgatctcggctcactgcagcctctacctcctgggttcaagcgattcttctgcctcagcytcctgagtagctgggattacaggtgcctgccaccacacctggctaatgttttgtatttttagtagagacagggttttgccatgttggcctggctggtctcgagctcctggcctcaggtaatctgcctgcctcagcctcccaaagtggtgggattacaggtgtgagcaactgcatctggcctaaataagataatagtagagaacttggccacagtgcctrgtacatgctaagcccttaagacctgatcaccatcattataaccactgccactgtcatcatgtgacacacatctctcatcagagatggactgcctctatgtccttgctattggatggaggctacaaatgtttgagctctgttctggctgagtaggtctcctggttcctcctcttaccaagtcttgaatcttatgggatttaaatagtgttttacataacacctagacatacgtacatgcatgtatgtatgcatgatatacagagagccacctcaygtaggctccactgggctcgcactcgtacttcatgtgctgcgtcaaggcgagcagacctttcaaggagatgagaaggggattagtaaatatttgcctggaaccgtggatgatgactcacgtacattcgagtcagacagcagccccatgtggtagagattttatccycatttcacaaatgaggaattgaagccgtcactaatcgcagggaataatattcttttttttttttttgagayggagtcttgctctgtcacttaggctggagtgcaatggcatgatctctctcagctcaccactacctccgcctcctgggctcaagtgattctcctgcctcagcctcctgagtagctgagattacaggcaggtgccaccacacccggctaatttctgtatttttagtagagacagggtttcactgtgttggccaggctagtctcgaactcccgagctcaagtgatccacccaccttggcctcccaaagtgctgggattacagctgtgagccaccacrcctggccccggggaataatattctcattcctatttgagagctcaaggatcctgcatttgtttttgaacttcctggtccattggaagtggcttgtcttctaggcccgtgctgaccatgctgctgttgggactcattagtccttgtctgcaggtagaccagagcaatggaacgagatcagagggtgacatctcrgatgcctgcaggggcacgcggatgcttgtcctgccacctggaaagctttttcttatgtattagcgccacaggacaaactggtttagcccagcaaagcacacactgaaatgtaaaagccttgtgctcttttttgttttaaagacagtgaacataagaagaaacccacccccaaatgcattagcttcttcaggaagcatcatcaatagaacatggctataaataatggctgtaaattaacaatttgcaatcccaataaagtatgaacagattacaacaacaaatagaaaaactgaacccaagaatgagaataactctatccaagttgttcattatatcattcttgttgtgctgaaaactatgagcttactagtccccaaaatgttttttatgccttctgttttaaggtaggatatgagtctctaaatgaattgcttggcattttctctcatctggagcaaggtagctggaaggcataccggaaaggaaagctttctagggggaagctcatagggtcagggtgagtggggacatgaagctttcactgagatgtgttgggactgtgggatgttggcatgtagccaaaggggttcttggtgccctgagcttcaatgtggactatttatggccttgtggcacattaaaatgactctggacagtgaggatgagatgataaatggacagctctgaagtttctttgcatatagtgagtccatgaaggacactgggaattttcttttctctgacaatggaaaacttggcatgaaaaagagtttagtgtaactaagctaactaagccgagtctagaatgtgggtgtgaaagtcaggtgaaatgtggtttactcccgtgaatgaatgatgaatggaaattagctctgaaaatgtggaataacgaccgagagcatcattttttattaaaatgatctgggtgtttacatacaaaatgttcaggatacatctgactccytctggctgtctgagggctgtccctcctccctgcacacttccctagccctgggcctcatgtcctactcggtgggggcttcccgtgtgcgtgacaagggagcacggagcacaggctccaggaggctagggtgtgtctgcttcactgctgtgcccccggggccagagccagtgcctggcacacagtgggatctcaggaagtgtttctcgagcaggagaataagtgcatggctgccttcccccaccactgagttccagggagaagcccagcacctccgtgtgcctggcacgaggtggcaacgccttagacctgccgggtctggtcacaggctccatgtgcttgtcctgagccgccgccgtgttgctttgctgaggtctctacttcggctccagtgtcatctgtaaattaactctctgtggcttattttgagaatcaagtaaagtaatccatacgaaaatgcttttaaaaccgtgaagtgttattaattgaacactgattaagctgtgtctgtctaccactgtctrtcactgtcattatgctcattgaagccagagtgatgttcactgaaacataactgtaatcatgttgctaagttctgatttaggctttgatttctcatcttcttgcgctgaagttatccatgtataataaatattatggctacttatgagaaaggcattgaaacaggacttcttgtctgacacggccagctcacctttccagtgccggccaccgcacctgagtcttcatgccgggaacaaggcctcacctgcggaattgagacgttcgtgagttgtgaagttctgcctgtgtgctaggagcgtttgtgctgccctcactcaacaaaggaattcacttaaatctatcttagagattcatggcattagggttgacccagaggagagatccagacatcgaaagaggttcttgccaatggcagcacttaggctttcctggatttcctgcattggttcacgctaacgtgtgcgttctaagaaggcagaaatagtctaagaaaaccaggaaaaggcaggaacaacaaagtgggtatttggctgttcaatgttgtagggtagagtaaaatatgaaactggaaaatgagaggaggcaataatgtagaaagaaaagaagatgctgctacttttagtggcaaaaactgcagttacttttgcaccaagccaatagtttgaatagaaatgttgacagaaggaaatgaatctttattgagtgcgtgggtaacaggtactttcacatactttttcacatttagttattaaaatcatattggaaaataagtgctcttttccctgcctttttttttttttttggttagaaaactgaggctcatagatattaagtaacttgcccaaggttatagagtttataaaatgacagagcaagtagtttcacagcctggcccatgggacactgtaagaagcttatgagttacattcattatgaaatattagaggcataggaagatgagagactcaggcaagagccatctcattaaggtggaggtcacagttttaaaggaaaatttaaaattcaaattaattacaaaatgtcatagttaagaaaagtcttttaaagtagatgtggtttccaaggttcatgctgttttttttaaaaaatggagatacataaagtggctgaaatagaagttgaattagaaaaaatgtgtatatgcacacaatcacatgcatrtaccaccctccccacacccagcacgcatggttcccactgacaaattctcctcaaggttgagtgtgggatttagttcctggccaaatgcgacttggaacctattctgagtgggcagataggtgtctgctgtggccactggcatccatgccggggtggcccccacagctgcctcctgcatgtgcagtggcatgtaatgcatttctgaaccaggcagagaagatatttagaaagtccagcatgtagaagaattgagtatctggtgaagaatttattagatatagcctcataaattccttagatatataacatttccaaattctttgtccttgaaaaaagttgattttgaaaatttgactagtttattgaacatatatcagtttgttaattggattgaatcactattatattccaggtattttactaggacctttaatatacactgtcccatgtaaggtaataagtactgagtttaggtgaaagtatgaaaacaggagagatgttgaggatggaattattgaaaaggaattggccttgaattctaaccaagatagctaagtaaggtcaggctttgatttgtccttgccagcaaaaagacttaggcagtaacagaaaacatgtgaaggaagaaaataaaaaatacctctgagttaaaaagtgaggtaaacgtttcatgaaatggaaataaaatccagtatgaaacagttagctaggttcttggtccaaaaagttcaccagtgactaggattttagcatactaaaaaaaaacaaaaacaaaaacaaaaaccccccaaaaaaactaagtgaaatattagcaaatcgaaatctgcccgagataaaataaactatgtcagaaacaagtagagtttatctcagaggtgcaaagatggttctacagcagaacatttcccagtgttacatatatagtagcagattgattgaggaaaaaataatttaaattgttacagaataattcagtaaagttcaccatttatttataataacagctcttttaaaacagactgcaagagagcattattggcttaataaaggatgtctgtcaaaaatctctaggaaacatacttaatgttgaaactctaggcacattgcttttaaagtcttgaacaagacaaggacgtctgccatcaatgcttctgcttggaatttctcagttctagctactgcaatagggaaaaagaggtatattaattagaatggaagaaacaatactgtccttatttgtagatgagaggattgtcagtatggaaaattcaagacaatctatggataaactgttagaattagagaaagaggctgggcgcagtggcttatgcctgtaatcccagcactttgggaggctgaggtgggcggatcacctgaggtcaggagtttgagaccagcctggccaaaatggtgaaaccctgtctctactaaaatacaaaaattagctgggtgtgacggcacacgcctgtaatctcaggtacttgggaggcccctgaggcaggagaatcacatgaacccgtgaggcagaggttgcagtgagcagagatcgcgccactgcattcctgcctgggagacagaatgagactccatctcagaaaaaaaaaagacagagaaagagttcaacaggtttcctctattcaacataaattagtaacattcatctagatccataaaaaccagttagaaaaatacaattaaagctgggtgcggtggctcacacctgtaatcccagcactttgggaggctgaagcaggtggatcacctgaggtcaggagtttgagaccagcctgaccaacatggtgaaaccccgtctctacttaaaatacaagttagctgggtgtggtggcaggtgcctgtaatcccagctactcaggaggctgaggcaggagaatcgcttgaacctgagagatggaggttgcagtgagctgagattgcactgctgcactccagcctgggcaaaagagtgagactccatctaaatgaatgaatgaatgaatgaatgaatgaatgaaaagaaaaatagtctcattcattagccaacagtaccctgaggtaccttgaaaagaacctcatgacgtgtacaagactttatgaagaatattaagaaacaataaacatacaaaatgtaaatgtagacctgatgaaatagcaaaatataccatattcatggattagaagactcaatattttgaagatgtcaacttactctctattgatgaattgcacataactcctggcaaaattccaacaggaatttaaaaatcaacttgagaagtaaatgttagaattcatatactagaagaaggagccaagaatagccaagataaactgaaggatgtggccaagttaaggggtcttggcctattagatattaaggcttataaagcaatrgtaattaaaatagtcttatacagattatttatttgacaaatagacaaatgaaagagaatagaaagccccaaatcagatttataggtatagagaagtttgatatgcactatgtcagtaattctaggaagcatctttgttttattcttgaagtacagattcatcttacaatctctggagttttataattgttgtcagccagatggcagaccatacatagttttatgaaaaccttctgataagaattttagaattgatggaatatggaatggcatgggggcattataaatcagtggaagaaaatcagaacttttcataaaagatgctgggacatttggttatgcatatgaaaaaatttgaaatgccactaacaaaatcagcacccggtaggataaatacacaggtatgaatgacaaacatgtttaaaattttagaagataatgtaggagcctgtcttaaagaccatggggtaggaaagagtttcttaagcttggcagataaagcacaaaccaggaaggaaaagattgatcagtttgattctattaaatgtttacaaacttctaagaaggacattatgagcaaaatttacatgcaagttacatgtgttacgcatttttctgtatatatgaaatatcccaaacgaagaaaagttagagaatttccaaaaggggaggagacgtgactgacatatagccatcagaggactggtatgtagactataagagtgagtcccactgatagatcagtgaaagggagtcagggaagtgggcagtgcagctgaagcctgaatgagcagggcacagatcatgctgccagggcccctggcatgaccatgcccagacttctgcccagctgtgctttgattgatggatgcctgtacaccacctggagatgaactatttttgataatgttcttacaaatactaatcagggaaacgcatgctaaccagcacactgtctcagctgcctttattctctgtcctgttcctttctatatttgtgtcccagagctcactgtggagctccagccactcattcactcactccactaacagctgcttttatcctgggtgctgtgctacttggatatgtagtttgggtgatatggtccctgctttccagagggttttaatgtatctgagtagaagagtgagtgagaagaggaagaaaactcacaagttggacactaccaggtgcgaggcatttttcttttactctstgatttattccttatagcagctctctacatttggcatttcattatgcctctttacaaatgaagaaatgaaggtttggagaggctaatttatttaggccagtaaactaataacgtggctaagctgaaattaaarcctgcaactgtctagcttcaagcaccctgatcctatgtggaaaataacccatcttttatgagaaatgtgggtaagatgtccctggagtgtaaaagtgggggaaataggagaagactgcatggaagaagtgggctgtcaacctggcagggctgtgagggtgggaatcagccacctccttgctgggagcagctattcagtccagcctgttgtctccaatgtgaggccactgcaggagcagccttcccagtgagcagggcacatggagcctgccagggccacactgccatgtggacaccggggctgctgcggtgccggcccacaccagcctactgttgcatctggaccagcacatggctgccctttctgttttggrggtgctttttggaatctggcaatgaaagaggaaggtcatcagatgtcacattgtctattgtgtgcctctaatgttcaattcttggcacttggagaaaaaagaaaatgaaaaatctttctgtgcgtgtgcgaatgtgtgcacgagatgccgtgtgtctgaggacatgtcttcaaatgcaagcgtggggagctatttttaggcacctttcctcccaacagtgctgtttaaagattcagctcaggctgctaataggtatatttataaccattctgtcgactgccccagcatgaatgctgctgcagatgatgctattcttggaggcagttgccatggttaccattaacccttttgccttggaagagtctatcagccctgtgctttgttcccccagggtgctcagcagcatttgaatgcataaatgtactctgaaacggaaaccaaaatggagtgcattttatgtttcaacagtgaataaactggacaaatgagtgggcagcactactaattaatattggtcaaggttccccctgcccttaacatatataacagtaaaggtagctaggtagccactgccgcccgccggggtgctgaagtcatcttttgattttgaatatggactaaccagtcccttaagatctgttgttcctgcttcactgcatatgatttctctcatttagcaacttattgattttaaaaatcaaagtatctctttatgaatattcatttgttaactagagcaccactacaacaagctgtgaaactggcatcctttagggcatggtgcagtcctgatttatctagaaggactcatgggtcagtgggttcaaaacaaacagaacagagacatacagtcgtcccctcttatccttgggggtgtgtgttccaagacccccagcagatgcctgaaactgtggatagtactgaaccttatgtgtactgggttttaaaaaaatctgataaccaaggcagctcctaagtgactgatgggtcgagagtgtctacagtgtggatgcgccagataagggcggatgctggtcccaggagggagagagcagggcggtgagagattcatcatgctactcagaaggcactcaatccaaaacttacaaattgtttatttccgctattctccacttaatatttttgaaccacggttgaccacgggcagctgaaaccatgggaagtgaacaggggaaaagggaggacaactatagtctaataagtagacttacgaattccccatgcttttaatgaactctcccatgaggaatgccatgttagaaatgtggttggttctcctgcccacaagttgcttatagttaagtatgttagcatgaagaacaaaataattattataaaaagacagtagaagtgctctgtagaaatgttgaaaagctgccatttggacatctcctcgggattaactatgattagtattgcgagggaaagtagtagagaagtgactggctgaggggaaaactgaccgtgcagcccattggggtggtgattgtagcagaaataaatctctggagggatctagtggaagttgagcctggaaagataacatggcgcttgaccactgaaggccaagagcaccttactgaggaatgactacttactgaggagtcactgcaggtttcggagggaagaactgacttggtccaactttgctttacgaagatagctatgtgggtaatgtggcaagatctgggaggcagaaaggcagtgggacatgagggatttatgggtggaattctgaagtgcatacaattgttctctctaaatcactgtatgggaggatgctttgttgaattgtttcattcgctgattgatgtatagaagasacacttcgatgctcttgttcaatgccagataacaccaagcatactggggaaagcaaggtattaaatatccaggccaaaacaaaaacaaaaaaacccaccgaaaaacccaccaccacacaacaccagtaggaaaacagaagtttcttgctctttagaacttctcacttaatcggaggacatgcatctctggaatgaatagcctatctgaacaagttaaatgtaatttataaacatgcgaaggagtggtttaaggaagccaaagggctgccactgggagctgggatgtctgaattctaagacaaaggagagagccgctcctgattcaatgagtggttcatcaaagactatgggatgagtaagggctacttccaagaagcccttgactggttccctgcccctgcgtgtgctcacccctgcacttgccctcgtgggacacacagctgtttgccrctcactgcacacaagcaccccgttgtggtcctgccttcactgggtgtggtcgttgttattcataatgaacatattccactccctcagtaaatggtagctgtttgtttaagaatgaactttttattgaattaaagcataaactcagaaaaatgcacacatcataaggtgacatacagcataacgaaatactgactaccctggcaaaactgcgggcttttgaacgctgttagataaccacctctcagaatgagaaatgcgacatcagcagctctcggagggcctcctgcggtgcccctgcccattcactgtccgttcctccccagggtagcagctgtcccaaacctaataccataggttattttgcctgttttgaacttcacataaatggctttgtacgatgagtactttttttttgtatctggcttttcctcaatgttatgtttttgtatgtggcagtagtttacacatttttcactggactaccgtattcccctgtataatacaccacagtggattcattctgctgttgatgggcctttgggttatttcccatttggcgctgttatataaggatgctggatggatgttttcgtctgtgtctttttggtgcacgtattcacatcgttctgttgggtataacccccgtgtgaaatgctggatcggaaattctgtgtctctctttatgagaacattcctgtgagcaccgtgtagtcaaggtgaaagggatacaaggtgggaggaggacctaactctcccagggagggttttgaggagggtttcacaaaatctgagcaggccgtaaagtagggataggaatgtgccaggccagggatgggacaggctcccggcagtgggaacaggagtggcaggaayccaccattccctgacttgctgtccccctcagccttctgtgcccattggactcttgacttcaaggatcccttacctgtgccatccttcacttctaaatccttagttggctgttctttctagaatgggtgtgatgtggacttctgtgcctaaacctcagagcttccaggtatcgtgcgtggcctactcccaattcgctgagcattaggatgtcattgagtctctgactctgaccgagcacagcyggttttctgtgatggttcagccctctgcaccctcagactgcacacctgggtcactgccccaggctgcagacattggccactccctagatcagggttgaccatgctgccgtgtatctgacaccaatccccccattttgtttatctttttaagagaaaaaataccggcaccaacctgtttgtttgcttaccacttgtttccctcttctgaaggccgagcacagcagatgcattcctgctattgtgtatctctgctggtttatactgcgagtggacaaggcagaatgcgcttactgttctgagctcctgtccccatacagggaagcatcaacccagagacagaagctggtctcaccttctgggatcagtcaggccagaactgaaaattaccataaattccagcaagcacatagagggaccgggggatgcagtgagagcacatcacactgagagagaayagaactggcaaagacgctactttagaaagggcctttaggacgtggggcatcctttttacctctcccgagccccttcttaacaaacccggagcccagagagagattgtgtgttaaacatacacacagtgcctaacacatagtttagtacactccaggattagttgctattttatttttacatttatttatttatttatttatgagattggggtctcactctgtcgcccaggctggagtgcagtggtgcaatcttggctcactgcaacctccgcctcccagattcaagtgattcttctgctttagcctcctgagtagctgagattacaggtgtttgcccaccgtgcctggctaatttttgtatttttagcagagatggggtttcaccatgttggtcaggctgatctcaaactcctgaccttaagtgattcacccatctctgcctccccaagtgttgggattacaggcgtgagccagtgcacccggtcagctgctattttaattattgctttaataagatgacagtaatattggcacgtattatgccaatatctcatggagatttgctaataacacatgatatgcttatgtgcacaaatttcagaatcaaacatacctggatttggttttacttattgaaaaattataatcgtatatgkttatggtttacaaagtaaacatacatggatttaaatgctaacctcgttacttggacaaaattcrtgatatccccaaacctcagtgtttcatatataagatagagctgtgaatatctactacgtaggattgtaaacgaaatactgaagcgtgaatcagatgcatctcagattttaaagaaaatgtaaaccattggtggaacgtctagttaaaatgtaaaacctgattcagcaggtgcggggtggggctggtgtgggagatcctgccgcagtggcttgaccccgaccgtcacagtgagtgggcagcgtggggwgaggccgcccagggccggtctgcggtaggcacccaggacgtgctcgccaccatgttatctgccgtggaaagctcactacccgctccagagtgatctggactttggacagcactttggacactcatctctatgatgagtgatcttggacagtcatctctatgatgagatccagcacttactaattacgcagacctccttgagtgccaggtgtggggccaaggtggtcactggagcatgtggtctctgctttggagtcgctggcagcccagtgaggagcaccgactcccaggaagacttgagtgaggggatgcggtgagccctcctggcatactgcatggctttgtctatttgccaattgtggccctgtttcaagttaaaattgtcaggccatggtgggtgtgcattgcccgagccctgtgggtgctggcccttcctttcccctctccccgctttttcctgagaggcttttgccctctcctgctccaccatgctttgggtatcttgtcatttctgtcctgtccagtcctgcagcttagttgggcatttttgtccctcctccttcaaccttgggtttaaattctcttaattaggtgggaagtctgcaaagcacatgcttcctgctttggaatcaggccttcctcagcacccttggtcagctcatgtctctggtcctgtccctctgacttgggcaccctgtccgctcgggctgtacccagggtgtggcacagcctggatctcccactgtcccatcagcctaggcaacttttgcctccctggttcaagtgattctcctgcgtcagcctcccctgttgctgggattacaggcactcacgatcacgcccagctactttttgtatttttagtagagataaggtttcaccgtattggccaggctggtcttgaactcctgacctcaggtgatccaccagcctcggcctcccaaagtgctgggattacaggtgtgagccaccgtgcccagccagactgccctaggttttaagttcctggaggacaagattagagtttgtgactcatttctgtacttctagtgtcacactgttccttgcccatgggtaggtaccgagaagtaaatgcatgtatgtgctcagtaaggccccatgaagatggcactcagacaacaggctctgagcggggagtttgtcctgcttgtgcctgccaggcagccgggcctcgtgcccctgtcctcctgtgtgggctcctgctgcttcagggaggtcacacccggatcccctgatggtcacctggttttgtgtggctttgctttttccagtggaacctgaaatatccataccaggtccttcccacagccctctcctctgcccactggtccctaagccaccactgcccttgtctrttttttttttaagcctttgcagggcgtggggaatgtacctacctccctctccaaatcactggaaacataacagatgtgaaaatggagagagaaatccatttcctttttttctccccatgccccactgtgatgtggtaatttgtaatttcatcttttcctgattggagtttagtaatttgtcacttttgttttatcatcatgatgcatctttctaaaacacagagctgactctgttacgcttttctatatagaaggaaagccaggctcccaccaccttatagcagcaatccctgaaccaaccactgcttcttaactcagagcacagcgactgctacctggttttgttctctcttttaaaaaattgtattgcgacatttgtatgtaatttcaaccattttcacatgtgcaagccagtggcattaactgcattcaccatgttatgcaactcttgccaccacttccagaagttttccatcaccccaaatagaagctctgtatccacgaagcaataattcctcgttcttccatactcctagcacctggtaacctctaatctactttctgtctctatggatttgcctattctagatgattcagtatgtggaattatacagtatttgtccttttgtgcctggcttatttcacctggtataatgttgttaaagttcattcatgttgtggcatatgtcaaaatttccttccctttatggctgaataatattccattgtgtatatatagcacattttgtttatccgtttatgcttggtttgcttttgccttttggctattgtgactaatgctgctatgagtattgggataaattatatgtttgaatccctgaggtatacatctgggagtggagtttctatgacttacgaggattctatgcttagtttttggaggaactaccaaaagtttccacattggttgcaccattttcactcccactagcaatgcacaagggtttcaatttctcgacatccccccagcacttgttattttctgtttctctaattactgccatgctactaggtgggaagtgttatctcatcgtgcttttgatttgcatttccttgatgactagtaatgttcagtattttttcatgtgcttattggccatttttatatcttctttgaagaaaaatctatctaaggcctttgcccatttttaatatgggttattttttgtcattgagttgtgggagttctttagacattctgaatattaaacccttatcagatacatgatttgcaaatattttctcccgttctgtagactatctttttattttcttgataatatcctttgattcaccaaagtttgaaattttgatcaagtccaatatatctgttttgtttcttcatttgcttgtgttattgacaagtctaggtcatgaagatttatttgtttttcttctgaaagttttatggttttaccccttacatttaggaaactgatactgtttgagttaatttatatatatggggtgaggtaggggtcaacttcattcctttgcatgtggaactccagttgtaccagtaatatttggtgaagagactattatttcctcattgcataaacttgacacctttgttgaaaatcgattggctggccaagcatggtggctcacacctgtaatcccagcactttgggaggctgagatgggtggatcacaaggtcaggagttcgagaccagcctggctgacatggtgaaaccccgtctctactaaaaacacaaaaattagctgggcacggtgacaagcacctgtaatcccactactcgggaggctgaggcaggagaatcgcttgaactcaggaggcrgaggttgcagtgagtcaagatcacaccacagcattctagcctgggtgacagagcaagactctgccccggaaaagaaaaaaaaaaagaagacaatcaattggctatagaagtatgagtttatttcttgactctcaatcttattctcttggtctgtgtgtctattattatgtcagaaccacaatgtttgtattaccrtggctttgtagatacttttgaaatcaggacatgtgagtcctctaactttgttctttttttcaatattgtttttgctatttggggtccttttgcaattctgtgagaaattgagggtcattttttccatttctgaaaaaataagctgttggaattttgaaagggattgagttgaatctttgttttgggtagtattggcatcttaacaataataaatctagtatccatgaacgtgggatgtctgccatttatttaggtcatccttttttttttcaagcaatgttttgtaatttgtagtgtacaagtcttttacctctttggttaaatttattcctaggtattattccatatactattttaaatggaattgctttctaaattttcttttcagattattcattgctggtgtgtagaaatacaacagatttttgtgtgctgaatttgtatcttgcaacttacctgaatttattagctctagtagctttcttgtgtgttctttgagattttctaatgtaggctcatgtcacctgtgaatacagagagttttacttcttcctttctaatttggatgccttttatttctttttgttgtttaattgctctgaggaagactctgattcgggattgaatagcagtggggaaagcaggcatgctgtcctgttcctgatcttaggggaagctttcagtctttctctgttgagtatgatgttagctgtgggtttttcatagataccctttatcatgttgaggagttcccttctgtttctgttttgytggttggatttttatgttttatcgtgaaaggatgttgaattttgtcaatatttttcctgcatcaggagagatgatcatgtggatcttttccattatattaatatggtacatcacattgatttttaaaaaatgttgaactatccttacgttctaggaataaatcccccttggtcatggtacatagtccttttagtttactgttcagtttggcttcctagtattttattgagggttttgcatcggtatccatcaggaagaytggtagctttcctcttttcttctgatgtctttggcttgatcttgtttcagggtgatgctgctggccttacagaatgtgtttagaagcattccttcctcttatattttttgagagtttaacaaggtttggttttaattctttaaatgttgggtcagattttctagtgaagccatctagtccttgacttcctggtagggaggtttcagatgacccatcccacttgtagttccttgggtgcccatggcctctcttgcgtgctgccaagccttagcacttgctgctgtgtccaccatcaaggatttctcccctttcctgtttcctcctcctcctcctcctcctccgacttggcctcctcttggaaggttattctgagcctcccacttgcacctttcccaggcattctgcatgaccctgtcctcatcagcgtcttgtcattgtcttgtgtcctatctctcttgcccactagaccgaggtctccagggctaaggtcttttcggttcacttggtgagtgcttgttggagggattaggaggccccgccgtctgcgtggggactgctgtttgttctgtgtttgtgtcaagctctgcgttggtgggcttgatggagtgaagctgcagtggtgaaagtaaagccctaatctcatttctcagtgactcacagtggaaacagggaagatgatggcagtctactgaggctgaggtttgggtgataataaaataatatgagagaaaatcatgctgttttacaaacgcctctggcaaataaaaagacccgtgggtgtcaagattagaaatgaagtcttacgtggtttcggcccctttttaatggccttttcctcttctgagtataaacacttcttacaaagggaaagtccaaggagcacgttgttttggaggcaccaacttctgcagcctttggacggaggactgtgctgtgctggaccctgggtgcagagatgagaaagtccccatcagtcactacccctatttagtttccaggcaacagggtcttgattggggatggctgtcttggcatagcatggaaggtgacagcagaggtgtgaccagggaggatccggagagcagggactaygtggccttcagggcaagctggaattctgtggctgaaggggtgagagatgtcctcattggggggccgactgtgaaagttcatgctgcatccagtaaggtgcagggacagcggtcccctcggtcccctgggaagagggctgactccaaacccttctaggatgtgaggctggagccaactgtaagctttaggccagattaggaagagctttggtggactttttgctaaaccttgaagtcggtgagatgttactgaatgtgtgtgagtgaggagttgtctgggagccctggattgtctggatggagaggaccaccaggcgactcgccctcaagcctttgttccctcaaggttctttgtgaaagaacaggtcttgggtttgaaccctgaggggagaaaaagtcagtgcttcatttttcggtggcagggttgtctaggacggggccgtctaggagaagcggtgtgcagtttccaccacagagccgcaccccttggcagccaggaggcctggcgcatcactgagcctctgagcctggcattctctggatgtagttggaggttcgtgctcatctcttttcttcctcagggggctgttgcaggggccagatgaactatgtctatgagaaagccttataagcagctaacactggacagatggtgatcgtgttaaaattcaaagcactttttagcagatactctcaatacagttgtgtagtatagtttagtgtaatgtttctgcagggaaatgtggcagtcctttatgtatcaagaaccttgaagaagtctgtaccctattacccagtgattccacttttactgatataccctaaagaacaaaacctgacgtgcatatactgatgtgtattgcagtgttctttatcacaaaggagaaattggaaacaatctaaatttgaaataatagaggattggttaattgaataattgaacacctttacaatggaataaaatgtagccactgagaaagttttaaaagtacccttttaaaatatctttacagtataatttcagcttattaaaaatctattcatcgcaaaagcattggaagtctgcgtatggaattaatgacagttacctcagtgatgagaataatagattattttaattttctgtcctatttcctaaatgttttacactgaacatttattgtgcttggcaatttttctgtgtgatttttaaaaattttgacgcaatcccatacttacagaagattgaagcatagtacaaagaaccccctcagtccgctgagctgttaacccgatgccctgtcacccscaagcactttcctgtgtgtttccaaacaacacacagcattctctgtaccccacagcataaccatcaaaataaggagatggccatccggtcctcagaccctgttcacatttgccagctgtcccaggagtggcttttagatgaaggggtcccacttagaaycatctgattcttttagcctcagtctgtgatctggagcattcctcaggctttctttaatgttcatgaccttgatatttttcaagattataattcagttatttcggaggatgcccctcaagttggctttgatgctacctcatgacaagagtcaggttctgtaatttggacaggaatactacagaatgatgccatgttcccatcgtacctatcaggtggttcatcccagttctgacagtgtcacaatgatcacttgagtaaggtggtgtctgcccggcctctccactgtgaagttactctgaaatttggaagcatttctacgaaggtgctgtaaagtgatgtaaagatcctgttctttatcagccttccggtctgtgcatccctttcttcacagcactatgaattcacagtctcattctgtttaatggtgatgatccactccagttctttattttgatacccagattgcctcagacttgaccagtgggcgcccctcaagctgcctgtgtccttctgacacgtgggcatcactctttgagttcttccttgctttctggcgtgagatgctccaggctaacgttgtcctttccctgctccagccctgcaatcagtcatctctccaggggccctgattcctccgaagccacagttggggcctgaagtgtgcatgtagctgattcggatgccactgctttcaggccctctcagtgaataggtcatgtatgtatgtgcgtgtrcatgcgtacacgtgcatttacatttctattcgtctatccatctctatacatcgcaaaacatgagttctcagagatccctccaattccgatccggtatcactggctttattttaattttctctctctgtgtttgtaactcccttttctcttggggagaaagctggctctcaccataacttccttttctctcggggagaaagctggctctcaccatccttccattgctgacttaggtgttcartcctcctgtgtgtacccagtctcccatcgcctctactgccccctgccccctgtgtggacatcctgcccacgcagctcgggttccatcccccgtgccggctcaccccgtgtgtagacaccctttagacccctccttggctccgatgccctgggccagcttgcccctccctgggatcgcttcttctccctacttgggctcttcacatggcctgtttgggctccacctctaggaccccgtaccctgctcaggccctgaggtctcacacacggatgtccacttcatcctcttggggcttcgactctcccctgggcatcctcctcagtcggtgccgcctcaccttgcaaggggccagacacacccgagccagcctcccctcctcacggatacctgcctgccctgcctcacccaggaacctcaggcctgccttgttcagaaaggagatggacaccaatctgttgttaaagaaacagatttaagtagggaattagcatatgctttagaggtgactggacgcttagaaagaaggactttgcttctgctaactgaaaatccccatgaaaatcaacctcattggcagagcagcagatctgtaggagaggagtcttctttttttttatatatatatatatatatatatgtrtatatatatatatttttattatagtttaagttctygggtacatgtgcacaacgtgcaggtttgttaaatatgtgagaggagtcttaatggggagcttgaatgactgtgaagttgtctgctttcgaaaggaagcagctttaagatctcccatgtgcaggccttttcctaggactgacccatcgccaggagggtgtaactgaggcagaatggctaggtggaaagagcagtggttttgcagctggacagagctggctccccatctcggctccgccatttactggcgaaatcatgccgaccccttgggagtcccagttttctcttgaaaagtgtagcactgataatccccaccccacgggatcattttgaggatctgccgtacaaggagcacagtgggtattcaattagtgccagtttcctgccttcacttctctcaaagagaatgaatttgcctcacccagacttttttggaaaaattggacacagtttataccctagcctttgtccccacccttggcctttagccgctcattaacctcagaccattagtcactgcttcttgtatgcagcctccattctggctgggcacagggtgacccactgtggtctctctgtgagcaccagccatctcccatggatggcttgcttacgccagagctggagctggtttccatgaaaacttgtgtgtgtgtgtttgtgtatttttctttttttctttgctccaaagtaaatgaaaccacacttgggctgtctcaccaccgagcataattgtgatggaactgttctatggtgatctgaattaggctgcaactaaagagccacaggaaagtaagataaacatttgttgcctttggtattgataaaaacaaattaacacaattgtaaattctaacttttgtatatgccattgtctgtgctgtctttgtttttggctgaaaagccaatttagctcttcaccatgaatcattttagtaaggcaagtagatgctatctctgttggtttataactcaccctgcaaaagccaccacactgcttacactttcttaatacaggtgaatttatgctttagaatttatgacttcaggttaatctagtaaactcactttagctcttatattcttggggactcatttttggcaagaaagaagctggtagagcaacacaaatttgtaaactgagacttttagtgtcatggttttagtctcatgctagtttctgtataggagcaatgcttttggatatggtagctatttcctgtgatgggaatgcctttgcaatcaagaacgtatctcctttaatgtttgttgataaaatgaaattatttctggaatatgtatttttgttatcagtgaaatctgtggtttataaaaaaccctgcatccttaacatgattctaaatcaaggaggccaagagatacttgtttctttagctccgtggatatttcctgagggcctgctccatgccaggtaccaaccttactgctgggatagggtcatggatgaagcatggccactgtcctcaagatgcttagcatctgattgaagagagctgtatgataatgcgttttatagggtatgatgtatgattaaaatcaccaaaaataaatttaattctgtttcttcctactctaacatagttggttgtgtatgttcatgattctgttcattcatccattcatttgttcagtcagtggataaatatgtcctgagcccctgtccatcacgcaggtaggcttggtgcatgcctcacagagcttctatccagatccttgtttgttccaaacctgcatgtttgagagaaacaacgattagacatctcctttgagccaagtgccatgctaaatgcctttttgcacttgaccatcttaatttccagagcccattgagaggagggtttctstctcttggtttgaaagtgaagaagcggtgtctccagatacatacgttagagatgcccagacatggctgctggagaaaggtagactccagttccagacccagctcttctctgcctcgtctatcacccagccccatctgggaaaggatcgggtgaggatgagagctcatggctgtcagtggtgtgccatgaagctgcgaacgcacaattagtgatgtgttcagtgtcgtccaaatactgagggtcacagcgcccgtgagtccactccctgcccccacacctgccacgctaggcccaccctgcaggatttcaaggcttcccttccacatctctgcctttgtggggcctggagatgagatttggtaaagttagccagactgagctacttctcgctacttatgctctggctaaatacactgtcctaattaaatgtttctttttcatttaaaattccacagtgctgtaattcaaattagaaagctgctgttgtgacagatgatgtcatttaatttcaggatcattgtgctgcttgtattcaactgcagacgaaattggaccctatctcagagcttttatcgctatcaaatatgatgttcttacgagtgtctgatgaacttctcgtgacggggtgttcgaattcccttccaccgacgttccttgagagaactccttgacatgggactggggggctgattcgttaacgtctttgtttggaacctggtgcctgagagtctggttctgaaatggacctgtcggttttcctctgtctagtgtctcacggttaagatgctccagatggggcccaccgtgtctcctcttccagcctggtcctctccctccctggccatctcagtggataccccgcattggagagccaggagaagagctaagagcagctttgcccctcatctggtttcctccgagtctgcttgacaatctctttcaaatcaactttactaaggaagaagttacgtaccgcaaaatgccctcatttgaattgtgtaaagaatgagatttgacaggcttggtgctgtggctcatgcctgtaatcccagcactttgggaggccgaggctggcggatcacaaagtcaagagatcgagactatcctggctaacacggtgaaattaacaccacttcttcactttcaaaccaagagagagaaaccctcctctaaatgggctctggaaattaaagatggtcaagtgcaaaaaggcatttagcgtggcacttggctcaaaggagatgtctaatcgttgtttctctcaaacatgcaggtttggaacaaacaaggatctggacatgaacccgtctcactaaagtacaaaaaaattagctgggtgtggtggcacgcacctgtaatcccagctactcaggaggctgaggcaggagaatggcatgaacccgggaggtggagcttgtggtgagccgagatcgcgccactgcactccagcctgggtgacagagcgaggctccatctcaaaaaaaaaaaaaaaaaaaaaaaagaatgagattcgataaatgaacatgcctaagtcctagaatgttcccgtcacccacaggtcccctgcacaccttccccttgctgccattcccggacagacactgccatgctttctgaaatgacagatgacgcgctttccagagttccatgccagttagcaatgacctcataaacctgagttgaccccgtggtctgcgtgcccctgctctgtgtcagtgactaggttctcgtcgatgcttcctgggtcaccgcagccgtctgctgagcagcactcctttcggtgcctcccctatttccagagtgatctttcccagaaacaacccagcttggtggttccctccgagtgcccctgggccagttacctttgaggcccttagggaggccgtgtcccgcccccgagctctgggtgggcctctgcctgctgacctcggctgctgcatcaccatcggcccagctcctgctactgtcccttgcctcacttcccctcgcagccccgtgaggaggtgggcaggggatgttgccatctctctttgaagaatgtgaagagcagtgtccgggttttatctgaggccacctggttgggggacagtgacaccctgcaatttttatcaagaacttgccttcagggtatggggctttctttccagaaatggcaacattgaaacccaaaggtcttctttttaagctctacaaaatatgaaactacgtattaatatttcctagagccaaataagtctcttttctcccattgatcacccctactatggcagattctctgattactgccaggtatatgctgccctccctgtgggagattatacccccacctcactgccttcagacttcgagagtgattttggtcctcccctcggagggtcctcccccgcgagggtcttcccctctgagggtcttcctgtgaggggctgtgcttccctgcctgcgtggtgtcaggcttgggtttgtgatttgctttggcccctgtgaatggccggggcacatggtagatgcagtaatgcccccccgcccaaagatgtccacgtcccgatgctcagaccttgtgtgtcagaccttgtgtacatgtgacctgacgtagccaaagggactttgctgatgtgatgaagttaaggaccttgagaaggggaggcgatcctggatcatccagatgggcccagtgtcatcaccagggtccttccaagagggaggtagggctgggcagagagaggrgtaggggctgtgactatggaagccagaggctggggcaatgcagcaaggggccacagccagggagagcaggcagcctccagaaactggaaggggctcaggcagagccccccctgcaccctaccccaggaacgcagccctggagacatgctggtgtgcaggcttctgacctctagaactgggagattatcagtttgtgttgttttaagccactaaatatgtgatcatttgtcataacagcaataggaacctaatacaggggcacatgtaaactgctgagcagaagtttaaataaccagctgggggctatggccatctttcttttgcctccagcataaggtgagcaaagtcctggtggggacacttgctgcttcagccagggtccagagtgagacagacatggaccagagcctgtccagtgaagaaatgaaccttggttgtaagccactgagatttggaggctgcttgttaccacagcataacctagcctctcctgatggayccatttcacctgcactcctcacaaagaactcaagacttccattcattcatcagatactttgcagtgtcctttgatggccaggcactgtttggcccctagtatactatcagtaacaaacagacaccgattgttcttactcttgtggagcttatagttttcctgggaagacagaaaataaataagcaacagaagactatgcaactataatttttgatgagtgatgtgcgagaagtacatggggcatgatggaataaataaggtgcagtggggtgagaagaacccagctgtgcagttggggtggggctcgtggctggagaggaagcagtatgtcagyaccccagatgcccayggcagagtgggtgtggccgggctgtgagggcagggcagggagagcagatgtgaccagtccagagctggcaagtctgggttctgcaaggccatgcacgtgcaggggtctgaggtctgcatttgagcaagaggcagcaggtgccagggaagggtttttcagcaggaaagtgaaatgtgcaatttcacttaaaaacagatccacttgggagaatgtgtgcaagatgcaagcgtggcagtgggaggtccggctggagcacttgtgagcttgggtgagagtggggtgtcatggcggacgtgactgtgggaagggctctgaagaggggtcggggacagtgaccagcaacaaggtggatggtgtggccggttactgagatggggaagcctggaagaggatcagatttaaaggggtaagtaagaaatgtggttgcagaggcagtaatttgaggtatctgtgtgacatccaaacagagatgtcagattggcagctgtgtgggtrcatcttgctcaacacattaaataaaaataaaaatgtataggacccagtagcacttttcgatgtgcacatccagcaaacattaagtctatgcaaactgtgaataacctcgtgctcgggatggctgtggatcccatgtttctgaccccagcctcacaaaatcatcggggcccttcaagatgggctcaggtgccccttctcgagagaggcttcctgagcctcatggctgagtcacctgcctcccatctgtgctgcacacttgccttgcagcatggatcccctcctcagacacctgaggcagctttgttcctctctgccgctccctactcattacccagtctttgaggtacagaagaggcattgagttctttgtgttggacttagatatacacttaaaaaaatttaattctcacagaaacatcaggatgtaggcattatttctcttagaaagggaaaactaaggcttagaaagcttttgtctcttaacccaagtcacagaggtaataaatagcagatataggcactgaactggatctaagacttttgttcactcctactatatgcaatagttatctattgctttctaacaacttgtcacaaatgtagtggcctagaacaacatatattaattagcacacagtttctatgggtcaggagtccaggcatggctyagctgggtcagacaagctgcttagagtctgacaaggctgaagtcaaggtgttggccagagctgcagtctcatctgaggcccaactggggttggatctgtttctaagctcccttcagttgttggtggaattcagttatttgtagtcayaggagtgagagctttggtttctagctggctgttggctgaagaatgcacctcagcatctagaggccacctgcagatccttgactcattgaagtttcccagcatgactgtttgcatcctcaaagacagtgtaggagggagagagggagggagaaagggagagagagagagagagagagagagagaaagaaagaaagaaagagatggactccagcaacatgagcctacagtctcatgtaatgtaatcatagatgagtaatcacataggtcctaccacctctgctttaagcaagtcacaggacccacccacaccctcaaggggagaggatcacatagtagtatgaacaccagagggtagggatcatgggacccctttaagagcctgccctacagacacacgactctgctgtatttatcactttcacccctactggaaggagcacagagctctccagaggagccctttaataagtgatggtgaagtggaagccactgatttttcatcaaagggcctatagttgagtttacaataggatagacatgcaattttgcctttggtaatgacttcacagtgtgcctataattataacattggcaggaaaatctaggtcatctctctgaatccactctgtcctctctggggcttctgttgctgctgctgcctgggccctgccacaggcctgcaccacttctcccctgggtcactgcagcactttctgccctggccttcctgcctcttccttactgccagagtatcttaagtgacaatctgactgtgatttccccatggctctgaaataaaactcaaactccttagataaaccaagttctccatcgtcttttcctttcttgcttctccaaccctgacccttaacactgtccctcttgcatctcaaggtccaacaacacccaggcccatggatgttctgatcacactgttctgtctcaggcctttgcacccactgtgttctctccctaaaaatctcctttcatccccttcctcacttaaatttcccacataaatatgtggcttagtgaattcctacttttctttcagggttactcctcagtggaggcatccctgatatcctgagggaaagttgatagagagctcttagagaacccaacatcttgcctagtgattgggttttgttccttgacccttaaaaaatttcacctctgtattctcagaaacttccacagtatttgttgatggcatatgcccctcacatcttgattgaaagggtggatggatggttgaatggatgatgttggatggatggctgttgaatggatggatggatgaatgaatgaatgtatagatgttggatgaatggatggatgaatgttggatggatggatggatggatgatggatggatggatggatgttagatggatgaatggatggatggatgttggatggatgaatgaatggatggatgttggatggatgaatgaatggatggatggatgttggatggatggatggacggttgttggatggatgttggatggatggatggatggatgttggatggatgggtggatggatgaatggatggatggatggatgttggatgttggacggatggatggatgttggatgatggatggatggatgaatggatggatggatgttggatggatggatggatgttggatagatggatgaatggttgttggatggatagatggaggctagatggatgagagtattgcagaaaagctgtatggaagtgaaaatcttaaaaacaaaatctatttaaaattccttcctgggagaagcactctatattgtattaattaactcagcttgctaatcagggaaatgctaacgatctctccttccagttgctgaggagaggtgctggaagagcacccgcctcattcatcatttcagcttggtgctggctctgtttatttttctggtaaataaggaaaagaaattacaccatactttgagctgaaggtattttctgttggagttcaaagctgccttaatttctatcttgtggatgcatggtatacgttatctaactcaaggctggggctgtgtcacctcttatctgtcacagtgcctagaccagtgctgaacacatacatgccaaacacccaggggttcaccttaagaaataaatcctaaaggatgtgctatgtcagtttatcttcattcactttctcaacatctactgaccacccattatgtgaaactgtggcatcctggaatctgaatgggactargaagcaaggaattcagtcttgccaagggtactgagatgtgtatagaaggaagtaggttagagggagatggagggaaatactttgagaagcccacaaacagttctacaggagcccaggtgagaggaaggggggttcctttctggtttagaggaactttgaaggttttaatagagaaggtgacatttgagagaccccatggtatgaggtagaataatttggagttaaagacctggttaaattccctggtttatttctcagctgagccactctgaaaatattgcgtgacctcttcttacctcagtttttaaccccaaagatgggaatgttactatgtactcaagtgtgtatatgtgacggtctaattacttaataggttatggaaatgccttaagggattacattcatcttcattaggttgtggaagcccttagagggtggctgggagttgtacatgaagaagaaagcactttacagccagaaacttgcggggtgagtttctccaaaactcacggggtgaggygtggagtgaggatgcccctggtcagtggtgctggcggcgtggtggggacttgcgggaaagggrgttgggaggaactgcttgaggggccatcctgaaaggacttctgttttgccttatcatgcataacatttttgtttagccaattcatcatcctgatcacagttttcttaggctatggctaaaattagcctgagtttcctgaactcattccagatgacagccccgtgtgcttgctggctgcaggacgccacgcctggcgtggtttggctggctgcctttttgtcctcttctcctgctgtgcactccggctttctgctcctcttttctccttgccttatcttgctgtgacactgttgtgcctacctgggtctcctgcagatgcttacatttcagatggccttggcctgacattagactgcatttggaaggggcctgtttaaatgaagacccttgacggtagttaacaaaatcaccttcacactgtcttaagccaaagagggactgtcctaggggaagcttggtgactcacaggaagccaggacacactgcagggccaggccgcaggtgggacccgggctggagagtcctcagaaccagcctgccaggctttctgcaccagtgtgtaytgtcgctcaagtgctgtcacttgctctgtggcttcttgtccttcctttgtctttttctactcactggctcctctgctgcttcaaacccattcccctcacccatagctgtctcagcccccagttcacatcatgacaggtgaaacctacagccctgataggattctctcagcaccaactccagacccgcaggtggaggcatcttcttggcccagcttctattacgtgtccttctctgctcctgccacctggggccagtgggccctgagccccttagtgacagacatggctatcagaggcctttcctgtgcacagaygacagttcccaaagaaggagaccattgtgggctagaaagagacttcacagggtgtccactaagatactcagacattacagaatcctttgactactaacggaatctctggagcctcttgaaggccataacagttgaaatggtagacgttcattcattaaacatttgctaatcacctgtaatggcaggcgctacctatattctgggggtaaagtgtgtgttgcagtagttgctttgttctagctggacttrcttgaacttcctgtctggttcccattccaggcggctggtctgttctgtgggtgctgtacccactggggtcttgctcctcggtatcaaagcgccacccacgtgcatctcatggagctttgcctggagcaaatcttggtttctgatttaaatgggattaatagtgaccatctcatagagtttatgaggtgtaaatgagaaaatatatttgtatggactttgtaagctctaaattagttacacagttatgacttcaaattcctagtggttgcaggtaaatggtatagttcagtcatgagaggtaaattacaaatgcactgttggtctttgaagctctttagcttgagataaatctattttttattttctagacaatgtgcatttgatgttgtatcttgtaactgtagtgatgaatcagaatttattttccaaattctctttaagagaaaaaaacatcaagcttacttttgctgctcagtgagttctgttacgcagcatgttagaggctcactcacttcctatgtttatttttttcactgctcagcactaaataaaagctgccatcatatgtcttgctatggtttgaatgtttgttctctccaaaactcacgttgagatttaattgccagtataataatgttaagagatgggacctttaagaggtgattagggcatgagggctccgctcttgtgagtgggcataatgctttcataaaagagctttggggagtgggctctcttggcccttctgtcttactgtcatgtgaggaaccagcgtgtccttctccagaggatgtagtatgcaaggtactatcttgcaagcagagaaaccaggctctcatcacctgctaaagccttgatcttggacttcccagcctccagaactgtgagccagttgctccttataaattaccttattgttgtttccttataaattacccagtcttaggtattctattacaccagcacaaaatagactaagacatgactactgtgtggtgagcactttgcatgtatcatctcatttttatccttacaccagtctacaaagaacatattatctccactttacagatggagaaactgagtcttagtgtgtcaaaatggtgtgcacagttaagtcagtaagactctcagactccagagacccttctcttcccacagtaccccactggctcaagggtcagaatggggcggtgttagaacttcaggtgagaggacatctcctcctcctgttcgtgtggatccagcctgtggccggatgctctggctgtatctgggtggttggtgtgggagagcctgaactccgcctactcactgaactccgcctactcactgaactccgcctacttactgaactccgcctactcactgaactccgcctactcactgaactccgcctactcactgaactccgcctactcagccccaccgtcgctgctgccccacctgtagggaacctctacggtacctttggactgagaaaccatagatctcttctctctagcttgtccgctgctgccagaagtgtgtaccccagacgtgggcagcgcctggggttacttctcaaaaccacagcaagcatttattgtctttaaaacacaatagcatcatgaatcaattttagtgctagagagatatatgtgactctttaaaatggtcccctaaaatttgtaaattacaggcatcagcatcaataaaataacggcaatgccaaacaaatgactcatcatcttccctcaggttctgtacaagtcttaccttctctcaaaggaagaaaatgagtgcttagttggctgcttaactggattcctctgaaatttcacaaggagagaacatgtcacatgtagaattggtgcctctaggggagtgataatcgttacttttaggtatgaatttcctgcctccgaaagttggccatggactcttttaacaggtgcaaaataaaccctgtccagcttccagatagctgccagcatgatctttctataatgctggtacgatcacatctcaccctactttaaaccttttcgttattcctcattgccttaagaataaaaaatttacccccttcgcccatcagacagacacacaccctgcccctgcctctcccctgacccctcatatcctgcgtgcagttgctgggctcactgttctttgtcacacctctttgccaggtgcctgctgccccctctgctgggaacagccttcctcaccttttatgctcgtgagctccttctgatttgtgctcaggcactgccttctatgcagtctttccttcccccagtaataatcataatccgcacctgttgtgcgccaggtggtcttataggtgttcacgagcactgtcacattcgctcatcacaccgtcccttggagggtgactattactggcccttggaaggagaacaagggccccgggcacagcatcctcagtgacccgtagcccgtaagtgtggaacaagcctttaagcccaaatctggttccaaaggctgtatgctctccccttcgccaggctgcttgtcccaggtgattatccagcccctgctctgtgcattcactctacagctgggccttactgcatctgccggttccacatccttagattcaggcaaccatagattgaaaatatttggagaaaaaaaaataatacaaccaaaaaaatagagtataatggccaggtgcggtggctcatgcctgtaatcccagcactttgggaggccaaggctggtggatcatgaggtcaggagttcaagaccagcctggtcaagacggtgaaaccccgtctctactaaaaatacaaaaaaattcgccaggtgtggtgtcaggaacctgtaatcccagctcctctggaggctgaggcagagagttgcttgaacctgggaggcagaggttgcagtgagcctagatcacgccactgcactccagcctgggcgacagagcaagactccatctaaaaaaaaaaaaaaaamcattataacaactgtttacaaagcacttacattgtattaggttgtaagtaacctagacctgatttaaattacatgggaggatgtgggtaagtagacatgcaaatactgtgccattttataccagaattcgagaatcaaggatttcggtgtctgtggggttcctggagccaattccccatggctgcactttttattgcttcarttagcacactctgttgtcatttattacctgcagttttactttgcttacattgtgggcttccttcagtcaggaagtgtcctgctttattcttctctctccttccatggtctagcacagacccagctctcaggaggtagtcagactcctgactgaacttaattgaatgtattattccgtggatattgcatctttttcattgagtcctatgttattactcacatattccggatcatcgacagttccctccctcctcttgtctcttggctcctttcacttccttcctctcacagaaactttttctgtttccgaggaggctttgcggttctccctcccgctcccatatgcttcctcctcacgtgccacatatttgctctcctaatcacaggcacttcacctctttcctccttctttgtctttaagtcttggatgtaaggacccagggcctaaaagcaattatcaaatgattgcatcggtgacggatggtcctattatgataccttcctgtgctgggattaaagattttaccatcaggtgccaaggatggctacattaatgtcatctttctgatcaagcttaattcaaatttttgtcgaagagaacagtcaaattaatgacattatgatatcagatttctactttggactacatgggcctaaagtaccatgtgtcttttgcaacgtcagcagttgctgttaggaatattttcttttgtgaggttttttttttttttttttttcttcagtccttttcgtccttatgaacccatcactaggcacatagagacattcattgttgactgactcgctggatatatggcctgggggtggtgttccatttactcctcaaatgtaaggacagccttctgacctggaggtgttagtttaggtgaggggattggaaacaggaataacagtccccgctcggaagcagagtgagttttgtgaggaactcagaccagctaccagctatgctactggaggtgcatactgggtgctgttgaagtatgcaagaggccacctcactcaaaggaagggcttagggagggattatggaagcagtcaattctgatcagagacttcgaggcagctcttacataaatgagccagaagttccgcagatgagcaggcctgactttccgatcgagtgggaagcgtgggtgcagctkcacaggctttgattgtgtcagggactctaatgtggacatgtagagggtcttttgagttgagggccaattaaaggttgggaggtgaaaactgtatgtgcaccagtcatcaagttggcagtgragaattcggtggatcagttctactcacatgggcttgcggagactccctggacttgaacttatcccccaaaacttgaggaacctgcctctttgtgacttggggcgtaggaagtggaagttgcttcctacggacaggcagagcccaggttcacagtggagggtccccgctgagtctgcctggcgtctcctccctgacttctccacgcccaggactccctctgagcagtgagtggccaggcaggtgcctgctcctgcaaccctgaagccgggaaagggtggtctctctccccatccttgacatagaaatcaccacccgacatttttgctgttttaaaacagttcatcctgccatggtaagtgatggcaaacatctgtgtcatttcattctcaaaggcccaccttctgtgtgctgcctgcttctggacactttcctgatggtcctgctggaaataccgtccctgccgctatgagtttgagagygggcttcagcctccccatgatgcagcacatgctgcctgggatggcgctgcttgtgtcaatctccctgaaatgaagcaccctctgtccaggggactatgttctatttgtcgaaacttcacaggacataagtcactgctgggcctgtgctctttactttcttcaccaatctctctgctccccacataatactagacatatttccaacccctgaaattcccaactgctctctcatatataagtaagcaaaggaaaaattatgtggaagaatttttttttgatgtcaagaaaagaggaatttaggctggctgcagtggctcatgcctgtagtcccagctactcaggaggctgaggtaggagaatcccttgaaccaggaggcggaggttgcagtgacctgagtttgcgccactgcacttcagactgggtgacagagcgagactccatttcaaaaaaaaaaaaaaaggaaattaaaaaatagtgatatgtctaggatatagcatgatgcaaacccaaaccagacagacctgggtttgaattgcagctcatgatctgcaaggccacctattaaaaggggcctctaagcagaatgtctccacctgtgaatgtggccattctatctgacaggatgttatgagactaggagataatgacgaacccaccggctctgacctgcagtttcttctgtaaagatggggacagttcatagatctcttgagaggatgaaaaatcatgcatctccagcgtccagcctggtgcctgacatgaaatggaggcttactggtcgggagctctgacattatctggaattctccattactcttctcacacctgtccaccatcgtctggaattctccattactctcctcgcacctgtcccaccatcgtctggaattctccattactctcctcacacctgtcccaccatcgtctggaattctccattactctcctcacacctgtcccaccatcgtctggaattcttcattactctcctcgcacctgtcccaccatcatctggaattctccattactctcctcgcacctgtcccaccatcgtctggaattctccattactctcctcccacctgtcccaccatcgtctggaattctccattactctccttgcacctgtcccaccatcgtctggaattctccattactctcctcgtgcccaaggcaaggcgagccaaagcttcccgttgacatgtcagtattattattcctcctctgtttatgaaagtggccaagttgatgaaggagaagggctacccaaagatgttcttttctggagaaagctgtgaatattttatgaaacataccaccaagtcctgccatggcgcctgcgcctgagcctcctgcaggagtcaccttattaaaatgtccctgttgatggagtgtgctggcgcatacagggagagcttgcctcttttcagaatcactcaaaagccataaatattttaaggagttttatctgcccactgttttctgtatgttaatctatcacaccgatcactttttcaggacaaagtatcttgccttgttcttaacagcgagtcgcaaatcctgctgtcagtgtctttcctttctgctttacctccattttgaaggaaagttctatgytgtcctcatacacacattgggactcttttaatgaatgaatgactctcatccctgagaaatgtgagcatatgcactcaggtttgtatcttagggagacctgctctgggcgtcttgctctgctcacgggcatcagtgcagctgtcgctgagtgcccacctcgttccaggtgctgttagggaaggggctgggagtgggggatgtacgttgttctctgtgctcctgcttccccccaccatgttccagaggcagcaacagtaagtgaccaaggagcacagcatggggttagggtgctcatggagctggcggccaaggtgttgaggccagcctgggcagaggcaggtggagaagagtctggatgggtgtcttgaaggtaatgacctctgagtttgcctggtaggaggagctgacctcacctgagcctcagggaatctggtcagcatgtgccaggtttaaggcccaaactgaggagtaactgaaaaagaaaggggcttttaatggatgtatcagtcagggtccccacaggaaacaggcagcacactcagaggggtaactggggacagttgaataaaggggactttccaaggacctgggtggtgaagggaaacccaggaggcatgggaagcagcctggggctatcagcagctggggactttggaccctccaggtagaaggacaagaggaagcagttacccaaacaagtggggagctgctgcaggggctgcaggggggagctactgcagggggagctttgggggagctgctgcagggggtgcaggggggagctgctgcagggggagtatggggggagctgctacagggggtgcggggggagctgctacaggggttgcagggggagctgctgcaggggggggctgctacagggggagctgctaccgggggtgcagggggagctgcttcagggggagctactgtagggggagcataaggggagctgctacagggggttcagggggagctgctgcagggggtgcaaggggagctgctgtagggggagcatggggggagctgctgtagggggaggtaccacgggggatgcagggggtgcagcagggagctgctgcaggagggagctgctgcaggagggagctgctgcaggagggagctgctgtagggggagctgctgcagggggagcatgtggggagctgctgcagggggtgcaggggggagctgctacagggggagctgctgtagggggagctaccacagggggtgcatgggggagctgcttgccagagggcagctgggctctttgggaagagcagagcagagcagagcagagcctggcagtctagggtcaggggagcaaccactgcggccctactctccactgtctcatctggggcctcccgtgggctgagcctggccagaagctcaggggcatgcggagcctgttgatgctgtcacctgagtctgtctcttggaacacagcagagggtataagcaaatcaggaggagcatacagagcatgttcagcatgaaggatttaagtgtaattaatttttacaaggcttcaaagcccagtctccccagcctctgttgaccttcctcagtgttcatcagaccaggaaacaggcaggctggcctgcgtggcccagggtaaaacactgggctgtgtctgccttctgttttgatgctttcaggtgggagaggttattggttggcaaatgaggaaaggaattttttgagaggttcaataacttgccccatattccccagtttttgacagggtggaatgggaaggcaccattgacccttagctgcttctcactatacccacaacccctgaatacagtaaggtgcagtagattacactcatatatatttttttcttatttaatccttaaccctgaggggtaaattgtatagtatttttttcaaggtcatgcagctagtaaatggcaggcctggaatttagacccagatatgttagtttcactgtaccacatggtctgttttctcttcgtatttttgagtggcaatcatattttgctaggacttgaccctcctagatgataatcatccattttgaccagtggtgaccttgcatttaatgacctcctgctggttattaccagagtgccctatgccccagtttgtctgagacaggccctgttcatactgccctggagtaattattattagtgccccctccccatctcagaatgtcctggaatcacttgggttgtcctggtgctcagcaggtaggggggcctccatttgtctctgtgctcggcccacggatggcgagaggcttgtgtcgacctcgccttccctttgcttgtgaggcatcactttcattatataatttttataaaatccaaacatgtacctagaggcattttggaatcacatttgtttcagaatyggaaaggaaaagtaaagtattttgggtagttataaattacctctgttttggtttttggaaactccatttatattgcactgtttttcagtaagtaaaaaggcttctcgaaactaaggaaaagaaaaaatatctcccctctggatagtggttttcaatctattcttagtcataggatgttgcttcaagtgaaaccttcacagatcccccaaatacataacagataaatgtcacgctgctctgactgaagccaaatattaactacacgggtcatgaggaacatctggccagttaattccctgcatacttgctgagggccttctgcataccacgtgtgcttctaggcactgggacacaacagagaacaaacccaacaaaaaacaccatcagaaagatgctcttctaaggtcggggagtctgacaaccacccttcaaacaggcttcatcctttcaacttatcttcctggtcatacacacctgggaggcctgtgagggtaggcgtagatgtcggggccaggtgcgccctgggcaaggggggcgagcgggagctttgtgctaccaaaatgctgtaaagtcaaatggacacttggctttaaacgccttctctgtgtcagggactatgctgggaattgtgcagagcttctgtgtgactaggttagggatgaaagaccaaactagctcatcagaattgagcaagtgttgcccatccactctgagaggctgccaggtatctaagatacgtgatgaagggctgtgcccctagtggctgtgggtgcagggctgggcatctgcagtttggcttctgattctggttttccaaataactaagagacttgtttgataattatgtagttggctatttaccttctctaggactcagtctccttatttggaaacagaggactgtactgggaaattcttaactccccgcccccaccccttctccattcatcctccacagattatgaatcagtgaattgtgagttcggatatcacccagaggataacctgtctatgtataaacacacgtatcctcatatctacatgcatatatgtgtgcgtgtctgtctgtctcatccccctacaccccacccccaccacacacattttgaaaacctggagcctcatacttgctcttcctagcctaaattgtgggcaagatggaaactgccagacttaaatgtttcactcctctctgccctgcacagattgagtctctgtgctgcctcygtgacccccagtcagagtgcgccatgcatgccttcccatctcccttacaataaagcccatacccttggccagtcttgcctcagctcttctcatggctgtcttgtggcctggccacaaggaaatgatttccatgcyttcgcctgtaagccttggccatgcttacctactgcctgaggcaccattcctcttctcccttgcactggctttctcctcctccattctcaggtgtcacttctgagaggcattgctggaactgagggccactcccacggtaccatttgcctccaattctggacggcttggctacatgcccctttcatagcatccttcggttctcttacaatgacagttctccagttacttagttttatctttgttgcagttgtcttgagggtggggactgttccattttacttgatgttctggtcttagcataaagcaccatgcctggtgcactggaggagctgaactgaatacttagtaagcgaataaacaaaggaatgaccgtaaaaagccttccatttctaccttcctgtggatctgagatttcataattactaagaccttgtacagacagtaagtgctctgagacttcagaggaggggatttgaattgaaccaggacttgaaagcagagtagaagggaggagaagaaggatatgctcctggtggtggtttcaatgcctgtagtatggtggtccttgctgtatttttggccaaggacttctttgaatctccaatttaaagccatggatcattccctcaaaagaaaggacacacacgcaaaatctcctctctatgtctggaggttcttagacttctggcgctcatggagctcaggatccgaactcctatcttgaacagaggcaccactgaaatgtaaacgtttgcaaatgtttattaagactgtattatgtgccaggcactttgctaattgccagggatgtaaagatcagtactactcaaggagaaaaacaggaaagggatctgtgtttctgagtatctctgtggagcttggcactgttcaagccctttatataggctatcttgcttcgttcttgtaacaatacgtttgaggtcggcattatcctctttttttcgtgggaagaatttgagtctcagaggtgaaatggccttttcaaggtcacccagctggtcagtaaaagacttgcagtctgtttctcttgctccaaagcttgtgtttccctgtcctacctcactgccccctcgctcccccacgaccaagaacacagctggtgttcacagtctgctccctccatgtgtagttgctttgaatgaccatcccagcagccccataggccgtgacatccactcaccctgcgggcatcttggcaaggcctggcttgacctgcattcctcagtgactgatgttgtgtgaacttgcctaggaactggcaatcccctctcaggcatcttgtctagttttgggataactgacagttgggaaattctttttgatcttcagtcgaaatcagttacctaggtacctgtcagcaacttttctggcttttctgtgaacgactgtctgacacaaaaatgcgaacctggtgttgattctttgggacccggggcctctgctctgatggcacgatctgatggctgttgttcaggtgctgaatgaggaagcaggcggagaggctttcgtcctggcaacactgaccttgcctttgttctgaaggttgagctgagccctgtgtgattcatcatcccgcactttgtcattggtgttgctttttgatctgagcaccagactttttttttttttttttagttcatcattacaaaatccacatttgacttggtgatttagctctttggataggcttggacctttgattgctcgttctcgtcctttctgcttttaaggaaagatgagagacagacccttctgccacacaaggtctcctatgaaggagtggccagcctggtagtgctgcccgctggccctctgtcactgaggacagaccctctggtgttctgagattcagactgcatgcagtctctctccttcctggagcctccccccacagggtgagttaggtaatgaagatgcgattaaagacaaaaagaaagtgtcccagaggagacataaagagggcagggagaaggagctgaggaaaggcttcacagaggaggtactgctagatctaggaggagacgaggtgtttaccaggtgggtaagagaagcatagatggagctcattccagaaaggtccacagggtgctcaaagggagggaagcgtgaaaagatagggcacgtcaggagggtttatacacatggcgctctgctttctctcctaagcaggtgtctttatgaagtatagttatttttttctctcttgacaataaggaggcccagtagttccaggaagaaaggcactgtactgtggccaggaaggaaccatccgaccagcccagggaatcaaactggataaccagggggagacagattcaacagtgttagccgaagtctcaagagaagtgctgactgttcagaataaattaccaattcatccatcaatttgccatatatttatagaccatttattatgcgtcaaccactatttgagcacagtcgccatttcccttgacatgaggcctctgggtgaggccactaatgacaatgatatgctgctaatcacagtaagaaacaggaacctaggactttatgagctggggttggaaaggggagacctgggggagggtagaagaggatggaccaggtctgtgtatctgcataaccttcagtcctgggggcaggtggctggagccggccaagtggtggctgagtacgtttgggctgtcccaggagccacgcagtcagggctgctgctgagtgggaccctgccacgatgcagcatggatgacaggcccagggggcaagcggaggcagagtcaactcagggagctccatgtcgttaaatgtcgccattaacactgtttctaaaagggttagaaagaggaagtaaggcttcagttcgaggcaactctgggaaatgtcctaatcacaagaaggatgtttaagaagtaccttgtcggtgtgaaccgttcttctgttagctgggtaactacagctggtccgggcctggtgcctgggctgggggaatggcacccccaggagggtgtgtgtcgtagctttttacagcacctgtgtgtgacgcagcattcctgccgcctgcgttgtcatctccctgcctcagagctgctgcatttcagactgtggctgaaaatatcgggagaaacttggcctctttcatctgtttccctagctagttcacagctccccccatcgtgccatcatactacttgcatattatttgtctaagatcatgagtgcccacttagatatccaactatcgcacgggcctgtgagtatctcagagatcgcagggtctcagtcatctttattcctgatgatattccatgttgcctcatatttctccctcccgagaacatctttcttcattgatcttcctagaaaatgcctcgttcttcaagacccattgcagagcggggagccctcctggttccgttcaggctgttgcagaggtctttcatctggctccatagctctatgcttacagccgacagccctggcatacagtgtagcacatgtattctactgtcattctttgtttacagatctgccctcccaggagacagtttcatccctgcatctccagcctggcatatggtacaatgcttggtacccaggataagtgctaagtaactgctgagtgaatgaataaacataggaagcaaagggatggtccagcgtctggatttagagatgcatgccaataaattattcagatatcttcattgatatgctcaaaaacacgtatttctgttgctcaggaatcagctggtggtatacacygtctctctctcccaggtgggagggtggagtgatggaaagaacacaggagttgggctgcccaggttcaagacctgatcctgtttcttcttagctgggtaactcttggcaagtcacattttgtcttagaacctcttagtaccttcatctgtaaaaagaatagtcgtgtgtatctcagagggtcattgtgaagaccagctgagatagcgtcatggctaaggagagtgctttgtagtcatgamggtatcattagtaatatggtatcaactattcttcattgctactyattagattctaggcactattctaakatttcacatcaggacttttcaacagcagcactatgacattttttctagataattctttgcggttggagggggctacaggatataggatgtttaggagcatccctcacttcaacccactggaggccagtagggtcccttcctgccccaatcgcttgtaccaaccaggatgtcaaccagatattgccaaagctcccctgtgggtggggttggggacagaattgcccctgatgagaggcgctgcctcacgtgagctctgtcatttaatcttcacaattctccgaggtgggtcctattactagtcctggtttacagatgaggaaactgaggcacagggaggtaaatatttgccccgataatgctgcactaaaaatgcttctgaaaaagggaagctcgtaaacaattgtcatcgagggtctggaagagagcgctgatgtaattaaggagggtgtctcaggctgagtatgaggaaaccctaytgctaaccctctgttgttacctcccatccctcggtcctctcgtctgtgctgtgggagtggggagcggcaggtctttcatgctccttctgctagtggaattcctgctttctagcatcccttcatttcatcactgggtgcttgtttgctcaggattatgcctcatcttcgtaagtcagacatgatcctggcgcttcagacactcagctttgcaactccctcaaaatgggagccacaggcatgtsgggggttgagctttatcctgcccagcccctcgctcagtgggggtgaacagagtgagaggcaggacttgaaagtatttgcccagaatcatacagcaagatagcatcatgtgcaagaggcagccatgtgtactccgagtccacactgccattcttgttggcctttgcaggccggcctcctgaaaaacttgtctctgctcacttcttcagtctcttctccttctgtcttcccttcaacctactctaatcagaagatagagacagaagtaagcagtgaactaggcaggaccaaaccaaaccaagagttgtgtgttgaccagccaatgaggaagttatgtgtgggagagaacatggtaaactatgtcttcttctcccccatgtctatgtctgtgtgtgtgcgtgcatgcgtgtgtgtgtgtgtgtgtgtggtggggggaggctggtattttatttattggacaaatatttattgtctagcactatgtgccaaataccaacttaagacatctataagaatttcaatttctctgagacccaggctaagattttccattaaattcacatgagtctattacatctctttctttcatttccacctgggtagtcaggaaaacacattagacatatttttaaaaattaaagttaacacagagtgttacaaactttgagagaagcaataattttgagttgcactagtaatcacagcaacaaccccaaataccacatttattgtctcttacaaagcatcataagttacattaatcactggttttaactacattctgttacagtttggactctagtaactaggcaaatacaaaccaacaaaacagcatataaaaccacatggaacaaaaagcacactactctccaatatgcattttctggagccaatctgatatttaactgggataagacattctaaatagcaactgaaatattgatataccagaacatcatgaaataaatatttttcccaactctgaagacattcctttcctcatgcaaaatttaccaaaaagaaaaaaaaaaaggaaaaaacaaaaaataaacaaaaaaccaggctgggcatggtggctcacacctgtaatcccagcttgggaggccgaggtgggtggatcacccgaggtcaggagtttgagaccagcctggccaacatggtgaaaccttatttctactaaaaatacaaaaatttgctggatgtggtggtgcatgcctgtaatcccagctacttgggtggctgaggcaggagaatcgcttgaacccaggaggcggaggttgcactgagccgagattgcaccattgcactccagcctgggtgacaagaccaaaactacgtctcaaaaaaaaaaaaaaaaaaaaaaaaaaagaaaaccctacaaaaccaacccaagttcatagtaaccagaattttcaaatatttctctgtgatcagcacctaaaaatgtattttaaaatgcttattttaatggccaggcacagtggctcaggcctgtaattctagctgggaggcagaggcgggtggatcacctgaggtcaagagttcaagaccagcctggccaacatagtgaaatcccatttctagtaaaaatacaaaaattaggcatcgtagtgtggacctgtagtttcagctacttgggaggctgaggcaggagaatcgcttgaatctgggaggcagaggttggagttagccaagatggcaccattgcactccagcctgggtgacagagcgagactccgtctcaaagaaaaagatatgctcattttgatttggaataaagctgcctggccaaaagatggcttgtggctagaagaggaagracaaataagaaaacataaatggttcaaatagcactctatgtacaaaaacatgaaaaggtgaaaatttcttaatttcaactttttgttagaaattagtacgtcacatatagtcctccagggagcgctctgaggctgttactagtcctttagttaataaagcgagaaggccctgtaacttagcctataggattttagcgctgacgcctccgaacccacccaggctttcgcctcggaaaggcacggaagaggccccatgttaatacccgcagtctaggacacggagtcatcctcagggccctgtcacccgtgagtgagattacagtcacaaacacaggcttcacagctcgcagacgcacggccaccctcatctccagcgcccttcccttccagagcgcgtgagcctgaatgcagagtccgcttcggatccggtgcgagcacagccctgccaacaaggaggccccaatggtgcccaggaagggaggggctgagggcggggccgaacgtacgaccaggggtgtttacgctgcagtctgcgccagagccgcagcggtacatggaagacctgggcgggcaggcgtccttactacgcggatcatgttgcggctgaagtcgcgaaccgagacgtagctgggtgtcccgaccctgcatacagcagtagaagacctgggtgaccgtcagtaccctgtgaattgaggcactcctgaagccatgcgctgagacctggctgggtgtcgctaccctgctgacggctgcggaggaccttggtgggcatcagtaccctgcggattgtagggatgctgaagctgcgcactgagacctagctgcgtatctcccctgcggaaggctgcggaggacttgggtgggcgtcaataccctgaggattgtggcactctttccgcagttccctgctctaggctgcggaggacccgggtgggcgtcaataccctgaagattgcggcactccttccgcagtcccttgctcttggctgcggaggacccgggtgggcgtcaataccctgaagattgcggcactcgttccgcagtcccttgctctaggctgcggaggacccgggtgggcgtcaatactctgcggatcgcggggatgctgaagctgcgcgctgagacctagctgggtatctcccctgcggaaggctgcggaggacctgggtgagcgtcagtaccctgaggmttgtggcactcctgcagctgcgcagagacctagctgggtgtcctcccctggagaaggctgcggaggaccagcgtgggcatcagtaccctgcgcgtcacggggatgctgaagccgcgcactgagacctagctgggtgttcctaccctgtggaaggctgcagagacccgggcgggtgtcagtaccctgtggattgcggcactcctgcagctgtgcagagacctagctgggtgtctcccttgcagaaggctgtgggggacccgggcgggggtcagtaccctgtagactgcggcactcctgcagctgcgcactgagacctagctgagtgtcttccctgcggacggctgcggaggatctgggcgaacgtcattactttgtggatcccgggatactgaagcagctgagacctagctgtgcrtcgtcccctgtggaaggctgtggagaacccgggtgggcttcagtaccctgaggattgcggcactcctgcagctgctcgctgagacctgtctcccctgcggaaggctgcggagaactctggagggcgtcagtagcctgcggattgcggcactactgcagttgcgcagagacctcgctgggtgtctcccttgcagaacgctgcggaagattcaggagagcgtcagtaccctgcggactgcggcactcctgcagctgcgcagagacctagctgggtgtctcccctgcggaaggctgcgcaggatcacggagggcgtcagtaccctgcggactgcggcactcctgcagctgcgcactgagacctagctgagtgtcttaccctgcggtggcgacggagaaccccggtgggcgtgtttaccctgtgaatggcctagcgctgctaaagccccgcactgagacgtagctgggtgtcctcccctgtgcacggctgtggaggatctgggcggacgttgttactttgtggatcgcgggaatgctgtagctgcgcactgagacctacctgggtgtcctcccctgtgcacggctgcggaggatctgggcgggcgtcattactttgtggatcgcgggattgctgcagctgcgcacttacatctagctggtgtcttcccctgcggacagctgcggaggacctgggtgggcgtcattactttgtgcatagcaggaatgccgcagctgcgcactgagacctagctggtgtcgtcctctgcggacggctgcagaggatgagaggagggaggaggcgtcgttactttgtgcatcgcggggatgctgaagccatgcactgagacctaactgggtgtccccacccagtggacggctgcggagaacccgggcgggcgtcattatactgcgggggcgggcgtcattatactgtggaaggtggtgctgcgggaactgtacagagacctagccgggtgttcctgccctgcggatggcagcggagaaccctggggggcgtttttagcctgcggatcgcctggtgctgctgaagccgcgcttgaagacctagctgagtgtcctcccctgcggaagcctgcggaggacctgggcggactctttaccctgtggattgcgccgctgctgaagccgcgcacggagacctagctgggtgtcttcccctgtggtaggctgcggaggatctgggtggctctggagatcgcaggaatgctgaagcctcgcgctgagatctaggctgagtgttctccgctgtggatggctgcggatgacccgggcgagctctttaccccgctgatctcagcgctgctgaatcccctgcactgagacctagctgagcgttccctaccctgcagatagctgtggaggaccccggcaggcgtccttaccctgcggattgcctggtgctgctgaagccggcactgagagctacctgggtgacactaccctgcggttggctgcggaggacctggtgagcgtctttactgtgcggactgcggcaagggtgcgactgcgtatgttggtgggcatccttatccttcagacggcggcaattctgcagctgctcattgaggacatgagctggcayctttcccggtaggactgcggcacgtctgtagccacgcactaaggacctgggtaggcgtcatgaccctgggagcagcggcacagctgcgactgcgtatggaggacccaggcaggctcctcactctgccgactgcagcgcgcctgtggttgtgcaccaaggacccacccagacaggcgttcttaccctgtggacagcggcacagctggggctgtgcaccccaagatccagctgggcattcttatcctgccgactgtggcacgtctgtggccaggagtttttatggtgtggacagcagcacagctgcggctgcacactacggacccagacgggcgttcttgccttgtagactgtggcagggcggtggcggggcacccacgatgcaggcgagtgtattaccctgcgactggcaacacaggctgcgcagccaggactcaggcgggagtccttactctgggggagtccttaccctacggactgtggcacaactgtggctggcacaagaacccaggtgggcgtccttaccctgcagacagtggcagggctgcgcatggcggactcgggtgagccgtctcatcctgtggaccgtgttactgttgcggctgtgcactcaggacctggtggggatggggtgtgtgtgttcctcttctgctgactgtgactccgtgccagctgcacggaggaccagggcaggtgtctttgctttgtcaacgacagcactgctgcagcagtgcacgagaaccagacctggagccgggtagaggaggtccctccccttctgactgcaacacagctccacctgcaacctgagacctgggtgagcatctttgccctgccccgtgccattgttctggctatacaccagcgacctggacaggttttcacatctctatgctggatgggctggcccagccggttgtgcactgtgaggtgctgcaggaggagctgcgaggacacattcttcttgacttctcagcataggaatgtctcacgtccagtccacgtccctgtcctagtcctcctctctgctccttccacacttcctcacggtggtctcctgcacgctcgtggctgtcagtatcagacgagggcagcttctgcattttctcaattccaaccactcctctccacttacctacccagtatctctactgggtgtcttccagtcatcctgcactcaacgcgactgacaatttacttccaaccggctttacaatttccctgactttgttgatggcaactttttccttccagttgcttaagccagatacgttggagtcattctttaccattctgttcaacttcatacctattcctcaagaattctggtttctctatctctaaaatgtatttggaagcagctacttcttaccttcttttcacggattcaggtcaccattcacactcacttggattattgcaataatttcctaactgggttccatgtttccagcttttctgtctgcagtctgttttgttttcaacatgtggccagagggatcctgttaacatctaagtgaaatatatcatttctctgcagtggctccctagctgctcagagtaaaatctaatgtttttacaatggcctgaaaggctctccataaccttatcccctcccacttacctccctgtctcctctcctccctccgacactcagcccctgtgtattttagctattgaaagaatatgtgggcacactgctaatttattgtctttgtggaggcttggtttgtgcattccttatttcaaacacttatgggtggactctggtaatgrgcagtcatatttatgagtccccctccaagtgaggagatgtactaggtggaatgtgcgccctccctcacgtggtatactcttgatacagagccaagcaggtagtaccgttggtcctgctttgtaggtgagggaaagcagacccaaaatgaaggaagttgtccagggttacatgctgggaagtggtggaggtagaattcaaacccggagcgcaggcgttgtctgcacctcggagaggcaccgctcttcctgaaatgctcctccctggttatctatgaggctgaagtcctcacctctttcaggtctttgctgaattagaaccttctccataaggcaaggctgatgctgagcaccccactgaaaattttcctctctcccaagaccctcttctcagtccctctacttggctcatttcaggtgtctagcacgtcaygccctttaatacattttgcaagtatttctccacgagtgtgagaaagtggttttctttggtgggggttgatttttcatggcacataaagggcagcagggtttctttgggtcctgtctggaggcctgaaggtcacgctgggcttctggggagcgggtccccttcctgcagcctccctctccacttgcgtgtttctcactcctctctctccctgggaagtgttgcttgataaagatgcagcttttaattaatgtaactgttcaagattacagccggtcatcagctttctaaccagtgcctcacagctctgctggaagagccttgctccggtgatggttgatttgccattctctgtcccagcccagagaagctcccctcactgtcaacgtgccatctgtcaggtgcatgttataaagctgtcatcatgatcagctcattcacgcaccagctttagctttgaggaactgccggccatggcgttgaagacctgctgaagcctccagccagacatctgatgttcaggtctcagggggtccttgctgcttgtgtagcctgacaggtgtggccacggcaggcacaccatggtttggagtttggaaagaagagaccctgtgttattgtagagtgaccactggattgggcttctggaaatccaattctaatcagacttgggttatgcatttactatttcaataaaacatttatggatggactctggtaatcaacagccatatttttgagtacccactgcaggtgaggaaataaatgtactaggtgcgatatacatcctcatgtgctgtgctcttgatacaaagccagtcgggtaggactattggtcctgttttgtagatgagggaacttagacccagaaaatgaaggaagctgcccagagttacatgctgggaaatggtggagctgggattcggacccagagtgcaggcttgcctctgttgcggcatrgatgtcttgcttgccagggcaccgtgcccagtgctaggtcagatatgaatgcttacaggacgaggccctcttcttgaggrcttccctctccttccctcccctctactctgctgcctctccgagtagctgtcaggtcactggtaggtaccagttgtgttgggttacatggtggatacacgatggagtgctgtggctaacagggtggccaaaggcaagacgtttcccctttctgacctttcctttggcagcctctgggtggtggtgggcaggaggtgtgagggagacattgagtttgaggtatggaatgaccgtgcgtggctctcggagccagcccgatctgcgcctgcctacgctgccacacccacaggctgtctacatgttactggaaacccaagcatgagtttcttctgcaaaatggaagatgaccacccttttgtactcctgggatgaggcatactgtgggtgcacctccctgcaggcagctgtttctcagtgagcggtgcctgttgctatttggaagtgaccaccatgtctcctccagccaaagaatttggcaattctaagttcagagtggtgggtgttggtgagagagtcagtccacagggtgaggtgcgatgagtgggcagaatgtgcctggtagtcagagtggagatggtctaggtgtgctctcatgacctcctcagctcttcaagggaagggaagccacctggggagggtcagtatggaacccttcctggactggctggtatgtcctggagggaacttcgttagacttcataatcgatgcagtgtggactccatggggagttttggaaagaaagcaacagtmatgaggatgactaagggtgaaagaaattaggtgtgtggccatggttgggattctaagtctagccctgccagtcattgtcaggtgacctcaagcaggcacctttgtctctggagggctcagctttcatctctgcccaatgaggggtcaggtttggcctctaaattctatccagctttaaacactttagtttactgtctgaagtcttttttttttttttttttaagacgaagtcgtgctctctcgcccaggctggagtgcagtggcacgatcttggctcactgcaccctccgcctcttgagttcaagcaattctactgcctcagcctcctgagtagctgggattacaggcacacgccatcatgcctggctaattttttatatttttggtagagatggggttcaccatgttggccaggctggtcttgaactcttgacttcaagtgatctgcctgccttggcctcccagaatggtgggattacaggtgtgagccaccgcaactggcctgaagccttgtttctaatagttgttggactttaagagcttgttcttcaggtcaccatctgctgggaatcatccactattcccaagactaggcaaggaacaccagtagaactccagcctcacagggaccccgtagcaacttcctgcacaggatgcacctccagggaatgcagagaacatgaatctctgtcaagaagtattggtagctactagaacaaaagccacagggaaaggtccttatcccagattttggaggtcttccaatggcaaggatttttgagtgtttggggatggtttatgtgtaggctgacaagaggaagatgagcagggggacattctggaaagctttttttttttttcattcagatacttgcattaggccatgtgctaagtactttatatatgctgcctaatttgatttcataataatcttgaagtaaatggattatccccctttaacaaattaggaaaataaagcctagagggtgtaagccctcataactcctaagtgactgagcctagaatcaagttctttctgaatctgagttccattctcttaacccttatgctgtatgtttaaaacaaatacaaaaatatggaaaatacagaaatgtcttaaaaagtcaccatcatttccagcacccagagatgatcacgtagtgagatgttttctctccatcatccatttgtcaccagaggtaggcagtagtaacttttggtcttattggggtgggatatggggaaagagaagtgcttgaggggccagtcagtctgtggtttgattcctggactcattagctgtgtgcccttggataagttactcagtctctctgattccttttctcacttggaaaacaaaatgatatatattttagatgctctatgcactgtggccgcgcgtggtggctcatgcctgtagtcccagcactttgggaggctgaggcaggtgaatctcttaaggtcaggagttcaagaccagcctggccaacatggtgaaaaccatctctactaaaactacaaaaattagcctcgcgtggcatcgggcgcctgtaatctcagctatttgggaggctgaggcaggagaattgcttgaacatgggaggtggaggttgcagtgagccgagattgcgcccttgtagtctagcctgggtaacagcaaaactccgtctcaaaaaaaaaaaaaaagaaaaattaaagtaaaaaaaaatgttgaagaatagattaaataatgtcttttattagtagagtacataactaatggtggcttccatcaatattttggtaaaaaaggtttgttttttttttttttttggagtgcttggaaattggctaagtggagctggccggcaggaggagggaggagtttctagactgaggagacagcagaggtctgggctgggggtggtcagcgttctgcggctgaatcgaagggtcgctgtggggccggcgggagatgggtctgcagaggtggaatgggcgccactgtagaaggtcttgaaagcacgctggggttggcctctgtccccaggcagtagggagtcaccgacagttgagaggagactgctgggtagagcagtcctgggttgaggacagtttttaattctctgttatttttgtaacttcatcgcagcaggcgggacagcagatcagaaccctttgaagccaacttcagaggcccctcttgcccctgccgcagctgacttcctgctgtctttcatctctgctgttatctagatcactgcagttaattatttctccaaatattagctccatccttgactttataatgaggttttccctcatcttccaaagagaacccctggtttccacaggaaatacccttggtagtaacattgcggtgcctaggaagtagagacattttcaaagtgtccttccttgaagcaagctcagctggaaacttgggaggagttcttgggactctgaaagccctggctgccctttcccagagcatgaaacggagacccctcctattaactcagcctcgcccatccatcttcctgccagtctttcttgcacatttattcagcatttagtgtgagccaggtctggtattaggccctagggttatgaagcctgctgaggccatcatggtatgttggacccttgacaggaaggcagatatctcagggggtgcaggatgagggggcaggagacggagagcctgcagcgacatgcatggggccaggctgccacctccgagtcgtggggcttcagatgagctattgcgtctcactgtgcctctgctttcattaagaagggatgtgatctcttacccagggttttgccttttatgacttgttcttatataattatggtttgttgtctctctctctgcagtcttctgtcagtccttgaggctgatcctcagccttttggactgcgacttttaatttttgtagcactgggagcgctcgagtctctgggagcagggtcacaccagtccggcttctggagctamgacgtatcacccagaagccagcccattaatatggcctagaaatggtctgtccatcacrtcagcctgttggcctccgctgtcaatgaacagctgcatgggaagccaggctgcaaggcaaggctgctctatgagctcaagatcggagccaggcattaatgagatgcccagctctttaccctccttatcctgggatgggctcatgtactttgttctgaaagcagggrtgggtacacttggtgggggatggcgattttcagggttagccatgaagtgtgctaagggcctggcccggacctctacgcagctggcgtggccaggaaatctggaattatggattagctccaaccccctggtctcccgggtgacctggaaatgagtcacctggttcttggtaatacgccagtggagctaagataataggttattttttaagagtataagctgtttaatgtcaggtgaagaaatgaaacttgccttccacttagggttcactctgaacctggggcatcgtaagagctgagttctctcagccctcggtctgagcaggtgtggcgtgcggtaggagggcttctgtgggagctgctcatggggcgggaggcagtgtctggtgccaggtgaacagtgtgtttccgtgtgtatatattggtgtgaatatttccatattatgggcagaacctgaattcatacagacacactcaaatgacttcaaaccgggtcaacctacatatgttataatagccagaggagaccaacatagtcacagttgtatttgaatttgcatagacattgcctgcccttatttttgttgttgttgtgttgttgttgtttttgagacagagtctcgctctgtcgccaggctggagtgcggtggtgtgaactcggctcactgcatcctccacctcccgtgttcaagtgattttcctgcctcagcctcccgagcagctgggactacaggcgtgcaccgccacacccagctactttttttatatttttagtagagacagggttttaccgtgttggccaggatggtcttgatctcctcacctcgtgatatgcccgcctcggcctcccaaagtgttgggattacaggtgtgagccaccacacctagctgcctgcccttatgtttttaagcaaacactcagaaggtctaccagcctactcatctatcaagtgcgggacctctcctgtgtgccagaccctctgcttggctctgggaatctgtgataaagaaggcgaggttctcatctttatggagctcagtgtctcttggggagacaggcaggaaggcagcttaggcagctccatggccctctgcctgctattccaaaatccgaaaagctccccaaagaaaggcttttcttttcatgaagatggtatccaagcccattagtggtgaaacctggcataaatttgtatggggccatttaaagtcttcccttatttcacgtagtaggactatttattgatttgactgcagacttaatgcatctggttacagggggctgcctggtccatggtgtatataccctatggtctttctaaaacccgagcaagtcttagttctgaaaaacacctggcctcaagggcttcagatgagtgtatttctgacctctgaaagatagagacattygtgcggatagaagaggatgaggtgctgcctctggggaacactcggrggggaagaggcttttgaagcgggctgcccagtgggagagaagaaaaaggccatcagtgcattgaggggcttcgaggagaaacttgtacagcccacagtgggagcttggtttgctaaatcatgaggtggagctattgtttttatttctgtgtttgttgtttaagtgcagtttgcttaaatatgattttcatttttataaatacaagcacagcagaagggtctagagaaaaaggcttcccaaaccttacyacccagaaatcgacgttattaatgttagagaaaccttcaaacagacccgtcctctgcatttacgtgtgctgagaaagactggcaggaaggagaagttatttcccctaaaagtggatcgtactctacttgctcttttaaataaaactattaatttaattttacgttagcatatcagagaaaaaaataartcgaagtgaagtttatggaattgctgagcttctgatatgtttattcatgacgagagatatgattccctatcaggtctctttaagatgaagaaaaaagattgtgaaaaacctgaggaagtagcgtagttgtattgttcaactgtatatgtcacattttcaaattactgatgagtttcttgttaggaaaaataagggaatttatgcacttagactttttaccatctcccaccccaccttcaagtactggccatttcttctttgttaagggttatagcatttatattcagctctcaagtcataatttcaaaaggtcccagtcctcgttgtgtgtttaagcggagatgaggcttgccacttctgtgctacaacttttccattcccaagtttgttcttgtttatctctaggttggtggactcttatcactaagatggttttgaggatggatacctcttaggtgatagattttcacatttcttgcataactatcagttaacaaatactgagcacctactatctgtcaaatgggttttgggacactggaaatacaattgtgaacaagacatttaaagtcctgccatcacggagcttatattctaatgaggagagggtaaagtatgaatgtgaacaaataaatcaaatagcttctgagagtgccagttccaggaagaaatatgagtatatggtccagaaggactagggaggcttgtatagccagagtgaccaaggagcatctcttgaggaggtagcatttgtcctgaggtctgaaccatgagaaagagatagccatctaaagagctasgggctctggtaagccacatcttccaagcagaaatcacagctggtgcagaggcccagagatggtaccacgtggtaatggaggagctgggagctgaagcctgctctccaggaccttgtcagtgatggtgggtttttctggggctggcggcgacaagctgcaggagagagccagggaatggtgcggttgctcgtcatgcatgagaatggtcactgtgactgctggttggagatggattgcagggtggagagggaaacgtggacgagtagaggcaggggagacgaggtggggagccagtggcattgtccagacaagcgatgacagtggcttggatgagggcggcagcagaggaggttggcgacagtggtcagaccttagatgcactgaagaataagcaagggtgtcttttaaggttttggcctgagcagctggacggtggttgttttatttactgagatggaggaagctcggtggggattagaatgtggggaaaacacaaccatattcttcaggcgagtcatgtgtgagcaccgttcggctcttcagcggggctgtgcgggagcctgttggtgttccatctgtgctccagggagaggtctgggctggagggagaagtgtgagagtcagcagcttagaggcagcgtttaaaatcctgggcctggatgacattcctgagggggttgcagagatagagtgctgtgctttcgaggcaccccgacatctgcagggtgatggggccggggggagggcacgggagacagaggaggaagagccagggactgggaagaaaagcaggcagctcaaaagctggaaacatggggcgtggcttaggagcaaatgacagctgctgagaacgtcaggaagacaaggccaggatgttgaccactggctttgagattggaaagagtcatttcagaggagtaggaggatggcaggctgacggtggcaagaagtagagccagcccgagcaggcagtgcttgcaggagctctgctgtagagaacagggaaacaggatggtggctggagggaggtgtgggatgaagagagggattttttttttctttttttgagacagtctcactctgttgcccaggctagagtacagtggcgtgatcttggctcactgcaactgctgccacctgggttcaagcaattctccttcagcctcccgagtagttgggattacaggcgcctgccactgcacccggctaatttttgtatttttaaaaaagtagagatggggtttctccatcttggtcaggctggtcttgaactcctgaccttgtgatccacccaggatcccaagcctcggccgcccaaagtgctgggattacaggcatgagccaccacgcctggccgagagagggatgttttgaaggtggtgttggcagtgtgtgattgtgtgcactgacaaggattgaacagtggaagagacgggtggagcaggacgggatggggtgcctgggaccaatcccccagaggcagcaggagctgggcaccagggcacaggtggagctgtggcccctgagagccatggggaggctgctgccctcatcacagaggaaaggggctatgtggggctgcagtgcaaaattgttggtggagagacgtgtcatttcaacygactgcctcacctgctccccttccatttctaccccgcttcttctgtctcttcttgcctctccctgctcctttcatcgtcttcccctgtccttcttcctctcccaccatctcctctctcccctccttcttcatcctccatactctgggatcctcttgtactttctttgtggtagcacatttcaaaacctgtgtctttcacccacaccatacccgctctccagcacacgatccaagccctggttaggctttgtttctggtttagtcttyaggaggatgggaaggatctggtaacctgctaggttgccttctgcttcaggtggggaaagtcatagttagaaaatggagaagtcttcttagagttgtgtgtgcaagtctgaacggcttcatttttatttccttctgccagcctacccttagaaaaaaccacagtgattcctaagggggtgtggggtggggggaagctataggcttaggggagagttctgccagcactttgaagaagaaatgtttatttttaacaatgaatcagagaaatgagaggcaatgcgttgacagagataggctgtggctccccatgtggaacgcgccagatcgggacacgattacccacagcagaggctgtcatctgcttttgtaggggcagggtggcgtggacctcagcaggctgctgccgtccatgacttgcccctttcttctctaagtgagtaggcagagcagaagggggatgctcactctgaaatagcagaattggtcacctggtgggattgaaagtcctgggctccctccagcacgtcggcttcagtgaacccagtcctcagagcttaggccgggctgcctgacggggcttccctggcatttccattcgagagaggttttggtggttctcatttcacaacagaaagagcttctgcatggaaaagaaaggatggtttatatttaaagagagagattttatcaggatggtaaagatacaagaggttgaaatttctgtttttcagtctagaccagtggtttccaagcctttttttttttttttaaacagtaagattctttctgcaaacatacttatgcagcaggaacccaaagtgtaaaataagggcaagtggtgtagtcctgctggacgtgggcgtgtgggctcgtggagccttcatcacatagtccacgtcactcctgtaactacagcaggagagactgtggagcgtcggggaactctctttttcaaagagtcatggggcatgaggtttgcaaaaggtgtttgcagtgaaacatggagctctgcagagtgtgctctccctgcacccccatctccactctccatgaatctgtacytggattggctatagatcacacagatgtaaagctttcagagtcgagcgttgcgagcataggcctcrgagtccagcctaacgctcatcccaggcctctcctcttgggcaagttaccataccccactggatatcagtttcctgtctgtaacaggagcctaatgatacacttactccaaggatagaagataccaggcaagagcttagccctgtggctggcacttactcatgcttggtaaacgtctccaagggaggaaaaagcttatcctaccctttgaggtttcaggccccagagccagggctttctgacagatgcatcacctggctgaggggccaaggaccatrccagatctttcaggatgctgctcaccactgggagccttggacagtcctgggcctgcctgtcagtcagcagccttgtcctcggcggttcttgggcagaagaactcagaaggcgacattagcactggggaagtgatacattctgatttccatgctggccttttagaaaggtaggcttgggtcagatcatgaaggcccttgagtgtcatgtggtgagcctggatatcatcctataggctactattgaaggcttttaaccagagaagggacacgctcagcctgtttaccatggatgaggcaattatatgtggattaaaacagctgggttcccatctgaggcagaaaggaagtgaaagtgaggagactaataatatttttattaccctatctatttaggatttttaagtggacagttttagatttatagagatttattttcattatagcagtataacatgtttactatagaagatgctaaaattgtaagaatgttggaggaaaaaaattaaccatggttccactgcccagcctcaatcattgtatgttgttattcccttttctatgcataattataataataatagctaccattttctgagtgcctactccatgatacatactattctaagctttttattaaaacagtcacttggatgatggtgcctgtgaacagccactgcactctagtccgagcaacacagcaagatcctgaatcttaaacaaacaaacaaaaacccaagcctgggccaggtgcggcgctcatgcctgtaatcccagcactttgggaggctgagacgggcggatcacgaggtcaggagttcaaaagcagcctggtcaacatggtgaaaccccatctctactaaaaatacaaaaattagctggatgtggtggcccgtgcctgtaatcctagctacttgggaggctgaggtgggagaatcacttgaacctaggaggcaaacgttgcagtgtgctgagatcacgccactgcactccagcctgggtgacagagcgagactccatctcaaaacaaaaacaaaaacaaaaacaaaacaacaaaaaaacaccaaacccttctgtgggtattcttttctccagtttacacaaatagaaatggaagggcagcgaggttaggtggtttggccaagacctcccagcttgtgaacggtggtgctgagatttccgtcctcacctttctctctgtggttctcgctcttccctgggtactgcgttgcgtgtgcgtttctgcgctctaccttattcactcagcgctaatacagaagcattttcccattccactcartgttcgtcagtgtaattgtaaagactgtcagcgatgttatcagaatattctgaatatttttcccaatgttagaccttgagatactgccccatttatttgtaattttattaaacactgtttgatatctccgtggaaaggttttcctggtcatattattaggatagattctctgaagcagaattactgagtccaaagatgtgaattttttttttgagatggagtctcattctgtcacccaggctggagtrcagtggcacgatctcagctcactgcaacctccgccttccaggttcaagcgattctcctgcttcagcctcccgagcagctgggactacaggcacatgccaccatgcccagctgatttttttatttttagtagagagggggttttaccatrttggccaggatggtttcgatctcttgaccttgtgatccacctgcctcggccacccaaagtgctgggattacaggcgtgagccaccgcgcctggccaatgtgaacatttttaagtcctttgttacctgctgtcaaattgcttcccagaaaagcagtcccaagtcaacgtgaccagctgagtttgaggatgccccttgtctgaaatacatagaattgtgacctccagccacacaatcttgaactaaatcagaccattttgatgtattttgtttaacaataggagaaaagaacgtgtttaacaatcttttgcaaaagctgtatttctagcagaaaaattaatgtgaacatcaggctggaaaaatatgaagttaataacagtttgtcaaaggctaggctattcaaagcagtattttcaaattcagtcrtttatattcctttactcctttaccccttttcttttgtgtatctgtcaccacctaatgttaattaggttgttaaaatgcattaacatatcaagacatggtggcactttcgcctctcacctgtctttattatttgggaaatgcagatgccctttctgctgatgcttctggggcattatttctcactggggcaagctgggatggagttatatttgtgtcgaggaaaaaaaatgattccacactttattcagcacatttttcatccttagaaaacacattgctgtctaatgttatatttcaggttcttccttcctttaaattcttagggaaaaaaaaaaatcactgctgggcccaggtcagaaaaacatgtagcttttatgtggctgttgggtctgataacagaaacatgtggctttcatatgggctggagagaaactcacatttcagataaggaagaaatgggtcaaaacattttaaagctgctgctttccctgacaacatcctttgcttgttaagcacgcttcaatttgatttggttcccaggcttgctttgaagacatgctgtgtgctagagaaggctgggcctgaggagttggaggtgagtaagagtgtgcgtggtcccctgggagaggcagagatggtaccaacatctagaaactgcagtgagtgctagttaagtcatattcacggagttcctcctgtaggccgggcctcgggcgcaatgctgaggacagagatatggactgaggggcacatggactggtgggtggaaggcagccttgtcttgagagaatagcagattgaaacatttgggtgaccatctttttctggtccccgccccaaaagaacgtgcgacttgacatggttttccctcatttgtaagtgtttttatgcgaaatgccttacacaggaatcaaatgtgcatttctaaatgtactgattggccgggcgcagtgctcacgcctgtcatcccagcactttgggaggctgaggtgggcggatcacctgaggtcaggagtttgagaccaccctggtcaatatggtgaaaccccatctctactaaaaatacaraaattagctgggtgtggtggtgggtacctgtaattccagctacttaggaggctgaggtacgagaattgcttgaacctgggaggcggaggtcgtagtgagctgagactgtgccactgcactccagcctgggcaacagagtgagactctgtctcaaaaaaaaaaaaaaaaaagcattcattttattcttcaccttgactatgtggagcaaaatactgagaataaagagaagacattggagccatcttctgtggagagacgccagagctgggattccaggctgatgggtgctgaacagcctgagatgtggtagtggactgtgaggagcagaggtccaggcagagtgtgctgctgaggaaggagggcaggcttctcagctgcagacgcactggggatagatggcataggatggttaatcttggccttgcttctctgagaaaactttggtcacacctccagagccagggtgggtgcctccctggaggagggggctttcctggttggtggcacagcaggagtccaggctttgtaccgtggacaccatgggctatggcaacaccttcctcaccatccttccatgaggacctcgggagagagtggacatgaaaccctttgtgctctgaagcattcaacagaagctttctggttctgtgcctatttctttggcacttgagcgtgtttgcaggttcattacacacatgatgaaagctctggcccatagcactagaattcatgtttttagggtttgtgagtgtgacaggtgctatggtttggatgtggtttgtttccaccaaaactcttgcttgaagtttaactgccagcatggcagtgttgggaggtggggcctagcgggaggtgattgggtcatgggggctgaaccctccggaatagattggtgctgtctcctgagagagttctcgctgtcatggggctggatcagtcaacatgagagtgggttgttataaagcaagactcactccttatgcacgtctctttgcatatgccctctggtgtttcttcttgtctgctacatcttgacgcagcccatggccctcaccagaagccgaacagatgccagtgccatgcttgtggacattccagctaccagaatcatagcaaaataaacctcttttctttacgcattacccacactcaggtattctgttgcagcaacaccaaatggactaagacaagaatgagtgtggcgtggtgttttgtactgttagctgttgtgcatcacaagtgaaagaaagtttactcatgtggttctcaatttccacagtgctgagtgttaagttacagggagaactattacagacccacacatgatatggaatgttcatcactgaccatgtatgtgccttctatgaccttgtatgtacttgattcccctggatcattcaacatctcttcttgggaatcttggccttttgatgaaacagggttaattccaaggtgtcatttcttaaagcaaactttgagctgaaataacatctgaccaggggaaagtgatgccatcgccttcttcttcccctcctcctcctcctccttcttcttcatttttattattatcattattattattattttgagacagaattgtgctctctcgcccaggctggagtgcagtggtgcaatcttggctcactgcaacctccacttcccaggttcargcgattctcctggctcagcctcctgagtagctgggattacaggcatctaccaccacgcttggccaatttttgtatttttagtagaaatggagttttgccacgttgggcaggctggtctcaaactcctgacctcaagcaatccgccctcttggcctcccaaagtgctgggattgcaggcatgagccaccatgcctggcctgcctttttattattatgcacaattagacgtttttgttgccagtgtgccactgtagttataaagtggggagaacaatagtccaggtccttgggtgtagggagagcacttgtaataaatatgaacaaacttcactgcccttctgcaggtgcctcttttctgctggagccgctgcttgtggcctctctggtcctggaggcactttccaggggagtgttatcttacttctctggggcctcatcaagttaaggaacttgccaaattcaaacacctgttaaaggagcagaaccaagagtgaactaagtgtcacccattcaaagtctgaactcttctcagattctttgttgcttctggccatctgtattagtctgttctcactctgctaataaagacatacccgagactgagtaatttataaaggaaagaggtttaatggactcacagttccacattgctggggagacttcataatcatggcagaaggtgaatgaggaacaaagtcacgtcttacatggcagcaggcaagagagcatgtgcaggggaacagtcctttataaaaccatcagatctcgtgagacttattcaccatcacgaaaacagcattggaaatacccacccctatgattcagttacctcccactgggtccctcccatgacataattcccatgggaattatgggagctacaattcaagataagatttgggtggggacacagccaaaccatatcactggaaagctgtacagttgctggagagatgataggatccatccagctttaggaatgtcagagttgaaaagccttgagccattgctgggtaggccccctgttgactggtggtgactgggggcagggaggggaggtggctgacctggtgttagagtgcagacctctgagtttgggactgtggctcctgtgtacctgcatgtgacatcctctcagttcctgcatgggctcctcagaagatgacacattctcaaccctgagctgcctcttcttaaagtgggtgcagttcctctatcagacccctctttgtccttgtgattcatgtttttgcccatactgccttcagttcctagaataatttcctttccccacctaggaagctcttttccatccattcatccctgccccatcccacctctggccttctgtcccatatctggaagccctcccccgtgttcagccatgtacctcactaagcctccatccagtgcagttgccactccaccctccctgcctgaggccaagattttggtgggatcaaagagtgctgaaaagcctgggcttgaacttgagtccagccactcctgcgtgacttaccttctctcagcataacagcagtgtcttcccatggcactgctataaaaccacaagcacttttgcagttttctccttgccttttgttaaaatgaaatgttctctgaaaagttcttccaaaattctatacaactttgtatttttgcaatttgaacgcagagaaaagcatgaagagatggtttggaacaggttctttcttgtctggaagctgattctgggacagtttttctttctttcacagtaatttccagttaaatggagatgaactgcatgctttgaagacagtttgccttgcagtgtttctactagtgttactggtttttcacactttgtatctaattattttatctccatgacaaatgcaggataaagttctccattttctgaggaaagtcatgtttttccataagaaacatcacgattgtccatgctggacttttctatctggggccacgcagccttttccatctcctctcccaggtttctcttgttctggccctgcggtcctgcagctttcctgcctttccgttttctacacaatcattcttccgcctgcattgctttctccccatctcaacatttctggtcccatccctggggcctggcccagctgccgccttgttcaggaagcgactcctgatgtccacagtgggaagggtcctctccctgttctgtgtccttgccttgtccatcacatcacatcgaccagccacttggccttggagtccccccrgcaagcatctgccctgctcaaatgcatgcaagcagaagatagcggaaggcaccttctctgggctgcctcagccctggggctcaggctgggatctctggggtcagctcttagagagtaggcatctggtcacacctgccttggtacctaactctctgagatgacagaaaagaaagctagaaagtcattagattatctttttattttttattcttttccactaagctacatgttccctaagagcaaggattatgttcattcacccatttattcatttactcaaccattatttattatcttctgttgaacaagtgaaccatgatccctgtcctcatgaagctttcagtctaatgggaagatatttgttcaatacacaaacaaatatgtattatatttatattttgtggttatattttcttcctttttttttcttttgagataggatctggctctctcactcgggctggagcacagtggcacaatctaggctcactgtatcctttacctcctgggttcaagcgatcctcctgcctcagcctcccgagtggctgggactacaggtgtgtgctaccatgcgcagctaatatttaaattttttrtagagacagagtcttgctatgttgcccaggctggtcttaaactcctgtgcttaagccatccttctgcctcagcctcccaaagtgctgggattacagatgtgaactattgtacccagctgattttgtggttatgttttctatacattatataaatgttatttacattttatgtttatgtcagatgtaattacatctatgtcaactacaaattttaactggcgcatgatagttgcttgcatggatgaactcatagcagcttggatgtggccttggtgagggctgtgtgacagtaggcgccgatgccaaggccagccttggggtgccacggccgatcttcgtgatcgtattcagacctcacagtgagtggcctaggaatcgggtgttgtcatctctgagtttcagatgggcacccagaggggatgggccccatggcctgagggacacagcgtggaatgcggatggacacacgttggctcgggaggcctggcgctctcctctgcactcttcctttgacctcactttctttgatgtttgatcctagctagatcctggctttttcagaaagaacagtgtctgtggactttttactttgtgaagcaaggatgcacgagttgtaaagcaaggatgcagctctcacggtggtgtcactggagagtgtcaccgaaggcccactgacgagcaagggccacacacacagcagccaggggagggcagctcttttcgaggctctccggggygccattttggcagtgatgtcatcaagtggacatttataggccatgctgtgttccacacatgcaaatcagaaactctcttccttatgtagactcgtcacagtgctgctatgtatatatacagtgcttaagagtggttggacagcttgcgtctctccatctccccacctgtaaaatggggatcgtgatagcacctcctctcaggactggcctgaggtttacaagaatcatgtgcaaagcctgcaggaaagcaagggcttcctgttagctgttattattagcactgctcttctcgttrtcgttgcattagaagtgggctatcataagagatttcactccaatgtttagttgcttcaaatcagtaactgcaaaaggcagctaagcagaagtgagtcaaaatgccccgtgtccagcttcagaaggatattttccttacagctgttgcagctgaaggtgaaaatgtgtacagccctagaaatatcacagacattggctctacatccaatgtgtcggatgcctctacagtgaagggcatccgaacacttggcagcctcttcttttctcctatggaaaagtggttataggaaagaagggggatgatgctgtgccgtgctcactttactgacgtgcatataatayacatgcttaacaaatgttggagctgatgatggtggtggcagtgatgacactggctagctacttatatggcggcagcgaaggcagttccatggkgctgaaaccctcctaatggaggaggaataagtgcctttgcatcccacatggtggcgataagcaggctggaggaggagarggatgtggggactttgtccataatgacagagttgaggtctgacattcgtgctgtctgtgggctgatcttctctgtcttcactccgtgatgaccacacagagctgctactaagttggccccaactagtcaagagttattaaaataatctttgtaatgagtaacaataaaaacatagtttctctgtgaatagttttatgtacattatagcatttaacctccaagacagtctagtgtggtaggtgtcggtaactccattttataagacgcagggcctagaaggcaaagaagggtggtgtttttctggagtcacctgctctggggccgagccctgtctgcagggctctgatggtcaccttcttgatgggcacacattgcctccttttattgcagaggagagtgggtcagaggcaggaggtctaggcttcagatctcttctaacatgaaggctgacattgggcaartgatgtctcttttctgggttccagtcccctcatctaaaaaaattgggtagcaattttcctgaggtgcttacagggatcagcatctgaatgcaggtcataccactggcgatcaacagcaccagaggcccagctacttgctgtggtcccgtagtccctgccctctgaccccttcctgtctgtgcccgacgttctctcttcctgaaggacctccagagctctccactgagcggcccttctttcaagaggcctgcattgcccacaatcagattgtgactccaccgagctgaggtctttcacagcttgatcctgcttgtcttctcctaaggaattggccccctcagggyggggactgtctttcctctgagtttttcaagtgcccagaacaaagtctgtctgacaacgagagcccagtaagtgtttgttaagtgcagcgacatcagccaagaaccccatgtatccttcccaccctgccatcttctgtgcatctccttccttcccctacggagggaccctggtggacgggaagcagatgttgatgaagtggcctcccttttggagatgaggaagagggacggggaaaagctggaaggggatgcacttgccctgaagcccaaagtagtggcttttctgagcatttcttccttagggtgacagtgaagcacggctgtgaccactggagttctgattgctgggtagttcgggggatgctgtgtcccagggcccgcccactccagtgtccctgggctggaggggtgtaggaggaggaggagtcttgtcaggaaagcaaccctgactgcctcctgtcctctggacctctgtgaggtctgcttacctgccctgcactactcattccgtgctgtctgacccacgatgcctttggaattttgtccgtgatcgggagcacttcctgtctgtgacggtaaagacctgcattgggcagtggcaggagggatgaaaggcgacaygggggtccttggctggttctccacgtctcattttcttctcctggacaatggacttgcctcacaggattgctgggaggatttaatgaggtcacaggtgtgaacatgcaaggcagacgtatatcagggatgcaataggtgattaaatttaactcatttactagggaaaattttaaacgtatagaaagtaaacagaagaatgtgaggaaccatccacacatccattaacagcttcagtaatcatcaacgttgagccattcccatctttatcatccctacccaggtcaccatcccatactgagtgacggtgttgagaatgatgatgataatgagcttcagttactttatttcaaggtaaagctacacacatttaaacacacacatcttaactctacagtttggatggatggatacattctattaacccttctccctcgtagaacatttctatctccccagaaagttctcttgtatcccatctaggttaatccccatacgctaactagaggtgtcctcrgttctgatgtttttgcctttgcctagtttagagtgtcacataataggcacctcagcataagtgctcttctgtcctgcttctttgctcagtataatgttcgtgagattatcccagttgttgtatcagtagttcatttctttttattgctcaattagtaatccattgcatggacacactgtaatttgtttattctcctattgatagacatttgttttcagtttttgactattatgmataaagctgttatgaacatttttcaagtaattttgttgacatgatttttctttcttggaaatattgataaattggaaatactaggagttattaaggggtagaattgttaggtcatatactaagcgtgggtttaactataagaaactatcaaaacagttttataaaatcgttgctccattttacattcccccggcagtgtaagagctccggtgctgtgcgccttcaccatggtacagtgggatcacattctaaaactgtagtcattctggtgattatcttttcattgattataatttatggttccctaattctaaggacattgaacacttcttcatgtgattattggccattcatatattttcctttctgaagtgtctgttcaagccttttgttcattttatgggttgtttgtatttttatagactcgtaggagttcttgaatattctggatctaaataatttgtcagatatacagtgaagtgaagatgtatctagtgaagatatatatatacatatgcacatatatttatgtacatatagtgacactatgttatgtatacacacatatagtgaagatatatatatatatgcattgaatatatagatataatacgttctcctagtgtatatctgtggcttgcctcttcaccaccaccgctcctcctcctcctcctcctcctcctccttcccttctcctcctcctccttcctttctcctcctcctcctcctcttcctcctcctcctcctcctccttttttttttgagacggagtctcgctctgtcgcccagactggggtgcagtggcgcagtctcggctcactgcaagctctgcctcccgcgttcaagcgattctcctgcctcagcctcctacaggcacatgccaccacacctggctaattttttgtatttttagtagagacagggtttcaccgtgttagccaggatggtcttgaactcctgacttgtgagctgcccgccttagcctcccaaagtgctaggattacggcatgagccactgtgcccggctgcctcttcatttgttaaaaattcagatctattgaaatataatttacatgcactgaagttcactctcgttggtgtacaattctgtgaggtttgacaaggttatctgtgaaaccacaccaacaaaataaagatacagaacaatttcttcaccttaaaaaaatgtcccctcatactgccttgtaggcaaccctggcccctactccaaactcttgacagctgctgctctgttttatgccttatagttttgttaggtgctttttctgcgtcagttgagatgattgtgtgattttaatcattgattttgtgaatgtggcagagcgcactgattgactccagtgctaactggtccttgttttcccgggatcaaccccgctgggctatggtgttgtcttttccctactgcttgtcatacgcagtgtgtgtgtttcaaaatctcttagctacttttgtcttaacaatttgctcagagcttttgtgcgttttatgagccagagcgtggtatctgcttgtccagagaggcccattgagagaaaggagccactgcttatagaacccctgcattattgcatgtgtcatcaacttaacccccagagaccctgtggggcaggcrttacygtccccatctacacgggcagactgagggttccagaggcaggcaccgggcctctggcaggactgtgcaactccagggaaggcccctttgtccagcacgtcagggcctcccaagacattgtgccttcctccagtatcacagggctgctttctaagggggagactgcacgcttgagcccgtgtttcctcactcttccagggaaagtgcctgttcttttctgccagtctccttgcccacagaagaagcctggttggggcttaaaggacaaagtagatctggtgccttttagggccagggactgagcagcatgaccgctggagtgagagcgagactgtgagtgtcgagggctggtccacagaggttcctggcctccagcagtcccttcttgcagctcagtccatcaggcacaaccacaagctgtaggtaaggcagtgggtttcaatataagccagacatgagtttgaatcagctgttatcacttagccttggcttcagctcaggcaggtttcatgatctgakcctccatttcttcatctggaaatwggagaaaaaataatatttacctgtgaggattaggtgagataatatggggcaccaaagctcaatatgctagaacgatcgcacgcactaacgcttggtggtcctgctcccgttgcttctggccgagtgctgccaaggcctgggccccccgtccctctgcttcacaacagagcctgagctgtaggtaagagacgtggagggcctggcacccagggctgtaggtaagagacgtggaggggctggcacccacarctgcctggcaatgcttgtttgcctgtctccagccctcctggaagtgtttcctgggcctgctgatggctttgatcatgtgtggctctatggagagtctgtgtgtgtggctttaggggacagccctgctggtgtgaaatgctggtgagcagcctgatctttctgagccagtttttggcgtgttttgagaacctgccacactcttctgtcactatggtcaatttcgaaacgaggccctactgttcctcccctcaaggagctccttgtctaattatggagcaagaacagtctggtttttctcatcatttttcctcatggaattactaattaagtgtcgattattgaaagaaaaatcacatagctttgagccatcattatgtaggtaggtatgtatatattatatatatgcgtatgtattatggatatatgcatggatttttttacattaattccagtgctgacaaagtttatggagactgacatatgaatatgtttctgttgccaatgtaagttggtacaatgtcttaagaaggctgcatgttaacacatatcatctgtgctgtgacatttctatatgttgcctctaccttaaaataattcaaaagtagaaaaaaaggtatgcgtgaagatgcccttccaagtgtatttgtattagcaaatacgagaacaacttcagtgcccctcgtgctggtgaattttggttgtcaccttgactggattgaggaatacctggagaactggtaacgcgttgccgctgggtgtgtccctgaggggactggcgtgtgagttgggggactgtgtggtgaagatccaccgtcagtgtgggtggcaccatccattagccgggggcctgggtggaacagaaaggcagaggagaggagaattgtcttcccctcctggagctggaacacttttctcttcctgcacttggacatcagaactttgggctcccgggcctttggactctaggactgacagcagcagcctcgagggttctcggcctgtggctttggaccaagggctacagcactggcctcactggctttgaggctttcggacctgcagctcctctggttctccagcttgcaggcggcttggtgtggtgaacctagggattgagttctcctaatacatcccctctcatgtctcatgtgcacacacactgtgtctgattggtcctctagagaaccctgcctgatacacccatcagcaggaaacatttctggtggcttatggtttatttaagtgatgctgtattgtggggtcatatggggtatattaatgtgatttgcaggccacaaagttgtctaagtttatgcagattatactcatttataagttgcgtgcaagtaaayagggcccagagggaccgccctcagtgaagcaacactgaggccttttcagacctctgtgctgagcacttacgtcttggtgccttacccatgcccaccaaattccacccccgccgtttaaggtggatcacattcttactgtttagaggaatagactgaggccttaagttgctgatttgcccaggtggggtgggcagggaaggttgacagtgggctttgagccaaccttcagatcgtgggccctgaggtttctgcgccactgctacactcagtggtgagagaatagcaacattcaattgaatatgttttcttcttcagcagatactgaattctgctgttatgcttgcattctttaatggttccttgagcacagcggcttcaggaggggatcgggacagctccctttgataagcgtaactgtgctctgagccctgggcatggcctgctcattttgcttgtgctgggaactggactcaggcacagccagttggcttgtgcatttcagaaagtgagtttgtcggcatcatttaaaaatcttttccttcttgtgtttttttatcccctatatattgtggatgcaagggaaattcaaaggtgaattactcaatatagttacacagattaaataatcaaacttgcattgacacagaaaggttcatgcataattcaggtagttaatactcactgatttaatttattaggcaaagctatatcgttgtgccaaatgaagagctgttctgaatgcagattgaacaagcgtccagagtagtgctgtttgtggtaaactaattaggctttgattgtggcctgcaaaatacaaatggatgaattaagctatttcgattgaagaatttcataaggcaggtgatcatccattcttgtttaactagcggcctgatttcatgacaagcgtggctgagtttgaatcattcatttggaagagcaatattaatgatgggaatgtttttgaaagtgaaacttatttaattcataattgtttaaaattcctgagtgaaggtcccctccaaatgtaagagttcatgtcacttgtgcagcctgcccaagcgtctttgccctgatgcgaggtgactgtgacttctctcagttccctgcaagtctaattggtcttctggttgcatttggcatctgtgtcttcaaggctgctcatggccagcagaaaacagagctgcttcccttgcctggaaagccttctgtattctcttcatcccttcagaagctaccatttctttcttaaatgcctcaatgtcacacctccatgaagccttccacttccccaggcagctctgctctattactgggtggcacgcatagcactggggccgtgagggtgaatccgtcataatccttgcttgtaaggagctcagacacaggagactgacaattcccacacgaggtctccacccacccgcatacacatactataggtaagtgcaaagttcagaagcaatacgggcaacaaaaaatggacacataaatccgcttgttttacttgcctaatgagaaaacatgcctgctcagacactgcaggtgtggggctgggtatgggccaggtgcttccactggtgacatgatgcgtgcctcagttcttctttccacagtcctgtagagcactgaagttggcagccaagcttctctggacttctttccttcctttgcaacatctttttctcacaagtcttgccttttctctgcatgagctctgattggtctaggttaataacacatatagagaaagaaaataagactcttgtatttgatactcaccccctttactgtgtttatattgtccctttatttgccctgtgaccttgatcaagtcactctcttctctggattttcatctgcaaaatgaagaaattgaggaagatgcccccaagttcgctttcagttcttttctttgcttagatgcaaccagggaccaagctctgtcctcacgtaagtggacatggacagtagttctcatgggattgagggaaatcagaacaggtggtctattgccaagagcccaatttgatcatttaaaaacttagaaggttggtggggcgtggtggctcaggcctgtaatcccagcactttgggaggccgaggcagacagatcacaaggtcaggagatcgagaccatcctggctaacatggtgaaaccctgtctctagtaaaaatacaaaaaattagctgggtttggtggcacacgcctgtagtcccagctacttgggaagctgaggcgggagaatcacttgaacccgggaggcggaggttgcagtgagccaagactgcgccattgcactccagcctgggagacagagcgagaatctgtctcaaaacaaaacaaaacaaaccttagaagattgaattagaaagaaatgggtctttcataagccatggctttttctctgaatgactgcttacattctgttgaacagatatgtgacaaaaatgtttcaagcagaggaaatacgtttaccctattcaagactcctgtcacttgtccttacagatgttttccctaagcttacagctggaacctggagagggtgcctgtcagtagatggcttggcttcacatgcaggagcctttcttcctctgacagctcccctgcaagtgctgcagggaaaagactgcagcttcccttcatcaggcatgctttgtgccccttggcactgctccctgagatgagggtgcccatcctttggtgccaggtatctttgatctctgtctccttttcagatttctttttaaacacaatagttttccattatatattggacttatataggctttgcaccgagtaggtgttaagtacctccctgctggttgagaattgcatgctgcatgtaattactcactgattaatgtctttacattgacgtatttacaaattgtagtctagagtaaacctaataaaaacttctggtattcattttctcagacagacatttcattttgcctgtattctsaatctcacaggtcttgccccagctcatatcaacttagttcagttcaattcactgcacttcaagagatattcattgtgtggcccgtgggggagcgacattaaacacagcacaatcgccattcttaaggagctcacagccatctgatgaccatcggcatcttcagtgtctcccttcacataggctcaggtctcccggggcttacaaagtgcttctgtgaactctccaccccacttactgctcccatgtctccctcctgttcatcagtggtggatttcatccacaagagtcacatgtcagtcggttgtcacatcttcagactccacttctaattctaattctactgctatttctaccatatctgcagttacttcctctgccaaagtcttgagcccctgaaagtcatccatgaggtctggattcaacttyttccacacaccttttcatgctgctattttgacctcctttcaggaatcatgaatgttcttactgscatctagcatggtgaatcttttacagaaggttttcaatgtactttgcccagatccatcggaggaatcactatctatggcagctgtagccttatggaatgcattttttaaagaatacatgtacatgtaaagatacattggcaaatgtcaatgtttgcaaaattcccaggactctttgatccatgggctgcagattggatactgtgatagcaggcttgaaaacaacattcaccttcttgtacatctccatcagctgtcttacgtgacgtggtgcattgtcaataagcaataatatttgaaaggaatctttttttctaagcagtaggtttcaacagatggcttaaaatattcaggaaaccatgctataaacagatgcgctgtcatccaggctttgttattccacttaaaagcacaggctgagtagatttagcatcattcttaggggtcctcgaattttcagaatgggaaatgagtgttggctttaaattcaagtcaccagctgcattagcccctaacaagacagtcagcctgttctttcaagctttgaagccaggcattgacttctgccctccagctatgaaagtcctagatggcatcttcttctagtagaaggctgttttacctacactgcaaatctgttgtttagtgtagccatcttcctcaatgatctttgctaggtctaatggatgtcttgctccagcctcttcatcagcacttgccacttcacattgcgcttttatgttatggagatgacttctttccttcaacctcatgaaccaacctctgctagcttcagacttttcttttgcagcttcttcatctctctcatgtttcatagaattaaagagagttagggcattgctctggattagattttggcttaagggattattgtggcaaggtaaataaccgtggtaaggagcatcaatacaagttgtattaagcatatggatataatgtcttccttggttataggggatgatatcttactgccaagatcaccaaccttatcctttgggcgaagtctgtgctcattaggaaggggagatgacagttgtgtgaatgtaacaggatcatttcttctcactgtagagaagaggtactgcacttgtagttcccatggacaaacattgtttcaggagacttggatgggtagaggcctttacaatcctgcagtgaatggggggagtcttttgtatactagcagcacatccaggccataatactgtatcctttttctttaatctggtgtccaaaccagtcacagagaaatacctcctagagatcctattgccaggaattagtaatgttgctgagataacactggctaatgtttgtgcaattcccaggacaagaatctgaagttttcttttcttcacagcttcctgccgctgcacttagccctccagcatttaagcctctggaatatgcatgtcaatttctctttgctttgttacctctctaattctgtgaggaccctgtgcgcctgcaggggaaattcacaagtataatatctttcctgccttccaggagctctgggtctggcatgcaacgtgtgctatcaggtagagataaagactgccatcctagcttttggtttcctaagagcctttatatttcatccgttttaaaatgcctccttgtcgctcctgtgcttttctgtttccgcttcctttttacccttagagtggcaacctccagctcatgttgcacaggactctaggtatacatcgatgaatgtcacgttgtaaaaccagaaaaggtaaaagaaagctgaccatttcacataacccattattgtatgaacacaatgctatttttcatattttccaggaaagggtcatgtgggttagtgtataattggcatagaaatttgttattcctgccaagtgtaacagtcgagttgggaaaattaattatgtgactatgtcattgtagacaggtatgctgttctgatgcactgagtcacaaaaccacactagataaatggctacacagagaaaaaggaattcatccttcacttcatggaggaactgccattttaggagggcctgcagcagagagtcgaatttttgctggcaggaaagaggagacacagtgtcaacagagaggcagagcaggggccagcatgtttcgggaggcagggccacccgtgtgccttgcatttaggggtgtgataggaagcgggcaaattgtgaacccgaaagggtgacaagagagcaggcaacatgggccactgaggagacactcggagaaatttgatgcataccccgcccgcaagtcccgctcttaaggaaacacagagcaattcctcaaaagcagaaatatttctrgttagtattagttcagcatcctgccgaaataattcttttatggaaaaaagtatgcactaaatcttatagtgtgactagtactcaggcactgtttttactgattatcaaaatctaagttttctttattgccgttcactgttctgttccccgatccattcaacaaacatttctcctgggcctcttatggtataggcttggataaggcacagtctgatgtgtttagagccctggaatgccacatgctaacagggacatacactaaatcaactaggagctctaagaacaagatggccgtaggattatttctcaaagtgagtaccgtgttacctggctcgtgaaaggtacgtgagaattgactgcgtggtgacgtgaggtgagagcacaggaagcggaaggccacgtgggccaaagaggagtaactgaaaaccaaaatgtgttggtgatatgcttaggctttgtgctcccacccgaatctcactgtaaattataatctccataagccccatgtatcaagggagagaccaggtggaggtcattgaatcacagtggccgcttcccccacaccgttctcatgatagtgggtgggttctcataggatctgatgggtttgtaagtgttcaggtgttcagtagttcctcctgcattcacttctccttcctgccgccttctgaagaaggtcccttgcttcccctttaccttctgccacgattgtaagtttcctgaggcttccccaggcatgctaaactctcaattaaacctctttcctttataaattacccagtcttggaaagttctttctagcagtgtgagaacagactcatacagttggctactgagaagtagtgtgtgatagtcggggtgctgggtggctctggggccaaattggggatggaatgaagaccctccattccttcctcagaagctttctgagtgccaccatgtgccaggtgccactgtgcgtgccggtaatgacgcagtgaataaggttaggtttgtgctccccataggagctcatcttctagtaggagagcagacaagcaagtggacaggaaagcaggaatgtggctggtggcaggtgctgtgaaggctggaaacaggaaagtgatagtgctgagcagggcttacaggaagtgaggagggtctctgagggcgctgtcaaaggtgagccttgaggagtaagagggacccagaggccagtggaagaggcagggagaagcagcagctggagtaaaggccctggggctgcggaggacacagccaggacmtaaggaatgggcgagagaaatagaaggtgaagctggaaaagcaggcaggagccaggttacacacgtcctaccgaaatgtcatgctcagtagcgtgggtttattccgtgtctgagatcatgctgaggtctgatcatgcccagtaggatggaataccgagcatcagagatctcggaggaggggaatgacaggcacagccccttgcagagagcccgctgtgtacagggaaggtggaggcccatcctggtttcaggcaggtccatcccaggccccatcctgtcctgccctgcagacctgtgctccactcaggctcccaggtggtcaggcgggtcctggaaggtgttgcctttttcctcaggtcagaagggtgaactgcagggaggcccctggctgtgcgtgtattgtgtttgagtgtgcgcacacctgcgagggaatggggtgtgactgggctgttagctttgcttgatttgcagttgtaaatgtggagatgcgtgggaggtggccctgtttgtattctcaccctgctccctgtaatgttggagtgggcctggtctccaagcccatggtgggaggactggcctggagaaggtgttccgccagcacatattgacttcaatgctctgttaatgacaggatcagaggtctccaaagcccttcccaacgtgggccctgactgctgctccattctcagcctctcccccttccgtccaggcttctggcctgttcagttttatatttttgttgctttgtgattagagcaagtgcccagtgcttccacttcattcgcctgtctacacctccttttccttcagagcccagctcagacagcctgtcttttggggtagcctcctagactgctggggctggacagggcgcctctcctytgttcaaggctctgtggcacgctgccaagcctgtcagagcggacatggctctgtactcactgtgccgtggcctgtgcttgcttctctgcttcctgcttgactgcgggctccttgaggacagagaaccrgacttgtgtatccatccccagctccgagacagcatctggcacatattaggtattcacgaaatgctcttgattagaagaatcaaaattaaaatatggcctcaagagctgcaagagaggacacaacaggctgccgggcagccttgggaatggcagtcttcccgtgaacaccttgcctctttcatggtgctaagagaatatttataaattaagggcttccaccaactccagtgtgaaaccaaatgttggccttaactgtttctgaaatcttccaatggctccccagtgcctacagatctgtttctcaattctggcttctcattagatttgaatgatctgacgatattaaaaagaatgtgcaggccccatgtcagactgcctgaatcatcatcggaggtggggatagtttacagtctctccagactgtgacagtgtgactgggaaatgctgacctgtaatgttagatccctcattcttaaagccttgttttcacaaattggctgaatattggaatcatttggagagcctaagaattcagcccatctggacatggccttcgccctaagatctctaagagcacactgggtctgccatgatggggcaactggtgccaggcctgccctcctgctgcaaaccactaaaaattatggggggatgaattaaataagggtcgtcagataatagacaaaaatccttccccctaatccttcctccccccagaaataaaccaaaacccacccagcacagcactgtggtctctgagggcagagaagccaattcggtagtgcccgtgggcagggatgggtagggatgggtaggaacaggtagggatgggtagggttgggtagggatgggtagggctgggttgggacggataaggatgggtagggatggggaatggcaaagaatggcagctttgctcagtggcgggggtggagggcagagtgcaggaggccaaggggctgaaatttggggcagaacattagagaaaaaggaactcagcaaagagagagctccagagtcttctgggggtcaccacaaggccattgctgaatcctaagctgaacacatggagagtgaaactcctgcaggcaggcagagaactccaggcaggtgtgcactgaagaatcccagagcctcacagccaggggagggacctcgtgggacacccgaggccttctggatgagagaccacagaaaagccccctacttagcagtggggccggcctggccccagggtgaaggctactctggatgtgccttaagaggactggaaaacaggcatcagaaagaacgagctgctccacaggtaacgcaactgccaatcaaaaggagacctgacactctttaaaggatgacagcgacattcagacatttgtcaactgaaaactcacagtgccctacaaaactagcaggaagataggaaccataactgggaggaaagcctgtcactggaagcagactcagaaatgataaggatgatggtgttagcgtacacagactttgagttgattgttagaattatgcttaagaatttaaaggaaatcataaatataatgaggaaaggagtggaaggaaaaggacaacatcaaacatttagagctgaaaatgcagctcttttatcaagaatacgtgaataaattttgttactcaataacatgaaaacaacacaattagaagtgtgcaaaaatgtgaacaaacacttcataaaggaaagtaaatagatggccaatgagcatgggagaagatgctcaatgtcacagattttcagggaaattcaagtcaaaaccacgattagacactcctacacacacattgcccagaagaccagtggcgtatgataggtggaacgcacctgtactgctggtgacagtgtacaatggtgtggctactttgttgaactattcatcagtttcttttaaagttaaacatatagctcctgtacaatgaagcaaactcacttctaggtacttacccaagggaaatgaaaatgcatgcctgtacaagacttgtactttgatgttcattgcaacgttattcagaatagctccaaactggaaataacccctgcagccaactatatataaatcaatagttgtagtattgtggaatgctactgacaacaaggaacaagctgctgctccacttaagaacgtggatgaatttcaacaaagcatgctgggtgaaagatgccagacacagaaagtacacactgttatgattccatttatatgaattctagatagatagatctagagagaaagcagatctctgttgtcctggaggggtgagagggctttggattggttgtaaaggggcaggaggaaggtttagggggtgatggagtggctttatcttttctctgtgtggattatacaagtatacatttgtcataataygttgaacttgacagttaaatatgtatgttttattgtatggaaatcatacttcattacgatggatttaaaaacagcagcagcaacaacgcagaaccagcctcccaggagtttctagtatgcagcggagtctgagaacccactgccgcaaaggccctcctgactctcccgactctcctgactcggctcccagctctttctccatcatggctgtttacactctggccagagcccatgtggagttgcatgcggctccctgcacaaggcatcctttgtttgttttcttttcagatctgtccatttgcctaaatgtctgtcttccacattctctttcgtccccacaggccttcttggcaaccctggttctcccggctgttcttagttcctccttccactgtctgtcttgcaggtttccgtcaggatgctccctgcccagcttgtctttgtctgtgaggttccttgtcctgtattgcgagaactttgtaggcccaggccctgcatttccatctctgttttccgggtgcacagctagcccaggcccagaggtctctagcgagcaaaagaggctgaagggatgaatagtgaatgaatgaatgaatagttgaggacagttcatagagtcatggggctggaagaggtgagggctgtgttctcatgcagagaaagaccaatcaatggaggaaatttcgccagtgggtttaaatgatcactgaaccccgtggacatttacagggagggcattttggaactagttgtcaaagtgacaccgtagtgtctataacctcctcccccacccacccctaagcacatcatatattaaagattctgagaagtgactggagaaaaggaaattaatgttccaccattgctgactgatttcaatctcagctcatttcaagggctgacccaggaattttctaaaaccaaacaggacagtgtcccagaagtccagagtagacgtgccccatgagctgtcacattcgcgagcacttcygtatgcaatgcgcttagaaaaacaaaagctcagctggaatgccagccgttgctgggtggatgctgcccccagcgtggtgcaggtggtcggagactggcaggaccacctccactagagctctggtgtgctgagctcatcctggatcagacgctgggccacctactgcatgtatgagtttgctctcattttttttccattgtgggaagaacatgtaaccttgagatggtttttaacaaatttttttgagtgcaatacaatattgctaaccacaggcacaatgtcttatggcagatctctaaacttactcaccttgtataactgaaaacttgatacctatggaacacaactgtccgtttcccctctcccagtccccagaaaccaccatgtgacttcctgcatctatgagtttgaccacatcccttaactaagcagaatcgtgcagtgtttgtccttctgtgactgctttatttcctttagcataatgtcctcaagcctcatccatgttgtagcatgtggcagggtttcttcttttgaaagattgaataacatttcattgtatttatcgaccacattttgcttatccattcatctgtccgtgaacactgaggttgtttctacctcttggatattgtgaataatactgcagtaaatgtggaagtgtacatatctctctgagatcctgatttcaattcttttggataaatacccataaacagaattgctggatcatttagtagttctatttctgattttttgaggaaacttcatactgttttccatagcagctgtacctttttccattcccaccatcagtgtccaaggactccaatttctccacatcctcactaatacttgtcattttgattttgataatagtcatcctaacaggtgtgaggtaatgtatcgtcatgtttttgatttgcatttccctaattacttacgaggctgagcatcttttcatatgtttgttgacatttctatgtcttctttggagaaatgtttctatttaaatcttttgcccatttttaattgtgttatttattaatcatttattatttattatttagttaactacagtagttagttgtaggagttctttatacgttttggatattaatcccttatcagataaatggtttgcaaatattttctcccattttgtaggttgccttttcactctgttggttgtttcattttctgtatagaagcgttttagtttggtatagttcattttgtctggttttgcttttgttgcctgtgtttttggtgtcatatccaagaaatcattgcagagaccaagtcatgaagcatttcccttatgttttcttcttggagttttaacattttagatattaaatttaaatctttaattcattttgagtttctttttgtgtatggtataagataaagattcaattttattcttctgcttgtgggtgttcagctttccctgcaccatttgttaaagtgattatctgtcccccattgtgtattcttggcgcctttactgaagatcagttgactttatatgcataagtttatttctgagccctttattccattgatctcatatgtctgtcagtcagtaccatgctaggtttttgttgttacttgttttttgttttttttttagagacaggatcttactctgttgcctaggctagactgcagtggtggaatcatagctcactgcatcctcaaactcctgaacttaagccattcttcctcctcagcctcctgagtagctaggactacaggtgcacaccactacacctggcaattttttttttctttctgtagagatggggcctctctgtgttgcccatgctggtctcaaactcctgggctcaagtgatccttctgcctcagactcccaaagtgctgggattccaggcatgagtcactgtgcctggctaccatgctgttttaattactatagctttgcaatacattttttaatcagaaagtggatgcctccagctttattttggtttttcaagatggttttggctgttctgggttcataatggttccatatgaattttaaggtttttctgtaattttgttaaaaaaaagcctttgtttagatggagattacatctgtggattgctttgagtagtatagctattttaacaatattaattttttcaatctatgaatacgagatgtccttgtattcatttgtrtctttaattttgttcatcgatattttgtagttttcaatgtacaagtctttcacctccttggttaagtttattccttagtatttttgatgttattatgttattataagtgaatttgtttccttaatttctttttctgatagttcattgttagtgtttagaagtgtaactaatgtttgtatgttgcatcctrtaactttgctgatatttgtttagcagttctratagcttgtagagtaatgttttctggatataagatcatgtcatctgcagaaataattttacatctcttctgatttggatgccttttatttgtttgcttttcctcctaattgttctggttgggacttccactactgtgttgaatagaagtggcaagagtggtcatccttgcttcattcctgatattagaggaaaagccttcagttttttttaccatggagtgtgatattagctgtgggcttttcagatatggtttgtattttatcgaggtaatttcttcccattcctggctygttgagagtttttgttatgaaagggtgttgaattttctsataggcttttgctgcatcagtgcaggtgatcctgtgattttgccctttattttgttaatgtggtagagccacattgattgatttcctgtgctgacccttccttgcatccagagataaatctcacttagttaatgtgttgttgaatttgattttctatattttattggtgatttttgcgtccatgttaatcagggttattagcctgtagtttttaataaggttcttgtctagctttgggattaggataatgctggcctcctaaaatttgtttggaagtgttccctcctcttcagctttttggaagagttgagaaggattggaattaattctttaaatgtttgacagaattcaccagtgaagccatctggtcctggaatttcctttgctgggaaatttttgattactaattccgtcatcttactagttgtgattctgttgaggttttctatttctttgtgattcagtcttggtaggttttgtgttttttttttacgatgtagccatttctcataggttattcaatttgttgttgtgtaatggttcatagtcatcttctaatgatttttcagatttctgtggcattgattgtaatgtctcctctttcatttctgatattatttatttgagtcatcttttcttcttcgttttttagtcccactaaaggcttgtcaattttagcttttctaaaaatttagttgttttttaaaatcatttttgtattctctatttcatttatttttgctctaatctattattgtcttccttgtgctgatgttgggcatagtttgtttttttctcattcctcaaggtgtagagataggttgtggatttgaagttttcttttttattacaggtgtttattgccacagacttctctcttagtactgctttcctgcatcccataggttttggtatgttgtttttttgtttttgtttgtctgaagatatttttgaaatttcctttttgatttcgtttgaaacaaaattttagattcaggagatacatgtgcaggtttgtcacatggatgtattgcatgatgttggggtttgggcttctgtggaacccataacccaaatggtcaacatagtacccaacaggtagattttcagaccttcccttgacctccccacttttggagtcctcagtgtctcttgtttccatctttatgtctgtgtgtagccrttatttagcttccacttttaagtgaaaacatagagtatttgattttctgtttctgtgttaattcacttagcatagtggcctccagctacatccatgttgtagcaaagggcatgattttgttctttgctatggctgcatagtattccatggtgtatatggaccacactttctttatgcagtccactgttgatgggcatctaggttgatttcgtaactttgctaatgtgaatagtgctgcaataagcatatgagtacaagtgtctttgatagacaaaataaacatgaaggcaaacactgccataagacaaagaaggccattgtataatgataaaatggttgattcaacaggaagatgtaacggttatcagtatgtacgcacccaacatcacagcacctaaatgtaaagcaaacactgactaaagggagaaaaagacagcaacacagtaacaggagaagacttcaataccccactttcaagaatggataacatccagacagaaaatgaggaaggaaatcagttgacttgaacaacactatagaccaaatgttcctaacagatctacacagaacatcccacccaacagtggcagattatacatttttctcaagtgcagacagaacattttccaggagagatcacacattgggtcacaaagtaagtcttaccaaatttaaaaagactgaaattgtaccaagtatcttctccaacccagtagaataaagctaaaaatcagttgtacaaggaaaactggaaaattcacaaatgtgtgccaattaggcagcacactcctggacaacaattgggtcagcctcatcctggtgctggtagctttggtcacagtggtcaggtggtgtctgccaggctgctccactaaaaagttttcctctgtgtttaatgaatgtctgtgggaggagctttgagactaagtaaatgttctgtctcatcgtcctttctctcacgaatcctgtgatgattcttaccttcaatgattatgtgtttgccaaatggtgacttttctatttccataattcctcctacattcatttgtgggaattctgtaggaaagagatgtctctttttcctcccctttacttagtagtgtcagttgggggtcatgggtatttgttttatttaatggatttgaatccactcctatcattttttatttattttgagacagggtctcactttgtcactcaggctggagtgcagtggttcaaccacggctcactgcagtcttgacctccagagctcaagagattctcctatcccagcctctccggtagctgggaccacaggtgtatgccaccatgcctgactaaatttttttttttttttgagacggagtcttgctgtgtcactcaggctggagtgcagtggtgcgatctttgctcactgcaacctctgcttcccgggttcaagcaattctcctgcctcagcctcctgagtagctgggattacagatgtgtgccaccacacccggctaatttttatatttctactagagacagggtttcaccatgttggccaggctggtctcaaactcctgacctcaagtgatctgcccaccttggcctcccaaagtgctgggattacaggcatgagccaccacacccagccctgactaagtttttaaataattttttgtagagatgggttcttgccatattgcccaggctggtctcaaattcttggactcatgtgatcctcccacctcagcctctcaaagtgctgggattataggcatgagccctcatgcccggccattactatcattatttattttgtggctgaaattattccagacttacttttaaagagaaggtttccttgcatttacatccaattaagagaaaggactgcagtttctgtgttgttgttgttgttgttgttgttgttgttgttgttttggagaataccgtgtgatgagatacctctggatgttctttatttgctgtggtaattttgaattagcattataaaccctggaatgcagaaggccgcacccctctttgccatgccttgtgctttgcctgctctgccttcctcctctggtggtcacctggccggcccctgatgctccatctttcttaactactggtgctggagagaagctgcaagtgggggagaacgttttcttctctgcagtcttcctcttccctttcatgggtctattaccctgcatacaatggaaagaaatacagtggatgcatttggattggaaacacagttaaactcctgctgtgatcttacaggagagtgaaaactactgaatcactactaatgagtctagatgtctgctcttctcattagtcctctccacatattcttacccacagggatccaggactacaaatactccctttgtcctacgtgggggagcagccgtccttacgatgcatccttaaataattatcaaygtcctttatagaccatttactataaatctctagagaacaaatttttccatttcctaagaatgtgctttgtatttgctatttgctttatgttctcaaaggcaaaaaaaaaaaaaaaaaaaaaaagaatgaacaatgttttcctgtgtgggtgccatggggtgggaggaggaarcctgtttcttgcaggtgtatgcagcacccttgcctcctcatcttctgtgtcaggaaagggagagggacccctcagatgcttgctgcaagcaattgagaaacctgtggcgattaaggcttctgaatccagggttgagggttcagatacacccatgtgaaaaatgaccgaccaacggtgcagggcttacaggaacccccggggttcagatcccagtgtggagctgctctgtccatcctggcaggtcccacagtgctcactgaggtcatggtgctcatggaggaggtctcattggccctgtggccctgattttaaaggctccaccgccccttcaggtcttctaatgggcatgagggagggaggagtgtgcaggaatgaaggcacttctctcttgctaacatctggtggtctctgatgactcattcctttaaggatgctatctgtagtgggagctcatcatacttgttaattccttgtacggaatggccacaaaccctctctgtacgagattgtgtcttaatggcagttgaaggtctaaaatagccatcaaggactgtttcggtgacttccgttccttcagcgtggaagacaatgtccagaagaacctgagagtgccaagatgcccagctgagaaagaaggccacgtgcaggtgcccttccccctgtgcagggctgtgtggccccccagtgtgtgtgccctggaagctggatgccattgtttccctcctggggttgtcggtgggttgttcccatctggtgtttccaggtgggaccccaggctggtgactcattacttccccccttcttccctccccagcccccatctctccatctcccatctctcttcctccatagacatttcatgagcatttcctgtgcccygggtggaggtgctggggatgaggaagggtgtcctgagtcccgtgtgcctccgtcaggggaccatgagacccagagagtcatggaggctggtgcatgcagtgtcagagggaattctgtttatggggtgggggcactgagggaggacctggggtgggagttggggttgggcatctcacctggtagaggcacaacatgatacttctctgagcttcagtcccctgatttgcaaagtgggaaattgttgtgagaaccgcatgagatggtgtgtgcacatcgctcagcatgtaggttttccacagacgttaattctgcattctccagttggagagtagctaatgcgcatatttcatgccagactccccacagctgaagtgttaaagggaagttcaaatgaatcctctgccaaggacttcttcattggctttgatgactcatgaagcactggaggctttacgcctgagctgcccagtgtgaaaaccaaaggcctccattgccgaatcctctygctagctcatggctgacctcagatctggtggccccactatcaacatgggtccccaggtgtcccttgtacactcagtggcttagccctgttgcccccacgctgtactcatgcccctggtgttacacaccccagtggcctgcctgacagtcaccgctcacacctgcatgtgtcatttggcgtgtaggcaacagttacacactatctgctcaatggcyatccagtttggggactgagttgtggtggaattgaaggagcctttcccacttgatcttggacaagttttctgatccctacaatgaggaataaagctcgcacctcacagaatgatcttgaggactcggcgggagaccttccacaaaacctcacacagtgcctgccctgtgggatacagacgctcaggaaggctgctcagagatccgctttcatttccagcctcaaggaaatcccagggtttggtgtttggacagggggtccctgtgaccttcccctttcagctgtatatgagtttcaaagaccgacgagcaaatgggagggatacataaccttctattcacttccctggttgccagggaaataatttggtggtctcggrggggggagccctgtaggatttatcttcatgcttgatgagaggtgggcagaacacatcaccgagggccggctcttcccgcagtgtccacagtgtgccttccgcaggtccctagtgaaggaacaggagcccgggtacaatagcaggaaccttggagctctccccttcctctggcaaagagtaagcctgggttgcagcttattgattttccacttcggcccggaagggagcatttatmtttttaagtcagatggcatgactctccttgccaaaagttttaggagcctcatgccataggaccaactctgggcccgcaggccccagcatgggcttttgttctggccctgccctcagtaggtcctgcgaacgtgggggtttactttacctgtatgagtttctgtttccatatctatatagcaagagagtcccctagctatgagatgaaagggatggggccagttccgtcatcgcggggaatcagatgttgctgtgggcctctggtgtgctgtgtgccttgggtttggtctgtaaccacccctgcaggcccgccttccttccgcctcagcttctcgtgtttccttttggtaaacatttctggaatttctgctgtgttccgggcaccgagggtataaagattaatgacacctgattcctgccttcgactagaggggtggtactgacgaactggttggagctgggagtaggggagcaggggatgggtgacaggaagcaagtaagagcagccctgggcctgctattcatgcgggagagggggtcctgggctcacgggtgccctcccttcacgctggaccccgcacctccactagctttgtgactttgggtgagtcacttcagctccctaaacctcagtctcccactctgggaagagcattgagacttgagagttagaatttgtgtttggggcttcagwtagatgaaaaccctgtccctccgcacccaagctatagctcctggcctttctgagccttgctctgcttgtctgttccatggagctcttggtctccacttcatggatggctgcaaggattacatgagcctaaactcgctctcatgatcctggcctggcacctggcatagggctattgtccagaaatgttgccctcaccccgactttcctactcttcctcccaagaggtgggcccttaaagagttagtatttgtttcttccagagcttccagtaagattgtctttatgccatctgagtgttaccctgtacaaggtggagtcattgtcatcattgtcattatcctgtttatgacaattgattggacacgttgcatatgccaggcactgtccttacaacagccttgtgaagccacagtggttggctgcctcatcttctagacaaggagataggcatgctcagggacccacagctgttagtgcagagctggcatggacaagccaattgtgtccatctccaaagatggcatttccaggaggggactttagagagtctgcctatcagaggggcttctggccagcccagcttctgctgggccatttgtgaagatgcagctggcccagccagtgctgcacatgcgtccttgtttgagctctggctggggcctgtggctatggctggaccctgccttgctggcagcttgtggcctggcccctggtggccctttgtctcctgacctcgccctccacttctgccccgacctctgctgggtcatggaaagtggtgtgtgcactggagtctggttggagtctgatctggctttctgctaagggtggtggtagagccagccagcccgggctcatgtcccatgtctgctgtaaagaatgctccagcacaccggaactcggggctggcacccagcccctcagcaccaactgggtgttgttgttgctgttgttctccatgttgtccttcagcagaggctgtggctgtgtctgctctcacacagcctgcagagaagcaggcagagctgagcagcggccgctgggcccagccagcccactcttgtccccttcttcatgcgygatgtgttttcttccctatatcccgaggcagtcactcgttttcttctccattctctcagcctctcctctggcccctggggacccgcctttcaccctgtgggctgccatgcctggctctccggtgccagcggggcctccgcagagaacgacttccatacccttcgcattcgggctcttagcgcaacccggactattcttagcataccgaaatgcgagctgtcccccgtgcactgcaggtggattgactgagcttctgcmtgcgtgtttctgaaaggggcctccgccgaggagcatgtgttttgtgcgtgcgcgtgtgtgatgtggaaggaggcacagcccgggcgggtgaccatccgccctggagtctgaggagctatatttagctcctccaacatgcctgctgtgaggctgtgccgggagaggctggcggggcccaggcagggttgggctagaatctctggggagctgcaggcctcccttccaggacacctcacagacagctggtcacagaagagcttccacagaaaggaacaagagcagtttattgtaggtgccacgggaacctttctaggctttttctgtacacgtttctatttctcagaacaggcctacagaataaggaatatctgtcccattttacagatgaagaaaagttgagttccagagagtgaaataatgtgcccaggttggttgcttgtggagctaagatatgaacccagatcttagtttacatcttaggatgaagggccaattactaacatttataatttagggcaattataaaatatggggcaattctaatttagaaaaggggtatggggcattgaagaataaattctgggtccttttcttcatgctgtattatttagaaagtgcaagatgactgcactttcttggatgtagcagggctcatgtccaccaaagcacaaagcctgtaagataggcatccaagaatgctctgggaaccattttctggaggagaaacattgcagaagtcttcccaggctgtggacagcaggggctccttttggaacctcctaccttctagccagcgtgacagaagctgctggagacagggaggaaggcgcaaggaaagggagggagtcggcggctgtggggagtctggggcgaaggccccttggcctgcccgccctgtccatccagctctctttcctgctataaagcctgagctgtagccacactgggctccttgcctttccttgccaagaaggcattgttgccctgtctcacagaggagagaaaaggtttcatagccgtcggcgaagacctgggacaacacacggagcatccaacttcctgggaagagctctattgcaccgtggaccgtgccaagcaccaccggagagcggcaagaccgctcagcacagtgctagtgcaaggcgggggacgccagtctccttgggcaagacccctcagctcttatccaggtgttcctcagggagaagggtggcttgctgtgtcacaggagtcccatcmtcccatctagatccagtcccacattaaaaaaagagtctccagattcctttttcttctggttaaaatcccaccattcttttgagaggacagctgatttatggaaagccagtgctgctagaatattaactaacttcaaactgtagtcttggtgataactgcttttcgtttttcttagttacataaaatggtattgactcagaaccaccatttggtgaaaggatgaataagggaatgtaattgatctgggactctgccacctcgaggctgagctgggcgtgtcctccttggacactgtgggtttcatctccccagaagacctgagcagccaccgtcatcttccttaggatgtatagtgttctccaagcagaagcaaaggacctgacttggtttttttttgtttttttttttttttttttctgcygagatggagtcttgctctgtctcccaggctggagtgcagtggcgcgatctcaggtcgctacaacctccgcctcccagattcaagtgattctcctgcctcaccttcccgagtagctgggactacaggtgcgtgccgccacacccagctaatttttgtgtttttaatagagttggggtttayaccatgttggccaggatggtctctaactcctgacctcaggtgatccacccgcctcggtctcccaaagtgctgggattacaggcatgagccaccgcacctggccggacttgggtttgttaaacccaaggtccttgtgctcatttaatgctcacagcccgcagcaggcagatgtgccaccatcctcgcttcgtgtacgcaaggaagctgaagcgcagagggtcaggttgtttgcccaggtctcagagccggtggaatagcaatactggactggtgtctgaccttgggccttcagactcctcacctccttctccttttcctctccatctctgctggagatggggtaaccagaggcaaggactcaggaagtcaaatgccttggtggtgacttggctctggttttggaggtaaagttctatgccttcattctgcatcttattttgttttcaatcttggcgattccttgtaataacttattgactcttcaccaatcctagtttacctttggcttaatttttccagctgacgtagactatattactgcgtgtaagttatatcagttagctattcttagtctttagagtgaatgcatcttaggtgagggtaattagaaatgcgtatttagcacacaagggaaaattttctcttttgcagctgtgcattaggaaaaataaagagcatctgcgggactataaggtttccatttataatagggacttattctccccgaggcgagaagctgtaatcttctgaaagccctgcgtatcagtgccgaaggtgttgctttcgtcatttatgtattccgtccgtagcatttacccacctcctccactgggcagcttgccaggctctgtgctgtgccctgggggcactgtcatgccctgaagaaatgctcatgggtggggcctgataaacaggttataatgccaatttttacagtggtgtcatggctgtctgttagcatggtcttcaaagttgggcacgtatggaaccaaattctgccactgaagctgtgggatttgttgggcaagttgcacatccaagccacggtttctttaccggcccatgagtggttgtaggggaacagtggccagaggtgattgatatcttgggattgagtgcctaagtaggatgtcatatcctagcccactgtgatttttttttttttttttttttggtcgttgttgttctgttgcttctggaccagcacagtgtctggaacaggggggcacccagtgaatgtttgtccagtagttgaggggtgtggctttttgttggactgctgtgaagcagaagaaagaggggatggcactggggtcagccttggcttgaccgtctaccttggcacgtcttcagggcgactaccaaggtttgaaggcgcctggctgacaccctgctggcacaatgatctgagtttagaacaactgccaggtacggcaggaatggggcggtctgcttacctgcaggctgtggctggagtctgacctggctgtaggcaggcctcatggtagaattccttgtacccaggcagtcatgggcaggccacacccatggggcaggctgggagggccactggaggggagagggaaggactggggcccacgtcaccatgctttccccatctcactaattagggaacttgcctgtatcgccccatttccattgcagtggttctgaaagtgtggtccctggaccagcagcttcaggaagctgggctcttcttagaaatgcacattcttgggcccctctctaacctgtaaatcagaaacactggtgttggcccagcgatctaggtgttcaagcaagctcccctggtgaccctgctgtaggctggagggcagagctgctccttcagatgtgctgtgaatggatctcaagrgttatgacactgacccatcaggcctcaggatggtcggctggggttcggggtagccagggtgaagggactatgctggggaaacccttcccatggaagcaggaagaatggagaacaaggtttatcactgaaggtgaggtctgggacatgttacttcatgctctttaagcctcattttcctcacctggagaatgggaataatgggctttttttctgtaggatggctttgaggctttagccacaagatgattaaacaaaactgaatttagtgtacaagagatgtttgttaagaggtagcttcctttctttaccctcttttccaattggcctatgtaagatattctggaaactataaaaagtggaagagcttatagactggaagaagaaattctagatgctggattcagcctttcttactgcacatagaagccaacagagggtttagagcagcgttcctcaccaagtcctagctccttaactttcatcaggcagggagagtgggggacagctgatgtccatggaagagacaggaccggtgggccctgactcttgttctgccagtcgagctgaaaaacagtttggtagggaagttattacattggctcccgtgtgaagacaaagggactgagtccctcagatgggagccgttcacctagggctgcccagagcgaaggagcccggaggcacaactgctggctcagcagacagaatgtttctgttttctgtgtaaataaggaggtttgctggcatgagaaagaagcaaaggccacagactagaagagtcgttgaataactgcgaagatcagcagaaggaaattgactcaggagcagcccggtgctgggaaggcagagatgtgttaggtgggggctctgccacctttgctttgctctggcatctgcagagggcgtgggcccaggcggtcccggacactccacagggccgtggagagcaagcgtaggtgaaggaggtcagctaggctccctaaagaccaggtgtcctggggtaaactctgggaccttggccaagtcccagttatctcagctgaaaaagtggggaactaatatccatgccttggtctttctcaggaagatcaggactcttctataaaaagcagccggaaccatccttggagcatgcgtgtgttccgcaaggtggctgcctcctttacacattttgaatgattgttttaaagtcaaagactctggaagacttgatttgttagtattttccccaacgttttattttgaaatatctcgaacatgaagttgaaaaaattgtatactgatcatctatacccattttcttttttctctactttctctctctgtatatgtttgtacacacacacacacacacacacacacacatacacttttttgggctaagttgcagactttatattatttctctccttaaataatttttgcatgcctcctaagaaggatactttcctaaataaccattgtcacacccatgaccttcgacattagtacaatagtgttatgtcataaacgttccatattcaaactgtcccaattgtcctgaatattgatttgttgtgcttctttcattgataagaagctataatagatttttttttttttgagacaatcttgctctgttgcccaggctggagtacagtggtgcgatctcagctcactgcaacctccacccctgggttcaagcaattctcctgcctcagcctcctgaatagctgggattataggtacacgccaccacacccagctaatttttgtatttttagtagagatgaggttttaccatgttggccaggctggtcttgaactcctgacctcaagtgatctgcccgccttggcctcccaaaatgctgggattacaggcatgagccactgcgcttggcccagaagctggaattagattagacttagatgccatgttgaggcccaggatggtgtgaccgccatgagggcgagcaagtcacgagcgttctccccatcccctgcagaaggggttgggtgatgggcagggctagggtggaacacaggccttggccttgagttcagggccatggtctgttggctgttggaccttgggcttcccagttgaaaaacaaagttactgacttgattcttagcctctgtttaattctcactttctgtggaaaaaatcatttaatctttgatgttgggagggagtacttgcaaagtctcttagtttaccttgctgtgcaggtgtacgctgtttgaacacctgtactgatagctcattgtttcacagggctctaatcatttggacactttactatatatgtgtatattttttccctgccaggtacagtatgttgatggtattgattatacatgattctcctaatctcccttcttcatgggtccagggatggaaactgtcagagagaggagattcagagtgtcttgcgggtagggctgggtcagggagctctagtagctgagggcttgtttttctcttctgctattgcaagagatgttgggcctggtcattcttggaggtcacagggaccatgaggtccaccattcatacctggatattaccttgacaaagtagttgtcgaaggtaaatgccagcgccagcatcaaatgtttccacctttccgtggacacctctgttgaatgtttccacctttctgtggacacctctgttgaacgtttccacctttccatggtcatctcttgactgtttcccccttttcatggacatcttgattgcagttgacttgggcctccccgtggctcaggacaccttccaaggagtcctttagttactgcatcaccaccttcttgaggtcatgataattggcttcctctagacactaggtcatatccctgaatgatgtgtgttgggatggtgacatagaaagcttgccagtgtgcggccgagcgtggtggcttacgcctgtaatcccagcactttgggaggccgagatgggcggatcacgaggtcaggagatcaagaccatcctggctaacacagtgaaaccctgtctgtactgaaaatacaaaaaaattagcgggtgcctgtagtcccagctactcgggaggctgagccaggagaatggcgtgaacctgggaggtggagcttgcagtgagccgagatcgcgccactgcactccagcctgggcgactgagtgagactccgtctaaaataggagcactgagcgtgctcctattaagctcagagatgaccttgccacttgaccactgaccttggcagtgtccatggatgttggattatgttgtgagcaaggccatcacacttcactttgttagaggggcaggctcctgggacgtagtgttggtgtgcgctgtggtcatgagtacctccactaggccatgattgttgtggatagtcttggctggggggcttgggtggtaagtagttggtggtgggctgggcactgctgacagtctcgagggagttttcacgcttctcatgatatacatgtgtctatcagcagtggttcccttcaggagagtctcaratttcttaagggagttgtagactcctccacatagtcagtattagaattgctccatttgatcttgatggggtcttgctcctgggagagggatatgggttttcccttgatcacaaacctcctgtgtgcagccctggtcatccctttagagttgtggactcatactagaacatgctcaccatgtaattgttcagtgaagagatcaatgaaaagggcaatggagagatcatgactggccactgacaagttgtccagggttgaaagtagccctggtgattaggtgcctcatacagcccaagccacatactctgaccggcaccatcagttcttagggatatcgctagcaccatagcaggaaggcagctacctagtgagcagagtgggctggagagcttccagctgcaccttccacagacattcatacatcaagttttttatcaaaacactgaagtaaaaatcgaagaagaaaaagtcaagtgtactccatggcttaatgactagaacacaggttttgaatttaaatacagctggcatttaaactatttatttgttgtgcacattaaatcattcagtgtttaagttttcttacctataaaaagtgggtaataattatatgttttttaaaatcacacaatccagggaggcgctgagtatactggaaaatcctcccactgtttatctggtatatttacagctcccaaacgtaaacctggctcctaactccaatctcattaacaagaaagtgtcctctgtgaatcaagcctttcttattcttgtagctctcttgggtgaagccataattgcatctctaccatttgagtaaatgaacttcacgtttatagtcctggttaatagggcacgtggccccatgcctatcagacaggccgtggacagtaaaagtggatttgatggtgcttccagactctgaggctagaatgctattagcactgcaatgaaggtacagtagcgtagggctaatgatatcaaagatggactggttaccacagatttaacaccggatgggatcttgtagatcactgcacattgacctgaggctttgaccstgcaggtttgtgccccttctcgctccgctccttccccagctctgtgctgagctccctgtgagttccaggtacgagggtgtgaggatgaaatgctgggtgttctgtctctggggacacagtctagcagagatacagagccatctgargctgtggcttgcatcctatggaggctccgaggagggcctctgattgcgccctgcagacgggaaccatctaagcacgtggattagacagacttggcagatattggcacatctggtttcctgtcgagacctctgtgctcagctgcctctctcccttcgtggggtttttgctttgaccttaccctggccgccgtcatgcctgacactgggtgttgttgcatcaggagaggccgcctccctctggatcagttactgtgtgctctgcttccgtctcgccacttgatcgccatctagacagcagtgtgcgtggagccagggccactcatccatccacacacaccttgtgtcaatgcgttgttcgctgcaggtattttccagatgtgctgttggtgacctgtgatgcacaggacatagcctatttgttccccacaatactgtcatttccaccctctagagtgaggggcctggtccttctcatcgtcctgacttgaaggccagctttggatgcagcctcaggggtgtcaggccacgttgcaggtgctggaggcccgtgtggccctgcccgtggagcacgggtgagcagaggtgaacaaggggatgcaggaaccagcacctgtggaatccttgccctgggccaggcactgcggcgaatcagcttctcattcaattctcacagcagtcctgtgccatcctttttattctccgttcctcacatgatgaaaatacactttggtgggatggagacatggaggagatgtctgatgacacagaggccagagaggttgtgtctaaactgagggcagggagtaccagagagagtttcttagtcttctggaataaggactaggaatgtcctagttggagagagtgggtaaggacattcatttcaggcacacaggtgtgaaacaatacagctttcagcaactttcctaccatgcagcacgagggaagctctggggtgtgtgtgtgtgtgtgtgtgtgtgtgtgtgttggaaggtgtgtgttgggtatgtgtgtatctgtgtgtgtgttggtgtgtgttgggtatgtgtgtatctgtgtgtgtgttgggtgtgcgtgtggtgtgcatgtctgtgtgtgttttgggtgtgtgtgtggggtgtgtgtgtgtggggtgtgtattgggtgtgtggtgtatgtgtgtctgtgtacgtgtgtgggatgtgtgtgtgtgtattgggtatgtgtgtatatgtgtatggtgtgtgttttgtgtgtgtgtatgtgtctgtatatgtgtgtggcatttgtgtgtgtgtgtgtatgtgtgtgtgtggtatgtgtttgacctgagacaggaggagcagtaggggtccgatgtggaagggctgggagcggctatgctgaggtctgaactgtagctgggcaattggggccagtgatggtttatctgaagaacagatgtggaaatttgtttctttattcttggctctacttatgaattcatttgttccaagtatcttatcttcctttctcactgttgaatactgatttagtaataataatattagctggtacttacagcactctttccaaacgccaggcactgttctcggtgttttgtaagactagctggttttgtcttcctgataacccagatgtgaaagctgctgcctgaagagatcagatcactcgctcaggggcctgggcaggaaatgacgatggggtctgagcccgggcagcctgctttcacagtgggtgctattaactattttattctttgctgcttaagatgcattttgtaaaaatttgaaatacatcacatgacaagtgtttattagcaagagggctgaaagactgtatgataaaataatgtgacggtcacacaccagggcctgtcgggggtggggggctaggggagggatagcwttaggagaaatacctaacgtaggtgacaggttaatgggtgcagcaaactaccatggcatgtgtatacctatgtaacaaaactgcacgttctgcacatgtgccccagaacttaaagtacaatttaaaaaaataaaaaaaataacaataatgtgatcgtgatgattttccgtaaacacacacgcggcatcttagcttccaaggaaccccaggcatcaggtgagggtcgctccgctggctcctgctctctctctggacagatgggctccctgctctgagttctgcagcgtctccctgtgagccacgtctcttcagcccgacttctccccactcaggactcgtgtgtcacactgtcatcacttggatgtccttcggaatctcaaacttcctgtgtcctaaatcagagtcatggatcttcgtaccacaccctgtcttcttgctcctctgcctctctccccracttgagtaaactggtagtgcattcttctcrttttttttcggtcaagaatctaatcttgaagagatccgtggcttcccttttcccttcccactcagcgtaccgtcggtcagctctgatgtcttcaatggcagcacgtgtgcggagcctgaccgtcaatgttcactccatgccaccccccgaacacgtccccatcagtcttcacctggcagtgacttcatctgctagcttggcacctcctctttagccttgtccccagtctgtcttccatgttgcagccagagtgttctttttttttttttaaagaagtcgttcaggtcatgcctttagctaaaaagtcttcgaaggcttcccagcccgttgggagcacaggcgtgggtcccctctgagcctggtgtgcctgtgtggtctggctgcggctgcctctgctctctctgtagccccgccacgtggaccctcgtagccagtgtttgtccagtgacgggtgagttgggcattcaattcccctgtgtagcccagtcaggtggaaagggccactggagattaattggtccaaatccatatttcacagatgggaaagctgatgccaagaaaggacaagtgactttcttgagtctacacctaggcttgatgggggagctgtggccagacgccaggtttctcctgcaggggttctcagtttaccgccttgcctggtgttggctgtgggctcacgtggrgcaaggcatcgaaagacgcttcttcaggccgattcccggtgaagtcacagtgccctgtcctttatcagtggccttcagtgtggttagggcctggcgattgtggcttttggggtcagatgcacctgagctctgtggtttactagctacgggaactggagcaacgtacctcacyttgccgaacgacagttgctattcaaggccttcctgtcggataggatggsgaagtcctgagagagacccagtgtgcgcagctcccagcattgtgtctggcaggggccggccacctaacacacactggttgtgaggattgcttcttgctgacctgctagcagtttctagccctctgcaggtacttagtttggcatctttgctgggggtccccatcaatttcctgcatgcgtaacaccttagtgtctcctcttgagttgatttcagtcatacaactttggaaggatatagcattcctttctataagccggaagtctgatgaagtgctggctgtcaagtacatttctctaatattgaagatcagcagtatttaaaaggccacatcctatggccagagagtgtttctcataactaaatgagtgccaatggaaaatgtcctaattgcttatggcttataacagtgaattaatgtaaggacaattctgctgatcctaacaaatctctgctgcctaatttcaggctgattgtatttcagttttactacatttattaaaatcatcccttccacagtttaccctcctccagctgtgtatacagaaggggaaaaaccgtgagcatcttgaatgcagcatttagcaccaaggccagggcagcctcatggcgcggcagctgtgaaactggccttccttcgggaacccaggcctgcttcttcagggcagcgccagctttctgctcacagtctccttctttgtctccttagcctttctctgggagacagcatagggctgccggaagagcaggaccttcggactcagacctggctttgagctttgtggcaaggctatttatttccctaagctttcgatagtggtgagctgttgaggtagtgatacctgtgctgcattgtggtaggacttaaagtttctgaagtgctgctcacagtgcctggagcacagtatgagcctactgaatgtcagctttctcctttctctgagatttgttgtgaagatgctgtcattcagttaaacggaatgcatgtggggcacctgctcttcaaggcactaggtatggagcatggtccctgcccgcagtgagcttttattctgttgaaggatccaagcacttgtgctgcagcgtggtaagtcagaggcagggaacgtgctccgtgctgtttattgaggaggtgcagccagcctgggctttgcaggatcacagagactccctaggtgatgtgagttgtccacagaaacccaataaccaaggaagaatttgtcagtgggaagagggtagggtggagaggtgagggaaatctttgtaaagccaggttatgaagtatggaaaaagtgtttattaataagattatccatccatcygtttaatggacattgatacatggttaatgtataaatcatcttcaaatgtaattctacttagcaagcatttattgaatagttgctttgtgccaagtcttgtgttgggtacaaacacacacttgagaaaattaacaaagccaaaaattaattcttgcaaaatattagtaaagttgatgattccctagcaggtgtatcaaaaagagaaacactattaccatctggaatgaaagaggaacatactatagatcttacagatgtgaaaaggttaataagagaacataatgggctgggcacagtggctcaygcctgtaatcccagcactttgggaagccgaggcaggtggatcacttgaggtcgggagttcaagaccagcctgaccaacgtggtgaaacccygtctctactagaaacacaaaaattaacaaggtatggtggcacacctctgtaatcccagctactcaagaggctgaggcaggagaatcacttgaaccagggaggtggaggttgcagtgagctgagatcacgcccctgcactccagcctgggcgacagagcgagactctgtctcaaaaaaaaaaaaaaaaaaaaaaaaaaaaaaaaaaaaaaaaccacattatgaagagttgcatttcaatgcatttgacaacttggatgaaatggacaaattttgtattctaactttttggagatttccctggatgaaattttatcttaaaggaaatgaattttttttttcctttgatgtttagtgctttttgtgkcttctccgagatctcttttcctatcccaagactacaaagatattccatgtcttcttccagacgttctaggtgttatatgtttagatgtatgacccacctcaaaataatgtatggtcaatgccgagatttgtttctacacatttgtccagttgttccaccatcgtttgtagaaaaggtaaattttatcattgaattgcattagcttttggtaacaaatcaattacctgtgtcagtgtgggtttatttttggaatctttattctcatccattcatttactagtcctggccagtgcagtagtccaagaaagaaaatgtaaaagacatagattttggaaatgaagaagcaaaactgtctctgtctgcagacatgatttcgtacaaggggtaatctccttagtgtagaaaacctcccaggaatttggacaaaaatacaggtcaattaaaaaaatagggaaatgatatgaatgtgtaattcatgaaaaaggcatkaaaatgtgccaagcatatggaaagatgttccacttttttaataatgagagaaatgtaaaatgaaactacattgagattcttcatctgtcagactgtcaaaaagccaaaagttgaacaatataccctgttttcaaggctttgagaaaagaagtgctctctcaagcatggctgttaacatgtgamatggttcgactttcagttgaacatttgggtagtatccattaaaatgacaagatttgttttttgacccagaaatctcccttgaaaaatatatctttcagaaatatcttcatgtatggaaagcaacttatgtatgtggttatttattataacattgttcataataacaaaatattgaaaacaactatgaatccaatttttagggtactgtttaagtaagctgtagcatatctgtaccatggaatggcacacatgtctacaaataacctgcaaaggatattctataaaggatgctctgtctgtactaagtaaaaattttcaggatctattaagtgaaagttaacaaacaataaggcatacaaaggtggacagcatgtgtaatttatgtatttattgcaaggtggtgctggctggaggagggtggggggggaggaaaagtttacatttgtattttcttgtttctgtgtaaataaatgtatgtaaataaatgtggatacattaaggaaaactaataaggtggttacaggggatgggagaggacagtggtctggacgtggtgacagaggtgggagcaagccatctcagcaccgaccattttatatcacttacattttaaatgactgaatacacttcttatcgacaaagtatgtaactccaggtgtgatgggtgctggagcagagtgtccatgtggtatgtgttagagagtggcagagtttctttggagacgctggaaagacttctcagagaaggtgaaatttggctggagcgtaagtgcaggtaggacgtggcggccctctgcactgctgtggtctatggcactgggctcatcgcccagggagttaggytgggggtcccaggttctgtctggcctcgactctctgacttgatgctctccttagtatcctaaaccagactttcaacttggtcttctaacagtccccagacataccccctcctttggaccttgtgtcctaactcttctcagccaccacgggactcctgggcctcttggctggaagctgttttgatggctgctgttgttcaaacccatccctgcactgctgtggatggatcacttaatttgtagttacttggcatcttgaaggcatcattaacactgaagaaaaactttggttgaaagtgctaattaactggaaagtaatggtatggcttttatttgtgagtttcattgaccttaagtaaaccgttgtgctggtctcttggggaatgagccccagcctttggtcttgaatgtttgacttattaagtggatcacatcacagctattaattttatgtcatattatagaaacagagcagaaggaaatccgtggtgacaggttcaattgaggtctttaaatattagagatctacttcatatacatttaagttggctagcatacatatgagggtgattgtttttctctgacaatagtgttagttatattagaagttgtggaacgttaggaaaataaagaataactgttcatataagagctggtcaaaacctcaggcaacatctggcatgaccctcaggttttaaggtgaggagactgagaactggacaagtgatgtgacttctcccaggtcacatgaagctttaattatggtgaatcataacctcactgctgtttcttctgatgcagaacccgggattcttaagtctccatctgaagcctcttcgagggcctcacattcgctcttagacatggctggtcccacatcaacgtggcccacattgtgacttagattctttaataatgtttacgagtgattgtatgtctattaatggtcaggatcaatttcaaaaatcaactttactgagtgtaatttgcattctataaaatgtagcctcattaaccatacagtttgatgaattgtgacaaatatatactccatgtaaccaccaccaccaccataaagatatagaatatttttatcaccctccatagtttctctgacccctttgcagctaaccctctcctgcctctaactccaggcaactgccgatctccttgctaccaaaggctgagcttttctagtatctcatatacatacaagcaatggtatgcactcttgtgtgtctggcttctttctttcagaataaggggttttggattcttccatgttgtgtatgtatcagtaatttgctccattctttagctgagtagtatttcgttttgtgaatttactacaatttgtttatttggtcacctacctcttgttggacatggaggttgtttccagtttggtattattatgaataaagtctccgtggacatttacatccatgtttttgtgtagmtatgtgtttttatttttcttggtaggagttgctttgctgagtaatatgttaattgtaggtttaagcgtaggaggatttacctagctatttttcaaaaggattttactattttatagtgccaccagcaatttctgagagttccagtagatttcttaggatgtttttggtacatgattatgttgtctgcaaacaaagatagttttacctcttcctttccaacatgtatgccctttgtttctggacttattgaacttgctaggatctcaagtacaatgcttacaaaaattattacagctacatcttaatctggattttagatgcaaaacattccattgcttatcatcaagtatggttttgactataggtttttcatgagtgcatttcatagaatgaggatgttcctttctatgcctagtttgctgagagtttttaaaaaactataaatgggttttgaatttcgtcaactattatttctgaagctattgatcattcagcttttctttttgttgcctgtcaatagcttattaatatggtgaatgactttgatttttgaagattaaaccagccttgcattattgatggccgtgatgtattacccattttatattttactgaacttgattcattagtactttaaaaatattttttacatttaaattcatgagggatataggcctcatgaatagttttcttagaagttttctatctgattttgatatttgagtaatattggtctcataaaaagattgggaaagttttctccttttttctaattgctaaaaatgtttattatataaaattgatattctttctaatttacatgtttgttagaattcagctgagagaccatctaagcttggggtttcttttgggagtatatatatatatatttttaattttattattattatacttaaagttttagggtacatgtgcacaatgtatgtccaacaacgatagactggattaagaaaatgtgggagtacattcttatttgcttgtttgtttgtttgtttgtttgttttcagagacagagtcttgctctgtcgcccaggctggaggaaagtggcatgatcttggctcactgcaacctccacctcccgggttcaaatgattctcatgcctcagcctcctgagtagctgtgattacaggcctgcgccactaagctcagctaatttgtgtacttttagtagagttgggctttcgccatgttggccaggctatctgaaagtctggggctcaagtgatctgcctctgcgcagcctcccaaactgctgggactacaggcatgagccgcaatgcctggccatcttttgggagtatattcttgatttgtcttcaattggcatgaggctcttcagattttctgtttctccttgattccttttggtaatgtgtgaccattttatctaagttgttgaatctattgacacaaaattattgatactcttccctgattgtccttttaatggttgtaggatctgtaccgataatcattctcattcctgatgttggcaatttgtttttctcttctctttttccttgatcaacttagaggattgtcacatttattgatattttcaagaagtaggttttagtatagttgtttttttccattatttatccattttcaattgataattgtctaatcctgtcttccttactggtttgttkttccttcctctgcaactcctacccacctggcatatgtagtcctttctcctcctgtattctcatatattctaatacacttatccatgacacaacgtgtcacaatttactcagaggcatcaaggcttgtttcttttaccagactcgagtgccccaagggtggcactgtgccttcttcctctcaagtgccacagtccctgggacatagtagacagggttagtgagtgaatgattgcatgggtgaatgaatgctattctaaacagtttgcctgaatggcaagagagtgggctgtgcaggcatgttgctctgcattcagttcctgcctgtgctgcttcctgggtgctctgagcctcattgatgaaagcagcacttcccttgtggggctctcatgactgttgcagttgggtgtgtaagtcactcagtgcagcacttggcatggagtaggtactctttaataaaaggtacctactgacaggcctttcatgttagctggaataataagttgtgtgcctagaaaataaacattttggttgtagtccctcgtttatgatttctgtaatagtcttctgtcaaagtaaggattgaaaaatgctctcagatgggaacatcttatgaagtctcttggattgaggaaaagggcttggacatcctgtgtctttccacttcccagctccccttatgttcttattattaataagaccatatatataatatataagaccttatatataatattctaattttaaaagactgaggaggcctttttttgttatttctggtttttgtttttatctcaaagaggtaaggcagtgacactgaacttcagaaaaccttttgatgtggttagactctgtgtccccacccaaatctcatcttgaattgtaatccccataatccccacgtgtcgagggagggacatggtgggaggtgattggatcatgggggtggtgtcccccatgctgttctcatgatagtgagttctcatgagatctgatggttttataagtgtttgactgttcctccttcacacacacactcactcactttctcctgccgccatgtaagatatgcttcttccccttctgccatgattctacatttcctgaggcctacccagctgtgtggaactgtgagtcaattaaacctcttttctttataaattacccagtctcgggcagttctttatagtagtgtgagaatggagtaatacaacttttctgtgcttgattttgttaaattagatatttcccctcataattatatcttttttgtggttttctacagagtaaagtaatagtaaattcccagaaagtagaaacacagactatttcctcttggtgatgtggtactttgacagttgtctgtgtactttttgttcattccccaggtgatttcttttacatcactctctgtaggtgacttttaagtttacctcaaaaaaacaaacaagaagccagtgtgacatttgttgttacttcacagattttggcttttcacagccattactgagagtttgtttatttccatgaccactgtgcctgcattttgagaaagatgctgtgtatatgttaggtggttggttggcttcatttatttattatttaatttagtcatacattgcctcactcagcatttacagagctttctgagatcagggactacatcttcttcatcttgtactgagcacagagccctgcactcagaagatacccaggaagtgtttgaaaagatgaatgaaaaaatagatcaaacagatgaaagtcagttgaactctgaaagttttgacagaaagacttattgagtgtgtgtgtgtcgagtctcaccttctgcttatgacaagggcaatgtaagaggtctgagacgtgttcacaagaaatcagcagccctttggagatgacagggcggtgcttgggagtaaagggaatgaaaaaaggatttgggattttggtgaggccaaaatatgatccttgaatattaaaaaaaaatctgtattttattgagccatttgtaagtaagaggaaggcatggctttatttgggctgtcgagtagtaatatttacataggtggagagaatcagtgaaggtatttctctggcagtacaaatattgaagggaacctgtcaatatgtagtcatgaaatatacctataggagtggtgagaggggatttggaatagtgagcttttaaaatgagactgaagractcaaatagaaatttctccaaagaagatacataaatggaccataagcacataaaaagatgctcaacatgactagtcaccagggaaatgcaaatcaaaaccacagtgagatattcctttgtgtcccttaggatggccattatcacaaaaacagaacatagcaaatgtgtggtaaggatgtaggaaaacaggaaccctgtgcactgctggtgggaatgtaaaatggcacagccactgtgcgaaacaatatggtggcttctcaaaaaattacatagagaatacccgtatgattcagaaattccacttccgggcatataccccaaagaacygaaagcagggtctcggcactgtccaaccatagcagcactgttcacacgagccaaggggtaggagcaacccaagtgcccgctgacagacgaatggatgagtaagacacagtacatacatgtaatggaatattggtctttaaaaagaggaaattctgacccacgattcaacacggttgattctcgaggacatgatgctgagtgaaatctgccagtcacaaaaggacaagtactgtaggattccactcatgcaaggtgcctagagtgtcaaattcaggaagacaaaaagtagcatggtgggtgccagggcckagaggaagggagactggggagtccatgtttaatgggttcagagggtcagtttgggaagatggagtagttctggggacggaaatggatgatggagatggttgatagacagaatgagtgtgcttaacaccactgaactgtgtacttagaattgttaaaatggtaacttttatgttatgcatactttgccacattacaagaatataaaacaaaactagaagaaacgggactaaaactcatttcctccgattctaagccatgttgcctcagggtgtcagatgggtaggttgcaggggagaaaggaatttatttaatgagcgacttcttgttctgtcactatatttcctcatcaaatctgcacgaatctagtgagatacatattaattattgtccctatgtaacagttgagaagctttgatttcctttttttcctttttcttttctttttttttttttttgcattttgcttatgcttttggtgtcatatccatgaaacctttgcttaatccaaggtcatgaagatttgttcctatgttttcctctgggttttatctgcaaatctttgatgtaaaggtccacatagtattttaagctttgccagccgcatatggtctctgttgcgtattcttctctggttttgctttgttttgttttgttttacaagctgtaaacaaatgtaaaaactgttcttagctctcaggccacacaaaaacaggcggtggtcagatttggtccatgggctggatctgctgtgtcckctgcttccggagggtcctggggaaggcagggtccttcagtccggaggggaacctggttgaacttcttgttgctgtggttactctgggtgcccccaggctccacattcccctgatgttgccctgtactcagggttgcagagaagctgtaatgttccccttcggtccccagccatcctgagtgcagcgccacccccatgggtggggtctccccatacctctgttcttcgcctctcactgggtaccgctgggccccagcaggagcacatgagtactccccactgtgcagcaccctgcctctcctggaatgccttggttgccctgggaagtcwtctcttggatgggttccaggaagcatcctgagtgtggagtttgtcggcttttactcactgtcagcccaagtgaccctaccttctggatagaagcacccccgcccccgcctgtcacctcatctgatgttgaaatgatgctcatagaaatgtgtttttctctctaaaatgccgtgtttaggccggcgcagtggctcacgcytgtcatcccacacgcctgtcatcccacatgcctgtcatcccacacgcctgtcatcccacacgcctgtcatcccagcaccttgggaggccgaggcgggtggatcacccgaggtcaggagttcaagaacagcctggccaacatggtgaaatcccatatctactaaaatacagaaattagccaggmgtggtggtgtgcacctgtaatctcagctacttgggaggctgaggcaggagaattgcttggacctgggaggcagtggttgcagtgagctgagtttgtgccactgcctccagcctgggcgacagagtaagactccatctccaaaaaaaaaaaaaagaaaccatatttaaccacagagtaagttttggaagccctttccgtttgcatgtacaggctgagaattgtgtagactctgggacatcacaggaaagatggtgcccaccgggggtgtaagatggtgcccgctgggggtgtgagtcggtccccgccgggggtgtgagtcggtaccygccrgggttgtgagtcggccaatgctgatgacttgactagttgggattatcttcagactcttcctaagcgaagccgcttgcctcctggtggatcaaactagagagttactaatgtgtgtgtgtgtattttttttttwaatatcttttagaccctggaagctgtcctgaatttcaaatactctggaggcccgggccacactgaaggatattacaggaatctctccctggggctgcatgtagaagtcgagccgtctgtatttttcacccgagtcarcaccctcccagcaaccaggtaaatgtcttcctgccgcacagccgtcttgttctagagtctcaacagcactacgttcagaatcctgacctcagtgtgtttttgtcatgcatcccgtcagatccgtgccatggggccaagttgctgagcctctctgggatgtaggtttttctttaggaaaccaggtgttacatgagaactgcctctcargtggtcgtaagtgaatgggctttacatatcacgccgtgctgtaatcataacgctgatgattgcagcattcctacgtgtggttctcactgtgcacacacatttcccgcccagcctggcctggctgcattctggcttacctctcctgttagcaggggctcagtggatagcacatgtcttagggactcctggacaagtccagcatctcttctgcatcattcctggcatccccataagatgggcactttgtggagctcccagccatcttggcatcaggtcatttctgcccaggaggcccttcgcatacaaaggctttctctcctgcctactttccagacctaatcttccttcagggagaaagaaawtggacagtttgtacacttgaaacccagaggtggcaagagatactcagggtattcttttctgaggtgggagaatgatatttctcatccagaactttcccctctggtgatgttggagtagtggaatctagaagctggaggtgaatgaagctcctgccagctggggaccctctgtggctcccattcctccgtagtgccagcagccttcgggaagcaggtgctcttcacctccgagctcgtcctggtgttcgtgtccggctaggtcttgcctatctgagtagggtgggctggatgggtattatttaaatgcttacctgtctatcctcgaagggggcggtggggggatcccgtgcagcccctcctcctccagtgggccctgtgtgctgcagcgtgagacagcatgttgttgtccatgttaatgttggcataaaatcccttgaaaatgatacagctttaaataataagtgtggttttagtttataggaaagacttgtttttcttcccagccattggagaatgccttcagcaagaattaatggtttagctgggccttttagcatcacatttcatcatctgtcaccttttcagtcctcagagtaagagcctttcctgccaagacccgcctctgttttgaatttgtgtaaagcattaaagcacttgcccctggggaagcttggccaggatggctgcggatgttagagtatttcaggccctttctgagcattacatttgctccatcatgaacctgttgtgtgtttctctctcatcccctcatctcctgctgccgttgcccacataaataattcttggaagcggcacaggttgtcatcagctgagttcgtctttttttccccattgatatctggttttcacgtcatgacccctgcagttctaaatgacagttgaagatgagaaaaatgccgctatgtggtttgctgcacacagaggtttggaagcgtaggtggtcagctgaagcgctatgtggatcctgcccccaagcctgtggcccttgctcccttttcttttggtttccgtggttcttttccctgctcttgggattgagatttgatgtcttctaattctccttttctgttattcctaagtctaagtggtccccaagccctgtggattggacttctgagatgtctcccaatgactctgcaatccactgcatgcctttgtcactgtagagagagttgccccattggtctctctgctgacagccttgtttcccgttgtcatcctttaattacacatgtgcctgtgccactgctctggcacatactttcccagtgctgatgagataaagtccagagtccctcctatgacatccatggtgcttaaggatctggcccagatcttccccttcagtccctttgccccagtcccatacttcgtgtaaagggcgctttgctcctcgccattgctgggatatgtgcaggtggcttacaccagtgcgcttctgcacacacctttttctaacactgttctctctcttaaatgaagatgctttattcaaccttttggaaaatacctgtttgaccttgacccatgttaccatttttgtaaaatttttctgagtgtgacttggcagagtggattggcctttctgtgggtcccttaacattacatgtacttctgataatgcacttaccagagtgtattggaaatagtttcatttgttccttaagccgacacttccaaagtttcaggtgctatataaagagatcactggtttaagagacaaatggagcacaattcctgttttttactaccctgatataagctcatccatcagaaataaaagcaaatggaaaccggaagctatataaaggagtgatgaacctaataaatagtaaataagtgaataaatagaaaagatttgtttccttcacttttaaaatttctttgaaagattaattractacttaaagaaataagaacatttaattctgtagtgtatagcacatatgcaaataaaatatgtaacaaaaaagtggcacaaagaatgggtgggaaaatagaaattcttgtgttatatgcaaattgttataatattttttgaagttaagatgtgatcagctaaagatacatgcaaactctggagcaatccacttaaggaatggatgataagccagaagacataaaatggaatatttaaaaatacttaaccccaaaaaaggggaagaggtatcaagaaagaaggagaaaagaacaaggaacgtacagtcaaataggaaacagatggcaatgtgkaggactcaaatctactgtatccagagttacactaaacgtaaatagatttaatactacctttaaaaatggagattgtcaaactatacaagaaagtaagatgccaactaccttttttataagaaattgacattaactatgcataatgtaaaaacaaaaagatgaaggaaaagacataaagacaattatttagttggtttgggtatcttaatatcaaacggttagactttcaagagaaaaagaggacaatttttaatgacagcaaaatcaagtcatcaaaagtacataatgatcaaatgaaactgtttacaaatataacttcatagtaaaactgacatactgaagggagaaattgataaccccaccatggtagttgaaaacgtcaacatttatctctcagtatttggtaaaataagtagacaaaaaaattagtaacaatatagaaaacttggacaattcttttaatcagctccacctactttgtatgtgtacatgtgtatttttttttttgagatagaatctcactccattgtccaggtgggaatgcactggcaccatcatagctcactgtaacctcaaactcctgggctcaagtgattgtcctgccttgcctcccaagtagctaaaactacaggtgcagaggaccgcaactggtttattttttaaacttttggtagagatggggtctcactgtcttgcccaggctggtctcaaacccctggcctcaagcaatcctcctgcttcaacctccgaaagtgcctagttgttatttataatacagtaaatgtttgtattagaaatggtgaatggcttaaaatcagtgatattgcttctttattagataaggatagcaaaatgtacctagagtaagcagaagaaataatagagtggatawcagtgctatagagtatgaacaaataaattcataaagttggtgaaaccaacagttggttctctgaaaataktaacaataaaattaataaattgtaactagggtggtcagaaaaaaatgtggaaacacaaataactaataatgagaatgaaagaggtggcattactactaattccacagacattaaaaggataataagataayattattaaaaatcataaaacatacaaaacattaaaaaaaattagccgggtgtgatgggacatccctatagtcctagctactcaggaggctgaggcaggaggataccttgagtgacctacgatcgtgccactgcactccrgcctgggtggcagagaaggtgcctgtctcttaaaaagaagaaaaatgacggccaggcgtggtggctcacacctataatccyagccctttgggaggccaaggcaggcggatcacctgaggtcaggagtttgaaaccagcttgactaacatggcgaaacctcatctctactaaacatagaaaaattagctgggcacgtggtgcatgcctgtaattccagccactcggaaggctgaggcatgagaatcgcttgaacccatgaggcagagattgcagtgagccaagattgcaccactgcactccagcctaggtgacacagcgagattctgtctcaaaaaaaaaaaaaaaaaaaaaaaaaaaagacacaaattactaaaattgacacaggaaaaagaaatagaaaaaataaatagtcacacatcagttaaagattttgaattcttaattaaaatcttctcacaaagcaaactttaggcccagatggctctactctgaaatatatgaagctttttaaagaaagaaataatatcacctttacaaaaactttttcagaaaataaggaggaaatacttcccaacttccattttatgataccaacatcaccttgatgccaaacccagtcagagacattatgagaaaagaaaactgtagaccaataacctcatgtatatacatgtgaaatatgaaaacaaaaaatcaaatcaacttcagtgatatatgaaagsgacaaaacagcatgaacaattcaggttttactcagaagtatgaggttgttttaccattgaaagatcagtcattagaatttgtcatgttagcagaataaaggagaaaaatcatatgattatatcagttgataaagaaacattatttgacaaaagtcaatgcttaattatgccagaaacactcagtacactaggattagaagagaacttcctcagtctgacaaaggccatctacaagaaaccccacagttaatgttatacttagaggtgaaagtctgatgactttttctctaagaatracaaggcacgtttccaccgtattcattatttttctggcagtcctaatcagagcaataagggaagaaaataaataagggtattaaaataggaaatgaaataaaattattattattcacatgtctttctttgtatggtacatatgattatgtacataaatattgtgagaaatctgccacaccaaagaaattagtagaaataataagtcaatttagcaagattgcwggatgccactcaatatttaaaaatcacttatgtggccaggcacggtggctcacgcctgtaatcccagcactttgggaggctgaggtgggtggatcacaaggtcaggagatcgagaccatcctggctaacacggtgaaaccccatctctactaaaaatacaaaaacaaaattagccgggcgtggtggtgggcacctgtagtcccagccacttgggaagctgaggcaggagaatggcgtgaacctgggaggtggagcttgcagtgagccaagatcacaccactgcactccagcctgggtgacagagtgagactccgtctcaaaaaaaaaaaaaaaaatcacttatgtttctatataccagcaactaacaatttgaaaatgaaatgtaaaaaataatatatgcagtagaatcaaaataataaaacacttaggaaaacatttctacaaatcttatccctacctagaaaatgacaaaacatgataaagagaaatgaaagatgacttaaataattagagaggtggctgggcacggtggttcatgcctataatcccagcacttcgagaggccgaggcaggtggatcacaaggtcaggagttcaagaccagcctggccagtatggtgaaacccactctctgctaaaaaatacaaaaattaactgggtgtggtggtggatgcctgtagtcccagctacttgggaggctgaggcaggagaatcacctgaacccaggaggtggaagttgtagtcagccgagattataccactgcactccagcctgggcaacagarcgagactctgtatcaaaaaaaaaagtataccatgcttagtgattggaagaattagtttttcttaagatagtggttttccccgaactgattgtaagttgaatgcaattcggtcaaaatcctagcaggatttttgtttagtggaattataaaattattttgaaattgaacagacctagaatagacaaataacttgacaaaaaagaacaaagttggaggacttacactgtatgattttaagacaatgtaaagctatartaatcaagagagtatgttattggtgtaaagacagaaaaagagatcaatggaccataatagatagtccagaaatagttccaattgtatctcatcagttgatttttaacaagatgcaaaactaatttcatggggaaagaaaagtctttttaataaaagatgctggaacaactggacgtctgtgtgggggaataaaaacaacccttcacccatacatcacatctgcccaagaattcactggagatgaattttaggcctaaaagtaaaacctttaactgcaagccttctcaaagaaaatgtagcacagtatcttcttgatttaggggcaaatattttcttagatggggccggaaactgctaaccataaaactaagacttgataggacaaatttcatcaaaaytaaaaacttcagcttattaaaaggcaaattacattctaagataaaaawattgtaacatatttatgtaacaaacgtcttgtatcttattgatgaagttgtacaattctaaaaaggtgataaatagaaaatttgaacagatatttctcaaatgacctgttatctccgaaaagtgttcaacattattaatcattagagaaatgcgaattaaaaccccaattagatactactatatacccactagaatggctaaaattaaaaaacagaacaccaaatgttagggagaatgtgaaacagccagaattcacataaactgcttctgggagtataaactggtgcagccactttagaaaatcagtcaggcagttcctcatgaattaaaacatattcctccccagtgatccagcaatttcattcctagatattttctcaagagaaatataagtccacatccacaaaaagactcctgcaagtattttcgtaacagctttattcctaataactccaaactggaaacaaccccaaatgcccatyaacaggtaaatgaataaacaatgtggggtgctgccacacaatggaatactcctcagaaatagaaactgctggtacatgcaacaaaatggggtcagcacaaagttacgatgctggtcaaaggaatcgagtcataaaagaaacatactgtgtgactccatgtgtacacctttctagaacaggaaaacctgttttatgatgaaagaaatctaaccagtggttgactctgggttaaggtaacgtggggcaggaattgactgggaagggatttgggttagcaactgtctggtttgcctgggattttctagattttagctctgaaattccctcaccctagcaaagtcctcagtacaaaccaggacagttggtcgccctaaagggaagagaaaatatctttctgacttgatgaaatgttgcatatattgataggggtatgggttatagggttgtagacaaataatcagactagtatacacttcagatttgtgtatttcgttgtatgtaaattttaaccttgatttaacatttcatgtacgaaaatatatatacgttggagagagcacctaatttttactggggagakctggaaaggcatcacaaaaaaatgaaacgttgtactaattcttgaggaaagaaggatttcaccacccacagtgggaggaacaggagaggtgttaatgttgggtttctggttcttccactggattttgagctctgtggaacatgcagccaggtggtcaacctctgcctcccaggacctagcgccttgccccacggtgggcagccrgsgaaggygtaggaatgacaggatgtaaaataccaaggctctattcattcaggtgtttcttttgtataaaagggatgaccccgtttatatatatatttaagttctatttttcttttcttttgctcgggctggagtgcagtggcacgacctcagctcgctgcagcctctgcctcccaggttcaagtgattctcctgcctcagcctcccgagtagctgggactacaggcatgagccaccgtgcctggcttattttttttttatttttattgtttttcatttttagtagagacagggtttcaccaagttgcccaggctggactcttaactcctgacctcaagtgatccacccacctcggcctcccaaagtgctaaattctatctttcttaatagggacctgtgtaaattgcaaggcctggaacacaacagaattagtatgcattttcggctcttggcctttgcagtttattgaagttacgtgatgcatggtgtattgtgaattcattacttttcattttgctcacaggtgaagatttgtactctggcatcacgccatgttagagttatatgcatccccagagatggcccatttcaacacatttgcatcacaaacgaggcccggagagttttctgatttgctcaggttcacacagcttgcaggtgacagggctggcatctagatgtcctggcttccaggccactgcagcatggacaatgaagatggccacatacatgccagtgcgagcctacacagagattcagactaattttggtgcaaatagaagccaaatatatgtcaaaggactactttactgctggcataacatgaatcatatactctattgtgaaaccaaaatacaaatggatgtgagttatttactcctggggtagtctgtttgtctgctcctctcactgatactgataatttctgcagtttttcttattggtattttttaaaatgatggttttctatatgagagcatgggaaggaagagcagtcctatttattcacggcctgctagactccagggcatgccctgggtgttgcgtcgggcatcccatgcacactcccgagaaccctctgacattggcattcctatctgggggtgttacattcctcaccttgtcctgtgcgttcgtgagtggaagggaggcaatctgaactgtggccttggggacacccagaccaaagcttgctgccacacctgctctgacctgggagcctggagtcctggactctggtgtctattctgccgctggacagaccctttgtaggagccgtatctttggaggagtgtgtttctctgccgcagcttggtctctgcactccctagggggagagtgagcctcttagctctgctcacctcaccagggcgataagagaatccatttaaataacagagggggcagttttttctaaatgccaaagcccaatatagataggtagaattctcattattattattattatttttactgttctcccaccagggagtacataggtctcagttgacttttatttaaaagatcaaattacctttgagatttgctttttacacagagctgcctggtaaccttgttagggacgagatggaaatggattaggctggaccatccctgtctgagtgccgagcctccctctctcctgaggagcaatttctttctagcctgttacaataaacgatccactcttagacatttctactctgatctatgtggaaaatacactcctctgagcggggcgtggggtgtaatcgttacgacattattgatagacaccctgccaccgaggccttcgtcactttccctgtgtggtggggacagctcacccatggaaggggcactgtggagttttatcgtggtagatctttttccagttgctatgtttacttagtagattggttttaaatttaacaagaatttagaattgcagtgcacaccaggagtgagagccccatgcgcctgtatctgatttccagtgttgattctcctgctcattggcgctgtggttttgagcgagccattcacatttctctcagcatcatttttccttcatcttgaaaaggagataacactgactgtgcagggttgtaaaactgtgtgttataaagtgtctgaaaaattattaacagtgcctgacacaaggcagataattgaaaattggtggttgtcattttccttgtgtgtatgcacttctgttgtgtgtcaggttctagggacaaagggatgagccagtcttgtaaacacaggcggctttgcagcagctggctccagcactcccgaaggacatcactgacctcagcrgatcctgaagcctttgttggcctccctttcacctatggtcagctctctgaaggcagccactctgtgactctttgtttgggcagcagcaggtgaagtaagtagtcagtggtcaaccgaagttttgaagaaacgctgcagtgtgaacgatgtgtggcaggagctttggagacagaacaactagatttgcgttgaccagccggaggacctacagtgggatttgagttgtttgtttagacgactggggagtacagtttcctttccttagggtcaggagtggcttgacaggaagtgcagtgctggagaagggagaagtttggagccccagtacagacaggttcctggaggagtgcacggagaggcggggtcacggtccgagtggaacccagctgctgygactgtgatgggcttgatgggcttgaactccatctggcccttacctgccgagcaggtacccaagagcagcagcatcttttcacaaaagcattaattatccattacacttagggtcccattgaccaggctgttagcgttcttcctgcctctgtgtggcccgstcagccctgtgcatgtaggtgttgaggcgctgtcgtctcagtgtgtgtaaaggaactggatctggatggttattgagcacacactaagtgccagttgccttgctacacaccctgctctccctgtaacccctttgcttccttaggaagcattttccaggtgttgccacttttcagaacttacggtgaccctctgcaaggtgaggtagtccctcaatccccttcagaggctcatgggagacttcagcgcctgtccttgtacatttgacatgctagggagtgtgggctagagaacgtgttgccccgtgttgcaggtgagggactcaggcagagtgagaagaaagaacgagcttggtgttgttcgtggctgcatcaggaccctagtcactggggggcctcggcctgaccagcaggatgcaggagggccgagaggtggaggacctgggttttggaggctgactgcctcatgttggaatcccagctctgccatgttgggcaagttacagaatctttataaagcgggcctccttatcgggctgtcgggaggattccagtaagaaactgtgtgcctgatgcgtggcaagcctgcagcgcatggggtccacgcccttcttccctctcattctcagtctttacaggtatgttacaggcagtgtcttttctgtgtctccccttttaagtaagtctctcagatgactggcacgtgatagggacatagtaaataactgtggcagggtaccttgattttgtggagggaagaaaggatttgaaattagaggggatggaactctacttcctgccttgaacaggcctcttagatactctgagccccgcattgccttatctataaatagtaggatgattatataaaataatacgttttttccccccacttctttcttctaaaagctagtcattcaaacttgttatacaaaatgtatgcctggccgggcgcggtggctcacgcctgcagtcccagcactttgggaggccaaggcgggcagatcatgaggtcaagagatcaagatcatcctggtcaacatagtgaaaccccatctctactaaaaatgcaaaaattgtctggcgcagtggctcatgcctgtaatcctagcactttgggaggctgaggcaggaggatcacctgaggtcaggagtttgagaccagcctggccaacatggtgaaaccctgtctctacaaaaaatacaaaaattagctgggtgagatggcaggcacctgtaatcccagctactcaggaggctgaggcaggagaatcacttaaacccaggaggcagaggttgcagtgagccgagatcgtgccattgcactccagcctgggctacagagcaagactccgtcaaaaaaaaaaaaaaaaaaaaaaaaaaattagctgggtgtggtggcatgcacctgtagtcccagctacttgggaggctgaggtaggagaatcacttgaacccgggaggcagaggttgcagtgagccgagattgtaccactgcactccagcctggtgacggagtgagactccgtctcaaaaaaaaaaaaaaaaaaaaagtatgccttctggaagcatgttaagtagagacgagtatctgttgcgctttcatgatatcatcgacatggacccccattatcacaagtttgacacgaatttttccaaatttttaattcatctaaatatatataatattgttactattatttttatttttaaatttttcgagactgacccttgctctgttgcccaggctggagtgcagtggtacaatcttggctcactgcaacctctgcctcctgggttcaagtgattctcctgcctcagtctcccatgtagctgggattacaggcgcctgcctcaccacgcccagctaatttttgtatttttagtagagatggggtttcaccttgttggccaggccggtcttgaactcctgacctcaggggaccctcccttctcggcctcccaaagtgmcagtattayaggcttgagccaccatgccctgcctgttaccattatttttaaaatagaagtaaaattttaatcttttgcaaattaaaaaaatacgatacatgttgatcatctttccacatcagtaaatctaggtctcctcatttgtttacagatcatgtgcccttctgtccgatagataccccataatgtgttaaatgcttctctgttgagtgaggtttgttttctatgttctactgtttcaagcagttttgcattggacattcttgtatataaactttgtgcatacgtgggtggtttttgtaatataaattctaaaaatttagttttaatatggaatcttcctccataatttaccctcctgagcatgtgagactgttcgtttctccctatcatagacatcattgaatatctcattcttttcatgaaggtttgcagtttgatggatgtgaaatatctcactgtgtataattttaatttccttagttttgagtaaggtaaaccatctttatgtttactgaacatttgcatttcttctgtgtattctcttatatgtaatcttggcctcttcaaaaatttgtattaatctttttccattcatcttcaggaagttttgtgtgccgtatattttaaccttatctgaatttgctatctgcattttactacaaattattttggtcaccttttgcgaacatttttagtaaaattattttgttcttattggcttcattcgggcttcagtaaaaaaaacttaccctacttaagattagacatgtgttctccttgatttcctgctaatatatttgtaattttacattgagattattcatccatctttcatatgttttttgtagatggtgtgatattgggaactaattttttaaattgcaaaaatctaagattttacaaaatctaaaattgaaagtattccacaaatttagttgttaaaactgttaaaaattaaatttcgatttgttattcatggtataaataaataatgaaataagacttacaaaaagtcataagtaatttctagattttggtctgtcattttaaattgttcatcagaaattcttggtatagagtacagtgaagtttgcatcaatggacctggttccccgcagcctcaccagcatagcgttcatcttccctccctctctccctccttggaactaatactccttgcaccctattttctgcgaagcactgtcctaggcactgaagacagcaatgagtaaagttgagttcatgctctcaaagagcttatatttgaatggagaaggataggcgagaagcataaatgtagcaggttgtgtagacagcaaacatcagcatagcaggggggacgtgctatgaaaagctggagagctgctttcagagaatgtgctgttgcgccacgggcgggagtggatgtcagtcctgccgcagtaattctgggacaggagtaggtcaaggtggaaagaatggtcaggttctggatatcctcagaacaaacattaaataggctaagccttgctatttcacaggaggtgtggtggctccaaggcctttgtcctgagaatctgtggaaatggggacgtcgtgtgtgagaaggggaagatggtagggggacaggttgtacaaatctgttgctaaattaataagtacaaagtataaataaatgtaaaatatttttcactattttttatttagatcatttaaatcatatacatgattggttttcctgatccttgctgactgtacttgttaaaatgagcatagtaagctgggccagtgctcatttgtcctgtgatgtcttgacaatatcagtctgctgttataacaagagcaccatatttgaaccacagaagtgatgttaaatgttggttgacctagtgtacaaatgggggagtctatggatgttcttctgaagtatcaaggacttaagactttccttttttttcatgataagtacatttctacagggcaaaaatggtccaattccattatgcttctaaagcctggaaggagctacaggaccgtagacctctttttcccttttcccgtccttagatgactaaaaatagaaacagtttttagattctcttggtttgattcagacccatgtcatttttttcagtttattttgaaacaatgatagattcacaagaaattgcaaaagaaatagatgtatggggaaattctatgcaccctatacccagcctttcctactgggatataaactcttcaggtctgtggctgggatatttagaaaataaatattgaaaggaattatcttaaacgccacatkaagactcctttgtgatattttaaaagtctgatcaactttccaattttctaaaaaaaccattctgtatctataatgaggcatcggatgtagacgaggtctgggaggccaggaggtggcaggtggtcacaacagccgcaggtgagggcggagtttactctcgacccttgtgccctgtgcctgctgtttgtccagcgcatgcgcagcrtcaagccaggctgggtctgccaagcaagctgtcgccctgcttcctctttgacggtgctgttatcctctggacgctgccatcagtggctgctttacctctcagaaatcctcagaaagaatattccagggcaaggtaaggggctcccctcttcgttgtggaagttgcagagaaaacagcccagtcrgcgaatccttcgtggtggttgatgagagggatagggctgtgctttgagaagctccccaaggaagaccgaagaagagatgctgcgagatctgcactgagacctgcttttgtgagaaaaggaggctggagaacaaactggaaccagtgtcacaggctccacgcagcaccctgccctgaaattgccatcacagtcaattcatagaccctcttgttggaagggaacttaacaattcaatgtatctgcttcatcccatcccttacctattgtcttgtgtgccctgagatgatgaacacacattttgttgccattcctattattaatatattatagctctgtggagggcaggagctggcacccagccttcacacggcaggagcaggttgacattctatctggactgacaccgactccataactagtgctcccgagttccatgtgtcatccacttgttatccaagcaactgcactgtctcctagcgaatgatctcacagtattctgtgtctgctcaccggtctgtcttgagaggacccattttatgttttactgatgcatattactattaaaagcaagaattttacgtgatctatattttattttagattggtatattactaaatattatatgttaaaattcattttaaaataataacagatttaaagattttgtattgataagcactgtatacttttaaatacatttcaaagcctgatttataaacatcaattaaaaaaaagtataccatgcttggtttggagattgaatgtattttgaaaggtagattgtgcaacatcatcaattagtcagagtttcttttcaaacttatgtttggaattcttgcattttgcatttttaaagttctcttcgtttctttgtttaatcattgtagagtttaatttccaaatggtgatgcatgaaacatgatttcaggttgttatttgcaagtacttttctacaaataatttcttgtgaatttggattgtcttaattcccagaaaacaaaaagcaaaattagacataatcatcattatatgttatattttaaacgttgtattttgaggccttacaaatgtcttgatgtgctgcaaatggattttgattagatgaatgcaactcagagacctggttaccgtcacccggaggcacaattgcagagttactgttattgcccctgattacgtgcgttcttcatggctctcctctttaaccagtgatccctcgtgggcacaaattagacagtgtaacaaagtttcaactgtttgttcaacaactatggcactgcgtgtgggtcagttgagagatgaagcattgctgtgtgcgccttgagtgtgtttggtggatctcttcctccaattcctgggcgcccctgcttcctgtacactcaggatctcaaatggccttcttctttttaaacagctttattgaaatataatttacatgtcacataagtcgcccacttaaactgtataattcaacgttttagtatattcagagttgtttagccgtcacaacaatctgattttagaacttttcatcctcccagaagaaaccctgtacccatcgctgccattctctattcccctacttccctcccgcaccctaggcaaccactaatctaccactaatctacyttctgtctctctagatttgcttactctagatatttcatataaatggaaacaagtgactaacctctttcacttggtgtgttgttttcaagattcaaccacaattatgtatgttatttctttttattgctgaataattttctgttgaatggatataattttgttcattcattagttgatggacatttgggttgattgcacttttctgctattgtgaataatgctattatgaacattcatgtttaattttctgtgtggatgcatgttttcatttctcttgggtacaaacctaggagtggaattgctggatcatatggtaactctatgtttaaatagtttaaggagctgctggattgttttccaaagtggttgcaccattttacattcccatagtatatgagtatctgatttctgcacattcttgccaatatttgttattgtatctatctttttgattccagccattccaaattgtttctcttaagggaacatttaaaaaattatatttttaaagtttattaattaaaaaattagaaacagttatccttactgtcttcaataatgtaaagcttcagagacccttcacaaagactgggttgcttttcagttgttgatggggaaatgccaccacgttcccatctgccactaaacctgttctttttacttgaatagccatgtgttgactcaggcttgtcacctttgtcccctaggacaagcctcctaatttatttcttgaatagttgtgacaacttttcacagycattttgccttcaatttcttccttcaattatttctgtcagtagattccaaagtattctaaaagacatacatgacattttccttcctcctcctcctcctcctccttttttttttttttttagacagggtcttaccgtcacccagactggagtacaatggtgtgatcatggctcactgcagcctcaacctcctgggctgaagagattctcctgcctcagcctcccaagtagctggaacaacaggcgtgcaccaccatggctggctaagacctttccccctattttcttaatgtcttttagtgagtcccatcatctgtaggtcaagttccagttctagagcttggtacccaagacttcccataatctgacccagcccttctcccttgtcttcccaaaacccacgtttcctcactcctgtgaggaaggtcctggaagttycccccartaagcmgtgctgattgagcttgagacctttgcaaacactgttcacagtgactagagagccctctccctagtagacctgctcgtttacccccaaaayttcaccaggctgccgcttagaattatactcagtgcctttgtgagtgcaggagtcacttcctttcggaaccttccctgactggtgcccacgctgctgtgcttcatgtgctggtgctgtgtgctgcgttccttccccatagagatttcagcaccttcctactctgcaggttcagcttgcacagtgaagcccaaacccagagaagtcagagtccctggtgtcactgctagaggttttaactcattgagwcttatctagagctgagggtttggtttttggtggttggtgtgctatgtttcagaaaccctgatctggtagataggtagtcattcatagtcctccgtgagatcaggaagctccatagcagtgtggcagaggtaagcgtgaggttacatcagcagaaaaccctctgattctttgttctttgttttctctggacttcagattgaattaggttccctggctttcttaaaatgtgaaaaagctctccagtctcatattgactacccattctggaaagaagactgattaagaagataggcaggcttacagaattttaaaagaccacatgaatttgaccaaaggtgtgggtggccatcactacctgttttagttttatgctaattcactttagtacactcctgggaatgagcaaacattggtgtctagaccctgggaggccttggggatatctgccagacttggggaaaagagagtctcacttgatttctagtcatggcaccatggtttttagacatgctggaccttggcgggtactcatttttagctgagtcgatattgagtcattggctggtaggttttgcagctccactgacagcaaccaagctaataatagccccaccccccatgtttatagtggtattcttcttgtgattttacaaagcactttcacttactttttttcactggagcctcctaataattccatagcataggcgttgttatccccattggaggactggggaaactgacagtcagagaaattaaatgacttgcttatgatgttatagccattaagcaacaagaccagtattggagtaaacttaatgcactgtggtccttcaaactcatcgtgatgtttgtttttttaattgcattgatttaaatgttttttaaattaacatagagtaaaatgaacttttttggtgcacgattttttgagttctaactttaatgagcaacacagatagcttggtgtatccatcacagtcaggataaagaacagttccattacccgcaacacttcacacactgccacttagaatcatgctctgcatctccccgsccccaccgttgtggcaacactgatctattctccatctctatagtctggtttttccagaatgtcttataaatggaataatactgtgtgttcctttcttggagtggcttctttgattctgcattctgtgatctgtctgtgtcactgagtctgtcaacagtttgatcctttttatttctgagttgctttctgttgtacaggtatgtcacagcctgtggatccattcactgtttraaggacatttaggctgttaccagctttttgtgattatgaatagagctgctgtaaatactcatgtagagtgattcttgtgaatttaagttttcaattctctagtttaatacctaagactgggattgctggattatatgatgtatttttcactattcaactttgtaagaaactgccaagctgttttccagagtggtagtaccattttccatctctactagcagtggataagtgctctgtttcctcatcagcatgtggtattrtcagttttcaaaagattttctacccattttaataggcatatagtgatatcttcctgtggttttaatttgcactttttttttttttttttttttgtgacagggtctcactctgtcacccaggctggagtacagtggtgcgatctcatcttactgcaacctgtgcctcccaggttcaagcgattctcctgccttagcctcctgagtagctgggactacaggcgcacggcaccacatgcagttaattttttgtatttttagcagagacgaggttttggtttttgttgttcacaaacatgttcaccatgttggccaggctggtctcaaactcctgacctcaggtgatmcacctgcctcagcctcccaaagtgctgggattataagcatgagccaccgcacccggcctaatttgtgctttcttagtgatgaatgacattgatcctttcttcatgtgcttatttgttgtctttctggctttttggtaaagtacctttttaagtctttttgcccaatgttttattaggttattcgttttcttgatgttgagtttcaaaagtttttaaaatatattatagatacaagtcctttatctggtatgtaatttgtaaatgttttcttcaattccgtaactttttcattcatttaacagtgtctttcacagagagatatttttaattttaataaatctaattttccttttttggatcctacttttggttgtgcttttttttcttttatgttttcttgtaaaattgtacagttttgttttgcatttacctgtgtgttttgagtaacttttgtataaattgtgaagtttaaatttcttttcctttttttttttttttttttttgataagtggaatccagttgtcccaacactatttgttgaatggattatctcttctccgttgaattctcttcttagtcaaaaataaaatgactgtatctgtgtgtaattctatttctggacactttattctgctccagagaactatgtggatattctttcaccagtacaacgctgtcctgattagtgtaccttgtagtaagtccttactgctatattagtgtaccctagaataagtctttactactatgttagtgtaccctacagtaaatcttttactactaaaattgggtcgaatcctctaaaactctgagtcctcagagtttttcttttatttttaattgttctgtctattgtttctttgtatttccatataaatcttcagataagattgtctacatctacagtgtcattctaggattttgattggaattttgttaaatctatgaattaacttgggaaaaatggataagtatattgcaccttccaatctgagcactgcatatacttctgtttatgtaggtctttgattttattcatcagcattctgtacttcttagcgtccatattttttaaagattaaggggtttttttctattgatgggtgagtgcttttttttttaaatcatgaatgaaatttgagttttgtcagatgctttttttggtatcaaaaaatttgttgagtattattggtatgaagggtatttgtggtcgttttttcttccgtctttgtctggttttggtattagataatgctgacctcrtaaaatgttctgagaagtgtttcttctgctattttgtatagaattatttctttttgaaatgcttggtagaatgcataagcaaaccatctgggcatagagatttctttttcagaatgatttttaaaacaatatgtttaatttatttaattgatttaggacttttcaggctacctatttaagttttcatttctctaggataaatacctaggactgggattactggattatatgatgtgtttttcactattcaactttgtaagaaactgccaagctgttttccagagtggtagtaccattttccatcactactagcagtggataagtgctttcttggatggatttttgtagtttgtgactttcaagaaactggtccatttcatctgagttgtcacatttatgtgaggagagttgtttgtagtatttccttattgtccttctaatgtctgtggctgaagtggtattccctcatttatttatgatactggtcatttgtgttctctctcctttttcctttgtaattgtggctagaggtttatcaattacatcgatctttttaaaaatcagttttttagtttactgatatttttctatttgtctgctttcattttaattcatttctgccctttattatctccttcttatgcttcctttaagcatttgttctttgtccggtttctttttattattattattattattatactttaagttctagagtacatgtgcacaatgtgcaggtttgttacataggtatatatgtgccatgttggtttgctgcacccatcaactcgtcatttacattaggtatttctcctaatgctatccccgcagcccctcacccccctggtgtgcgtgacaggccctggtgtgtgatgttctccaccctgtgtccatgtgttctcattgttcaactcccacctatgagtgagaacatgtggtatttggttttctgtccttgcaatagtttgcttagaatgatggtttccagcttcatccatgtccccgaaaaggacataaactcatccttttttatggctgcatagtattccatggtatatatgtgccacattttcttaatccagtctatcattgatggacatttgggttgatttcaagtctttgctattgtgaatagtgctgcagtaaacatacgtgtgcatgtgtctttagagtagcatgatttataatcttttgggtatatacccagtaatgggatcgctggttcaaatggtatttccagttctagatccttgagggatcgccacactgtctttcacaatggttgaactaatttacgctcccaccaacagtgtaaaagcattcctatttctccacatcctctccagcatctattgtttcctgactttttaatgattgccattctaactggcatgagatggtatctcattgtggttttgatttgcatttctctgatgaccagtgatggtgagcatttttcatgtgtctgttggctgcataaatgtcttcttttgagaagtgtctgttcatatccttcacccactttttgatggggttgtttgtttttttcttgtaaatttgtttaagttctttgtagattctggatattagccctttgtcagataggtagattgcaaaaattttctcccaytctgtaggttgcctgttcactctgatggtagtttcttttgctgtgcagaagctctttagtttaattagatcccatttgtctattttggcttttgttgccattgcttttggtgttttagtcatgaagtctttgcccatgcctatgtcctgaatggyaatgcctaggttttcttctagggtttttatggtgttaggtcttacattgaagtctttaatccatcttgaattaatttttktatacagtgtaaggaagggatccagtttcagctttctatatatggctagccagttttcccagcaccacttattaaatagggaatccttttcccattgcttgtttttgtcaggtttgtcaaagatcaggtggttgtagatgtctggtgttatttctgaggcctctgttctgttccattggtctatatatctgttttggtaccagtaccatgtttttctcgtttcttaagatagaagataggcttattgatttgaagccgttctttcttatataatcacttaatgatatggatttttctctaagtactgctttagctccagtcacagaattttgatatatcatattttatttttgttcactccaaaatattttatttctcttggggcttcctctttgaacagtgggttgttttgaagtgcattgattaaatttccagatagttggagttattctagctttccttctaccattgatttctaggttaattctgttttggtcagagaagatactttgtatgctttatattttaaattagttcaggattttttctgtggcctagaatgtggtctaccttgttgaatgttgctgtgcacttgggaagtatgtatattctgctcttggtgggtggagtgttcactaattatcaatcastatgaagtggttggtggtgtttattacttttatgtctttattgatttcatgtctgtgttctatcaattactgagagaagagtgttgaagtctctaattgtgatttggttcattcatcctttcagttttttatttcatgtattttgaaactctatagttaggttcatacacattaataattattgtgtatttttggtgaattaatgcttttatcattatataatgtccctctttaggtgtctgatgttaatataacagcccagtattcttttgaatcgtgttttcttggcatgattcttttacttttaacatatctataccattatatttagagtggatttattatagatagcatatagttgagtgtttttttttgtttaaacgtattctgacaatctctgtctattaatgagactatttaagtcatttatatttaatgtaattcttggtatgtttgaactgaggtctaccattgtatttttggtttgttttttgtttattcactctgttgtttattgttccatttctccttttttatgttcttttaaactatttgatttttaaagcattgagcttttaactttatctctttgtagagctgtttcagtgttttctctagggagtataataagtgctcttagrttttcacagttgacttagaaataatattttatcacttggtggaatctcaaatataggcgcttttatctttcccctcctcatgtcttagttgtataatgtattaaatctgtatacattgtaaacccaatgttataattttagcttgtattcatcatatatcgttcattgttttttyttgttttgttttatttatttatttatttttttgagacggagtctcgctgtgttgcccagactggagtgcagtggtgtgatctaggctcactgcaagctctgcctcctggtttcacgccattctcctgcctcagcctcccaagtagctgggactacaggtgcccaccagcacgcccagctaattttgtttttgtatttttagtagagacggggtttcaccgtgttagccaggatggtctcgatctcctgaccttgtgatccacccgccttggcctcccaaagtgctgggattacaggcatgagccactgcgcccagtccattgtgtatcttttaagtaacttaataggaaattacatttaaccagatacttaccatttttgttactctttttgcttcgtgttcaagtttccctgtattattattcaccctttgtttaaaggactttctttcccagttcttttagaaaagttctactgatgactgagattcttaattttcctttatctgagaatgtctttacttttattcctgaaagatactttaatagatatggacttctgagttgacattcttttctttcagcattttaaaaatgattcactttctctgccctccgtggttttttatgaggattcttcagactttagaaaaatttgttgttttgtttcccctgtgtaggatgcattgtctccctgtgtaggatgcattgtctacctgtgtaggatgcattgtctccctgtgtaggatgcattgtctcccctgtgtgggatgcattgtctcccctgtgtaggatgcattgtctccctgtgtgggatgcattgtatcccctgtgtgggatgcattgtctcccctgtgtgggatgcattgtctcccctgtgtgggatgcattgtctctcctgtgtgggatgcattgtctccctgtgtgggatgcattgtctccctgtgtaggatgcattgtctccctgtgtaggatgcactgtctcccctgtgtaggatgcactgtctccctgtgtaggatgcattgtttcccctgtgtgggatgcattgtctccctgtgtaggatgcattgtctcccctgtgtaggatgcactgtctccctgtgtaggatgcattgtttcccctgtgtgggatgcattgtctccctgtgtaggatgcattgtctcccctgggtaggatgcattgttcccctgggtaggatgcgttgtctcttctgtgtaggatgcattgtctcccctgtgtagaatgcattgtctcccctgtgtggaatgcattgtctcccctgtgtgggatatattgtctcctctgtgtgggatgcattgttctcctgggtaggatgcattgtctcttctgtgtgggatgcattgtctccctgtgtaggatgcgttgtctgccctgtgtaggatgcgttgtctgccctgtgtaggatgtattttctcccctgggtaggatgcattgtcttctctgtgtagggtgcattgtctcccctgtgagggttgcattgtctcccctatgaaggatgcactgtctccctagtgtagaatgcattatctcttctgtgcaggatgcattgtctcctctgtgtagaattcattgtttccctgtgcaggatgtattgtttgctctggcagctttccagatggcttytgttctttagctttctgcagtttgattatgtttccaggcagggattaaaaaaaatagtttttgggtcaggcgtgatggctcacgcctgtaatcccagcactttgggaggcagaggtgggtggatcacctgaggtcaggcattcgagaccagcctggccaacgtggcaaaatcccgtgtctactaaaaataccataaaaaatgtttagcctggtgtggtggtgtgtgcctgtaatgccagctacttgggaggctgaggcaggagaatcgcttgaacctgggaggcagaggttgcaatgagccgagatcacgccattgcactccaacctgggtgacagagcgagactctgtctcaaaagcaaacaaacaaacaaaaaaatagcaacaacagcaaaaacaaaraactttttgggtttctgaatctgtttatgtcatttgccaattctttttgggggtgtggccattatttatttaaaaatggcatgttattttcttctttgtttcttagtctcctgtgacgtgatttttagaggtttcgttgtcccataagagtgttttttttttctgttttattttcccctgttgtttccattggataatctgttaatctatcttcacatttacttgtttaattccttactgatcccaaaaacacattgtatgatttttattttacagttgttagagttcccccaccacccccaacccatggtcttggaatgtgattggtggtaaatattgcatgtacacttgggtagtatgattattctgctgcttttgggtggaatgttctctgagtattagtgagatctgggtggtcaatggtaattttgtttatcttatattctttctgattttatgtctacttgtcctctcagttactaagataattcaccatgtggtgaatttttctttttttctttcctttctttttttttttttttttttttttttgcttaagtttttctggttcttttttatatcttctttttcgctgagattttccgtcttttcacttgtttcaagtatggtcagttcttggaatgcatttaaagtctctttctaataagacagtcatcttgaagttattgtctgttacttactttttcctcatgacttgatattttcctggttctgtgttgagttattttagatcgtattctggacatcttgactataatattgggaggcattgggatcttgtttgaatactgaggaaaatgttggtacttttttttttttttttttttttaatgcagagtaccttttgcaggctgtgctgcagttccagtttcaaagcatttgtggtgcttcttggatcagccgcatgtgggtgcccgtcggcattcttgcctggagatcagttatcaaagcccgtggtttgctcttgagggtctgattctgtcaagctcagctccctggtgagcttaggagttcatgcttgactttgtctgctctctgaatcaatctcctttctgaaatcttcccaaattactgggggctcttatccctatgtgcctgctacaaaggcaggatatgagcttccccctctgtgtgtctacatggaggactgactgtccagaggcacagagaaggaaatcagagtgatgcaaactggccccctggttttgggacctcagctctttgggtcagtgaggtggtttgtatcagggaggtgtgtgagcctgtcccgccaatactgctctgatgtcattatctcctgtggtttgctttgaggctgggctgggagaaaagggaagaaaaaagggaaaagactcagggattctcctactttctgtggcccttcatagtaccttttcccacttgttggaccaggaagagaggctgccctgggagctctgtctggctatacrcagggcacgcctctggagtccacgctgcctttcagttgaggccaggtggtactggagagagatgcagctcactgccagttcagaataacttcagtttctggctcctactgtgatccaccttctaacatttattttttgagtcttcatcttcagctcagtgcattctatgatttatagttgcattcagtgggagagacagggtagattgtgcttactccatcttttccagaattggaactcaccattttttttttttaacacaaaccaattcatgtcactcatctgcttaaaactctcaaaataccttcccattttgcttggaatgaaatatgagtatttccccatgacctttcctctgtttttactcctacaccactctctgcttgttctgttccttgatcacactgtgccttacgatttttgctttaactgctcattctctctggaaagctgtcctccaagaccatcacatgattgctttcttgttgttggattcctaactgaaacatcatttcttcagggaggcccttgtttaccatcagatctgaagtcattttaaaacatccgtgttaatgtcaagagactcacttaatttttaagaaatagttgtgtcatacatgtcttatgctctgcctcatatagtagcccacttttagactagctattgccgtggcaaccaaatttatgcaggtgtcacctgacagcaccttaccatagccgtcgtgagcatctcttgctttctggaatattctaactgccttctctgaggctgtaggtttgggtggctatgggtagtctctctgcacagtgcatggatgaagtgtgagagaactgacccctctgggggaaagcttgactagtgagggaaagagttgggagagcaattatttcctcttctgtgcctcaggcgcacagtgtgaagcrcartcctctcggctccacagaaggacgatgattgagccccagctgcccacagggccgccagctcagcgacrcacagcaacatgccctctggcatcaccttctcctctgctgccccactttgcctactctacatgcttcctggcatcccttccctaagcactagctctgtgcaaacccttttctcaggctctgctttctggggggatcccaggctaacacattagtctaaatgactttaaaagtaactttttataagacatttcaagtataagaaacataaataaatgtctaggaggtatcaatttgtctaccatacagacttgtccatttttaatatttcagtatattatatttgcttttatgtttttaatttaaagaaataaaaatatgctgttaaagctctgtatattcttccacactgtgtctcttgctctcttagcatgaatgactactcttaaatttgatatttatagataatatcgagtattttaaaacatattttaaaatttgatatacatatatattgtatatcttctgcaacttatttacccagcagttttaatatgagatttgtctgtggtggggcatatagttcttttaaattcattgtcacctctgcataggtttccatcatataactctaccattgtatgtctgtatctactctccagttgatgtgcacttagttaaaagcagttctttacttttataaaygatgttgcattgaamacttttgaatgtgcccytttaccaaactctgagttgatccaagataggcagctacaaatggaattgttcggtcaaactctttttctgtctgaaggagttgtaccaatttgtatccctaccagcagtgacaggaattcccgtatttcctgttgatctatagcttgaccaactcttggtactgggacgctttaaaaatattwccaataggttgggtgagaaataatactcttggggtttatttccatttctctaactactagttggattgagcttctgttcctgtttattggtcattgggtttcccctactttaaattattgattcttgtcctttgcttaattttctattgggtcatttttttcttactgatttataggagttctctataaattcagaattcaaatccttagtcaatttaatatgttgcaaatgcctgtgaaaagatatttgcaacgcattaaaaatgaagcttgtctttgctttggtttttgatgtttttcattgtaccaaaattcttaattttaatgcagccaaacrttttattcttttcccttatattttatatgtattgtaactcatttgagaagtctttcttttttccaaggtcatgaactgttcatctatattttgtctaaagatttttaaatattgtttttctatatttagctattcattctgtttggaatttatttttatatatgatgtgaggtagggatctaattttctgtgtacctgcatagtcatttttcccagcactattcagtgactcttgtcctaattaatcaatgccaccaatacaatcatctctccagtttccttatattcatgggtctgctttgtagctatcttttctttcactaatgtatttctctgtcactgccccaagtgcctctgtcttcatgattacagccttataacaattcctgacatctagtaggccagattccttccaaaaaacctcccacatcattgttttaacaaaacccttttgggatttttcttattgagttgcattgagtttatagaaatttggaaagagataatttctttaaaaatattaagtctttccatctttgaacataacgtgggttgagcatcccaaaacttgaaatgctccaaaattcaaaactttttgagcactgacgtgatgctcaaaggaaatgtttattggagtgttttgcatctccgagttttggatttgggatgctcacttggtgagtataatgcaggtattccaaaatctaaaaacaaaatttgaaacacatctggtccaagcatactcaacctgtacatctctacacttatttttcttctttaatattgttccatgaatttataattttttacataaatatcgtgcatatattttgttagatttatttctacctgtgttgtggactgtgttgctattataaatgtattttctcaaaaagtttgtcttgtaattgtttttagttgatgtgtatgactgggattgattgtatgtcttaatcttttattcaacaatctttttcagcttttttttataagtttataaaaaatgacagcaaattttattttttaaaacaaccccatcggtcctgcccttttccctcacaggagtataatagccatgaatgtagggatcttgtgtttctcattcagttcctcaggaggtattttttggatgaaatacttaataaaatctccaatttggggctgaakaaacagtgcccactcactgtatcagagtggttttattaatacgtaactgctctctttgctgaaaaagggcttatttttttcacctggcagcctggtctcccacactcaacctgactacagattcccaaaatagctgggctcctccatgctgccaggactttgttcccttgtgtcttctaagccaggcaaacgtgtctgtccccttcagagrctcgccttggtctcagctcttccaggaagctttcttggatttccccatacttcagacagatgtgtccagaaaaaaaaaaaaaacaaacccaaaaagcaaacaagaattaaggtaaaccatatgctcagagcatcagccttaaaaccaagcwtccaaagccatatggaaaggtacacagaataaatgacattatgatggcacaaaccactgctgcagtctgggaaaggaaacttattcacagataggaagccaagctccaccaatacatcatcatgtcaacaattagaaagaatagaaacactagatcagacgcccccamactcagacagtgagtcagaaaaaagaagagcaagaggacagaaatgcattgtgtattgatgctgctcattcctgtgccatttcgtaagcaccgtattctgtgagtgaaaacaaaatatatttgaaccttttattccaggcttttaaaaaatcacttcaattttcctcctctgataaatgttttacgagttcccttttctgatgaaagattttgctgtgattaaagatttcatgaagttatgacaacagaggaatagatcttcattctcggaagctcatttttctgtgagctgagtgaagaggcctcttgtaggcagctgtcagagctaatgaatgttttccaagcgccaaacctctggggaaggcagccccacccagaaaacccagactcaactgatgggagctgtcatctcaaggtgtgcggcaccctgttgacgctgtgctacatgatataaatggtgacatgtggccgggtgccgtggctcacccctgtaatcccaacactttgggaggcctaggcgggcagatcacctgaggtcaggagtttgagaccagcctggccatcatggtgaaaccctgtctctactaaaaatacaaaaattacctgggcatggtggcgggcacctgtaatcccagctactcaggaggctgaggcaggagaatctcttgaacccaggaggtggaggttgcagtgagccgagattgtgccactgcactccagcctggacgacaagagtgagactctgtcaaaaaaaaaaagaaaaagaaatggtgacatgttcctgctttctgcctgagagcaggtcacacgcccacgttctgaaaaattgatatttcacagatgccccgtggccttttgacaaagtcctacttgtgtgtgcatgtgtatgagagtgtatatgtgtgtgtgtgaacttctgggcctgtcactctaccccctgtacctcagttctgctctctggaaattgccgaggacatgtgtggctttggaatgaatagaggtccacatctattgggaaaagccgagggtttcgagctctgcatccagggcctcgggcatcacagcagcatggctgtcctctcctgagcctcygtctccagtgcagggggctccacggactacccccgaggctgttgtcatgaagtcacaggcgattgtccctttcctttgaccagactttcctttaacagccagcaaagccttgcctcccacttggagaaatacatttgagaattcaaatgccctttggaaggccatgttttgaagtcacactaggctgataataatgacccagwgcacagatctttttctctgtgttttctccccccatgaaaactgtttaccctgctcttccaagaagaatggcctctgctcagttgctgtcatctgtgtctgtcctgtcgtgggtgcagccatccactgagctcagcagacatttatcgatgacctgttacgtgctgactgtgatacttggtgtctgagataccgtatgagttttcggcaagcattcaactgtgacgttaacctatcagatggtgacggacacggacggcgcgtttggggctggacttttccactttgtacatggagctcacacggctagagagaggccggcagtgcagggctgccacggccacccaaagaagtgacggctctcaagcgcctccgaccctgctctgtcatccacagcctgtggtttttgtccctgatggttactgagcttctgagcatcctgtttgcttccagggagaaaggaaggggaatgaggaaggcggaaggctaaaagccttctcccaggacatcgcgtttgtatttgggaaggaaagtctctaggggactgtgccttactggctakaacttcaycacatggaccagcccttgcaaggaacaatgggaacttgagcattttacttgtcacctctggaggagaggaaacaaaagagtagaggcttcggagggtgatgagtagaccccgcagtgtctgccccagttcgagaggtgcccgcatgggagaagctcgtgctggatgtgcacrcacacacacacaagcaggacatgcgtcaccacgcttcagggcccagcgtggaacctggtagctgaagatgctggcttggacacagcatccttgaatggcactgtatgcctgtgtttctctgcagatgatcagactttagagtcaggtgttccagtcgtcagtgtatattgaggtttggagaattcgggttaccttcccaaggccacttggttggtaaaaggcatggctgagctgtgaacacatgtccccaggaccccgggcccaaggaggacctgatgaggacctgatgcctayacccactccttagagttcacactcgtgttcagaaccagtctccgtaatcctctgagcccaggagcacttggcatttcgatatactttgcccttcttaagtggtgggaagtctttggagaggagaaaaagggaaagtcattcctctttggctgtcagaggattctgaactttcttttttctttaacgcagtacccggcagtgtcacctgctcctggatgtcttcaactccaccgagcatgagctgaccgtcagcaccaggagcagcgaggcactcatcctgcacgccggygagtgccagcggtaagtgtcccatagaccctcgcgccgccgcaggccaccctctgccttcaccacgctgcttgggagggtgtggagataatccaccccaagtcctcagaggatgggcagtttgtctccctttcagagataccgtagtgactattcaagtttggtgggagaatctggagtcgttttaaattagagctaagtgcaaagtaggtaaagccggatggcgtctgaggaagtagcaacatgtgctttcagagcccacatttgaggacccagcagcatccgggcatctttgctgttaaattcttgagaaagtggtatctgggctgggtgtggtggctcacgcctgtaatcctaacactttggggaggccaaggcaggcagaccacctgagatcaggagttcaagaccagcctggccaacatggtgaaaccccgtctctactaaaaatacaaaaactacccgggcatggtggtgcatgcctgttatcccagctactcgggaggctgaggcaggagaatcgcttgaacccgggaagcagagggtgcagtgagccgagatcgatcgtaccaccgtactccagcctgggcgacagagcgagactccgcctcaaaaaaaaaaaaaaaaaaaaagaggtggtatctggaaatatttggcatcagtctgggaactgcatgtcagcatcaagaggaattaatgctacagaaagacaggcaaggctcaggccttcgggaggggagcacagtcacccaagcccagtctctgtagggcaaagagaggccgcactaccaattgctggccagggtcagcctcaggagacccctggcccggcrgaggtgagtgaggagctgatgcggaagtgagagctggtcaggagcgaggccagggcttgcccggaggcaggtggagctcagtgactccggggtgatgctgtccttccatggcggagcccctcagtggcccctgacccactctccactcaccctccctccataytaagaggctgtgcttccaagcccagcccggttctagggacacacacttacacatggaattctagagggaataatatttttatttttaattgctgaagacttcaaacatacagaaaatcacttagaaactggcatacccacatcctagattttgttttatttgccccagatctttctctctctctctctctctctgcctctttcatttgttttaaggaaataaaatgttttttaaaatagcaacattaacattatcaatcagtggtggaatgtaagtccaaaccgcgatgagacagcatgagacactcatcaggatggttaaagacagcaccaaatgttggtgagggtgtggagcaacaggaactctcatgccttgtgggtggggatataaaatagtgcagctgctttggaaaaaggtctggggctatcctgtaaaattaaacatacacttaccctttgcccagctatttcaaccctagttatttatttaaggataatatgaaacatatggtcacaagaagacctatacaacgttctagccagaaaatagaggccaggtgtccattacaggagaacggacaaacaaatggcggtgttttcttacaaacggaatggtgtggtactctgcaacaaaaacgaatgaattactcatacacagaacagcacttgcaactctcaggaacaggatgctgggtgaaaggagccttacccaaagtgcatatgccatgtggttccattgatacgaaatgctgtaggttgctgcaaaagtaattgcggcttttgccattacttttacaccaacctatagaacaagcagaaccaatttacgatggaaaaactcagaacattggttccttctggagagattggaacagggtttgatcaggaaagggcataaggtaattttctaggtgatggtcatgktgyatacatcagtagggttttgggttacacacatgtatctattcrtcaaaactcggcaactaatcacttgagatttgtacatttcatgatgtatcagctttatagcagaaggaaaaactaagccagtgttgagctctgttaatgatatgcacactggagggtttggggtcggggcatgatagctacaatagtctttgagttctataaaatatctgacagattaatagatgggcagatgaacacattaggtggtaatgcaaatatagtataatgttaacagtagcgtctcttaatgggcatatggggggtgttcagtgtaaatctttttcaccttatatttgaaattttttagaagaaattgttggcaaaaataaaagtaaaaatagctaagctcttcttttctgcccacctcatcccatcttcttttctctttccttcctctttaaggtaatttctttcttagaggtgatggtatcattccacatccatgttttactactttattgtatagacatatatccccacccaaacattattttgacagtttttttgttttttggttttttgtttttttgatacagaatctcgctctgtcacccaggctggagtgcagtggcacagtcctggctcactgcaacctccacctcctgggttcaagcgtttctcctgcctcagcctcctgagtagccaggattacagacacctgccaccacgcccggctaatttttgtatttttagtagagatgggatttcaccatgttggtcaggctggtcttggactcctgaccttgtgatccgcccgcctcggcctcccaaagtgctggaattacaggcaagagccactaggcctggccgagagtctttttttcaatggcataagtggttccatatcatatatgtccttttaaaactttaaaaatcagcgttattctttggagctaaatataaatctggttctttcatttgaactgctattaatatttcattgtgtaaatatgccactttattcatttccatgctaatgcactcactgtgaggtggcttccagggtattcatatttaatgtgattattgttaatgacacgcatgaatgtcaagccaggccctgcagccttgtagcaggtcctgtttgggctgctggaagctagagattcaatggcttgggggacatttatggcctgcctttgagaggtgccagaaaatcctccttcccaagatcccttggaaaggacttgtcacttgggtgtgggtatgcgcgtggggctggtgtatgcttctgtgtgtatgagccgtgagggctgtggctggatgctgcggcacctcaggttcctcaggatgaggacaggtgccttcagggagcatcgatgcatcctctggggtctacgcctttggcagtgctgggtccagtgctgctgcatagggaactgtcagccctcggactgctctttcttatctaaataacttgatgtagtccaagatcccagagaacataaatctggtcgtcttatgacactagtataaaacactttaaagaaattataaattgctaagcttgtcctgtatagtaagcttgactcattcttggcaatgtgaggctgatgacattaacaatcccagctgcaaataatcacaatttagtcttgtgcttcaggcttttttgttattaagtttttgcttaaattctcatttctgaatgcttctaactcgaatattcttttatttattcataaaatattcattcaataaatattgatacttcagcaatttgctgtgtggtaagcccygtgtcaggcttcaggcgtgctgagaagaataaataagggcccctcctcgctggggattggcaacacattgggacaagtgtctaacccagccagagcggctgcccttttctgcctgacaagggcatcttgctgtcccgggccgggtgggagcgttgggtgaactagaggtcatgaggttacgtccatctgggaagtcatcttaggcgcttcccctgctgtgcccactgctggggatacccatgaatccatgcaactctgccctgagccctagaatgcatgattcccytcccctccctttcccaaacctctctcagtgcctcaccggcctyctgtgggtcagatgcacactcggcctccgtggaggggttgtgcagagcagtgcaggtggaggaagtggaaatggctctaccttacttcgcaacgccggacagcaccttacagacctcagacctggtccctgtccttccaggctttgtgtcttgagtatccagttccttcccagagtcctgagccgaacctctctcctggctctcccgttcccctacgaggaggcacccctgccaccaccccccggccccccacccccaggctgtgctaaacctaaagaagcttcttttgcctgcgatctgccctctggagtggggagggcatgggctctgcctggaggtgtgggcagtagtggggctgagactccagcttcatcgctaccagcaggagcggaaggtggtgctctcactgctacctgggagggaggcaggtgcacagaacttttctctgcagatagcacagcctactcttaaaggaagagccagattcctggaattaacatggcttggatgctgccgtttgcagaactggcattcaaaggtggcctgcaatctgagagaccaaccccagttagataattgtggtgcctgccgcctctcctccctcctagtaggaaggggtgatctcatctcacccagtgcaagagctatggatagaaatgtgtccccaacagcacgaggaggagcaacatgcttcctgggggaagagaggatggaaatagtatttactgagcacttcccatatgaagtcacattcagtcctcataatattctcatgtgggaacagtgtcctcattttatagataagcaaaatgagtggctgatcaaagccactttgtggaaccccgtctgtctgacatccaggctctgccctgctgctccacacaccaaggggagacgatgctggagccaagcttgggatggtgtgagagaggccggggcgggggcaaaattctgtttatttcccactttctgctctgtgcagcctttggtaagttgggttcaagatcgtaaagtccagcttcacccagcagaagaaagggtgagatggagaagcaaactgggcctttgatatccagggtgttcatttgttaattcaccaagtatttcctgtgtatctccgaggtgccaggccctgctgggagtgaagctgctgagtacgtgtggtgttgcctgtgttttcactacacttatatttaggtgtggaagaaaagcacacaaacaggcaattgttatacagtgtgaggagaatgcagagcacataggaggggggcctaggactggggggccaaggaaggtggctaggagggcttcctggagaggtgatgagaatatggaaatgctgagttgctgcaacaaaataccatagactgggtggcttataaacaaccgaaaattatttctcatggttctggagactgcaggttcaagatcaagacgctgggcarattctggaggctgcaggttcaagatcaagacgctgggcagattctgtgggtggtgagggcccatttcctgcttcgtagttggaggcttctcactgtgtcctcacatggtgggaggggcaaagggtttttctcaagcttcatttaaaagaacactgatcctagtcatgtggattccatcttcatgagctgatcacctscctgaagccctgccctttaatataatcaccatggagggtaggatttcagcatgtagattttgtggggcataaacattcatttacagcacgacgtgacgagtgagcaggaggtggccagggccagtgtgccagggagagccgtgcaggcagggggagcagcatggtggaggggagtgtggtggggtggtaagtgtgaaagaggtgttcatagactgtgaatattagagtttttagaaattagcaatgccactcttatcatatttcttagcgagatcttgttagtctcatactttacaatggaatactgaagcgattggatgtagaaagtactttttcaccttcctaatctctcctttaaaaggtcctttggaaattagtgactcattcctcagcttgtgagtttctgtggcatgtgtgatacatcrgttctgtaattaaggaccattagttaactttgcttttgccagatgtgatttgtgatgcttggtgcctggtgagtctgtttcctgggccccaggccattggtcatgacattcggaaccctgtttccagtcgagcagctggagatctgtattaacttgtatttctaccccggggcagtgttgggaaagacaccactttcataggsagttctacagggagtgggctttgcactcatttttccctatgagtaaaagaggtcgagacccaccaggggcatgcagtcagttggagstggaactgggctgctgagcaccagccacctgttctccaccgcccgcctttctgtgggagttgcccatggttccctaggctgcgttcccagaatcggccttccctcctcgtccattttccatgcacaaccggaaacagtggatgtctctccttagtgaaaccgcatgaactttcttaggaaaatacagtgttggvagcagcagcagcaaatttactggaaaattaagatacgacaattgtgggtttttttgcctaattatcaaaccattgaaattaaatttcatgacaaccctcatgtatgcataaacctctttataatgtatgataatagatgttatctcattacatgctttaagatgcccggctctgtccccctcgctygctgcagggacaccgcatttagagggtgcagcggacctggcaccgaagcacccaaaygctgcggctgctggggagatggaccgccggcaggatctgagcggccagctctggctgtgtcttgatagagcatccacgtggatcatggcatggctctgctgcgagaggggcagggaagagccccacaggcaatggccaacctgggggctccacaacttctcctcgaggatgctttgagaaagtggtttctgggcaaccccatctcctgggggttatgtgggtgctgcactttcctgtttatcccaggtcagagcagcccccaactcaactatctggctactcctctcgcctgtctctttttgtttctggtttaattccttcaaacattccaaagaaccttgtgaatcatcaaagtgatgcttaaccgtgtggcgcccagtcttcttgcaggttgttattgaggcttatttatactgtgttggcattgctcatccctctgtgttccttctgcagtatgagttacagatgagtttttgcgtggattttctttgtacctcgtttttcaatctgaaaggaaatgaggagagtccctcagaaacataatttctagaaacaaggggaaagcatcctgatgtgccctcatcccttcagctgatgcrgggagatggagacccgaggtcagttagtgagcccgtggcagaggcctgatagagcctgggctctggactccctggccagagctgtctctgcaacccccactggccccactaatgagcagtttttacagttttcctgatacaaacccagatggctctgggatcaatagggacctcccagtgattaataggcagagggaaggaacgtttgcgttcagcctggagaagcaattggattcragaaattcaatgctggggaagatgcagtggtttgctgactcaggtgacaagagaaattcttctctttctgtgagaaaagaaaaataggatgacttgattggctttccacacaccacgcgcctctttgttcctcagaaaccttcgacaggaggttttccttctgggtctttgcctctgttgtccgtgggtggcttctgcggtggggaaatgtctggagcctttcctagcgcgtggaaggtggggggcgtgtggctcctcccacgcccaccctgtctgcagacctgtccccagctgtccacttgctgggctgagatgaacacgcaygggctggagccacgcggagccctctgcagcctcaactccgccccgagctggcttcgcgtgcctgggcagggcctcacygtgcgccgagtgctcttcataaagtaggaatcgaatccatgcccggcaggttgatctaaagagcagcgttagaggccatgcccgatgcatggccagtggccagccgttggtgatggtgctgttacctcctggtgcccctttgttacagtgataatttcaaagctgtcccyctccagatcgcacggctggagcacgtcatggctygtgtgcagggcaggcattccgggacttttgtttccttcttgtggaggtgaccggacccaatttctgctcaagtagttggttgttatttggggccccatttgcctggattctcagtggcattgagagtggaggcagagaaagttctcctggcattggtcaggagtgaggagccaccygcttagtgaacagagaagattcgctatggagaactgtgtccgaggtgtaacattggtagctgggcccgtttaggcagaggacaacactgaggtgtgccagttatggggcggctgcagggaggggtgtggtccctcggggttggcatcttgttagagaagtctgggggggcatggagctgccacagccatttgagaaggggacacctggggtcttggaagtgaggtgcgatgtcactggggggtacctgcaggaatcgtagacagaaaactctcgaggggcaaggggaggcccagggagagcagatcgcttcttccctctgtggtccgaaggcctcccgccagcacccatgggcagagcgggaatgtggtctgtggagtctcagccccacaccccagctggcagagaggagtcagggcrtcacttgcccatsggccacggctcttctttccctcaagccccgctttaggccagctctgtcctgggtccccctggcagtgctgtgaggggcactgtcctgtcctcgacgctgtgggtctcttggtyccccagccttgctgtgaggggcgctgtcctgtcctccycgacactgtgggtctcttggatggggtttgttgttttccacctcagattctccctcttgctgtactagaggttcgtagactttgctgtgtgttgtcatcacccgggggtctttactaaagaggggtgcctgtcccctcctctcacccgccagcatcctgactggactggctggacgcagcctgggcattggcatatttaatctcctctggtgccgaccgtgcacccgagtgcaggagccatgacgccaggctgcagctgtctgcgagcagcacccgtgtccgttcgtgtccgcccttcccaccaccttggtcctccatctggcctgtgctgggctagagacgtttggcttgcgagtgggcgggtgagtgggaagctccgtggcagcgtctggccagagcccaggacccctccttcctggggcaggtggtcccaccrgagccttcactcccaggctctcaccacytacacggttcttaagccaagcctggcccagcaggasatttttcagagggacagggtggtggtcaaccttcaggtcaccaggaagagacaccaagtcctgacaccagtggttaattctcttgtggtgcttgcattcctgtcagacctgaccctcacggctccgcacctggcctgctgtcaaccacggcgccccagttggtctgcgggcragaactcttcactcccctcctggggatgggagcccggccaccgagtcccacacacacatctctcctgtgaagcccacccagatgtctctgcccgtctatgaagaaagcaactcaggttatctgtggaaaaaaaccagagtgctctggacggagcagagacgcrttgcgatcccagctccactggttctctgggacctcggcctgccttcagcccctcatctgtccagcggggagtgrgaatcccagccacacccgcctcaggcctgggcaacttccgtgaaggtgcccgagtgaaagggcattgcagagggtagcctggcacagacacagccatcgctgtgtggtctttcacgtcacagctttattatggagatttcacacacatacacagaaggcaccatcttcggataatgaccccacgtgcttgtcgcccaccttcaacaagcagcaatgctcggtggatttttctcatctgttatccctacctatttccccatttcctctaattttgaagcagatccaatcaatcatattatttcatctgtaaacattttcatatttaatgctgtaactctttttaaatgtcacaatacttcattatgctttaaaattaacaatgaacagttcctcattatcaacaagtacccagccggtgtttaaatttccggttgtctcagtgacctatttcctaacattggtttgcatcagaattcaagaaatggctatgtctcaatccatgtttaatgtgcaggttgactgttcacctcttttcctcttggacattttgcatttcrttaaaaagrtcccagggtggggttctgcyggttgtgtgcctgtggtcctcttaaacttgttcctcagccgggcgccgtggctcacacctgtcatcccagcactttgggaggccaaggtgggaggatcccttgaagccaggagttcgagaccagcctggccaacaaggtgaaaccccagctctactaaaaatacaaaacaaaacaaaacttgtttttcggtcttctttctctttttttastcctcattaaattaggagtaggaggctgggtgcggtggctcacacccataatcccagcactttaggaggccgyggtgggtggatcacctaaggtcaggagtttgagaccagcctgcccaacatggtgaaaccccgtttytactaaagatacaaaaattarccgggsgtggtggcacacacctgtaatctcagctattcgggaggctaaggcaggggaattgcttgaacccaggagacggaggctacagtgagctgagatcgccccactgcactccagcctgggcaacagagtgagactccatctcaaaaatgaatgaatgaatgaatgaatgaatgaggaggagggaggcttgatcgtattcagcattttttttttttttttgagacagagtctcactctgtcgcccaggctggagtgcagtggcgcgatctccgctctctgcaagctctgcctcccaggttcacgccattctcctgcctcagcctccagagtagctgggactacaggcgcccgccaccacgcccggctaattttttgtatttttactagagacggggtttcaccatgttagccagggtggtctcgatctgacctcgtgatccacccgcctcggcctcccaaagtgctgggattacaggtgtgagccaccacgcctggcctcagcattttttttcgaagctacttcatggatactgttgtgaatctccatcggcagatactgagtgtttatcggttctgtgatggggccgtttcatttgatggtgttctcttacccagccctgtcccgcacgggccgttacacctgttctggcacattcaagccctctcgtccccagaaaaacccttactcttctcctgcatggctcgaaacaaaatatgaaagtgctttactgcttgaggtttggaagtgatcaggtgaagatgcgaagacatttgctgtatgttttcaggccagaatcgtcttactcatcagataatccagacccagtagctgcccagggagagaaattggggcagcattgaccctgattccgcggccctgcaggattggaaacttccagacacttctggcagctcaccagtttgtctcggggaccctgtgtctccccctacagctcccccacactgctcctctcagaggagcagaggtgaacaggcagcatcctgccttccaggtgcctgtgagtaagtgactctggtgccagtatccccgcagaaggcgaagggcaccgggatggcagctgagtcctccctgccagactctgcaaggctgcttcatgtacgtcttggcctgtggcttctccctgtggttttcatttacctctccaagggctgatgggagcgttttctcagctcctcacgagccgtgckcagatcccttgtggtgaggcacctgagcctttggcaccctttttaaaaccaggttcgtagccgccttattattgagtcagagagttccttgtgcattgtggtcrtaagscctttgtcaaatgcctggtttagagatacttctcccagtctgcgatttgtctttttcttagcggtgagagaaattgtaggtgctgatgaagtacagtttatcaatttttaaacataggctgtacctttggtgtcataagcctctgcrtaatccatggtcacaaatatgttctcctatgttgtttttagaagttttatagttttaaatcttacatttatgtccataatccttttgagctaattttttgtgtcgggtgtgaggtgaawgcttttcttatgttgcatatggatatccagttattccagcrtggggtgttaaaaaaaaccctggccaggcgcggtggctcacgcctgtaatcccagcactttgggaggctgaggcgagcggatcacgaggtcaggagatcgagaccatcctggctaacacagtggaaccccgtctgtactaaaagtacaaaaaattagccgggcgaggtggcgggcgcctgtagtcccagctactsrggaggctgaggcaggagaatggcgtgaaccccgggkgggtgaagcctgcagtgagactccatctcaaaaaaaaaaaaaaaaaaaaaaagactgtcctttctccattggatggctttagtgcctttgtctaaaatcagttgaccataaacatgagggttattttctgaagacacttattagaagagagagcagctgatggggatgtcagtggatgggctgacaggtgacatgaagagaggaggggcgttggcacagccagggcagcttgagtggggtgaagttgggagggaaatggcgtcccatggcctggatgctgatgctcggtgctaatgtaggagtgtgggggtggtgaggggtcaacttggctgggccaaatcctagaggaccttggctggcaggttgagggaaattgatctttatattttttaatgaggaatttgtaggtttttgaagaggatgcctttgccttgatctttgtcttttggggtttctctgttttcacctgtagcataaatgaccacttcacagctggcttgaaagcctcctgtgggagtcgtggttctcaaagtgcggacccaggccagcagcagcaccatcacctgggaacttgctagraatgcaaattcttagacccacgccaggcttactgtggggcagggcccarcgatctgtagtttaagaggccctccaggtgctctgacgttcagggaagtcacagaacctgtgtgctagcgaaatgcggaggccagtgatccaggctgaccagcagtcgccactgtctctagtgctgcccagaagccacacctgtgtatggagcctcattcacatgcagtttggtggaaagtctcgtctagggcagtccttgttttcattggcctctagtgaaagttgccagaccttggtcctaggttcactcataatcaccgctgtcccttcttggtggtgctttccagcctggagagtgagctggagaggcagtctggagacaaggatgggctttgactctgatggggtgcagtgctgggggagccctttgaatcgggtgcggctgatctaggtctgctgatgggaggcagagcaggcagccccagggatggcctgtggaggtgccctcggcagagctacagcccctggggaacarggcggagagggagaggcagccggaggctgccgggcggagtggaagaccacggaaacctgggcccagcctccacatgagctggtcttctgtgagcctcgcgtccacgtctgtaaaatggagccctktaggagctgagaaggagcatgaacagcacacacagcaggagccggcacrgtgggcagcctggggtgtgcctcacctcccttgtctacagggatgctttagtgggcccagggccctgggccccagctggctgaatgtcatggagaaaacattgacctcaagccatcctgagttgaataacttcattttcttaacctctgtgagctttagtttccacaagggctgcacaatcaggactatcataactacccctctgggttgccaagaggttgtagtgaggtcatgtgggtgtttctgtggtgggcacttaatgtaatcagtggtggggtcttgtctgctgatgctgcagctgctggaacggggagatgttgggttagctcaggaagaacccgtcacatggcggaggctcatccaggaattcctgcccttcctgggagactgtacatccacgctctgagattctactagctttccattttctgttgtgttgtctgtaacttgttctcctagaagcgcacagttttctcttgcgtaccgatacatgagcctgctgggcgagctgtgaattcagcctcttattatctcagattccccatccatctttcaaccgtggcaggcacaggagagaaacctgagcctgagtaatctcaaactcctttcctcaccgcctctccctgacgagtacccagtgtggcctggaggcttgggcggcagggatggggggaccatggagccgtcaggccgctctcgaagctcctgctgctttctttggtactctgcccttgctcacctgccattcgtccttatagatcatttctccctcccaggtggcccacagggtgtgtggggaggttcgcagggactcgagagggatggcagtagcttgacgggcctggtgcgtgtctcaacatccaggagtgggtctgtggagaaggtccctggggtggtttgggggcctggcactcacctcggcctcctcccccagcctcccagagggtcctgcatgtggggaaggaaaacctttctcagtaccgccttcgactttkccctggtgctgctcagtgtggtttcacccgtgccttccggggtcagcgccagtgactccagaggccggaaactacttttgttcattcgtcgttttccaatttcatagaaatttctcagtgatttttatttccgttactattccctcttctcttagcagtggaacatttcaactttttcagtttgccccctgtccasgtcaggtcttggtaggaaggtrgacttggtaagccctgccttgtgtgaccctcacggtcagtgtgagagcaggctraggcagggtgggtgccacggccctgtggttttcatccaggactggagatttttgagaatgaagggcagacrgtgatcacagatcttgcagggacggcaggcctaaacctggactgtccaggggcgctggcccgtggccaccctgctgctggggtgatacggtgcggggcctgacccctccaaggcctcccctatcctagacctttcctcttggacggatgcctcagaggccagtctgtgctgggtccctctctgttcacatgacaaggacttgctaaacgtttgtctatgcagggccacaataactgggacgtactttttcttatggtagaaacatttgccatagaaaaagggtggcttttaaattccacctgcgctctagttgttgaagccatttcttcctcctccccctagtccatggggtagctgggggcaggaatgagaaygtggtcgtcccttctgagtcagtggtgggaggagaggagctgctgggcttcagccgagcccctggacaaggggagcctgaggccgggtctgggacggagtatcagctgtggsgaactggaactccgaccttcttccccgtctgcctcatctataagcattttggtaatgggaaaagaaatttttgtttattttgcatcctccatgttttagggaagttctttggggtcyaagttttcattctctctgtgaccccagggatccagcctcagatgctgaggcttagttgaggtacagataaaacatactttggccacagcacctgtgatttgtgttgctctgggccaagtcgtggccagggctgtggtgtctggggcccaggtcgtgtcttgtgtgagttgtacgtggtctggggagtctgaaccttgagcttctgaggccctgtgccctttttccaagtagcctgtcagatggaatggggttctgtggcgtagcctccccggagaggcacatttgcaaggatgcagaggaattctgtgttttcctgtactcctgggtagagcctcctaaaatacggttcttttcatcatcttaattttaatctattactgtgagaaaactttggtaaaaacaagtatcaaatgttgttgttctgtacagaagcacctcccaggtaagtttgggactcacccctcctcagagttgggccatgggcattttataagctgagagagtcaaaggtatttgtttccttaaatgcgttttgctcaattctccctgaagctttggtggtggcatgagggcatgggtgtggggtggtatcagggtgtgttctttatactgaaaattaaaaatatgtaactagggccgggcatggtggctcacgcctgtaatcccagcactttaggaagccaaggcaggtggatgacttgaggtcaggagttcgagatcagcctggccaacatggtgaaacccccatctctactaagaatacaaaaaaatttaggcgggcatggtggcgcktgcctgtagtcccagcaacttgagaggctgaagcaggagaatcgcttgaacccaggaggtggacgtcgcagtgagccatcactgcactccagcctgggtgacagagcgagcgagactctgtctcaaaaaaaaaaattgtgtgtgtgtgtgtrtatatatatatgtatatrtatatgtgtatatatgtgtgtgtatatatrtrtgtgtrtrrgtgtgtgtatatatatatgtgtgtgtgtgtgtatatrtatatatatgaactttagcattcattcttgccattgattcctcatgttaagtgcatgtcatcttgccaggcacgcctggtgctggtgaaacagctgagaacaaggcatggttctttgtgcagagagcactgggctcgaggggatagagcacccacctctgcaaggtatgaaggcaggggcaggcccagagactgctgaggaggggctcatcctccagccagcctgggtgcaggtgttggggacagctttctggtggaagaggccttcaggggagattcaccrgccaggaggagctgggcaggcagagggcagctgggtggggattgctyaccagtgaggactgcctgtgccaggccaggaggttgggggcrggggagcacactgggttcccgaggctgaagctgttcagggtgggagtgagggcagagacgatagtccagggtgaggctggaggggcagcagggcccatgagccaaggtcgaagtcaggtctcttgtgagggaagggacggtcatgagaaggcaggagagtgtgccatcagattggccttttgggaagtgcctggaaggggtgagtgacgactggcgggagcctrggtgctgatctcggggtgggttgcagtggctgggcctgggggtgccattggtgcagagaaaagaggtggattccgggatgtgtgggtaggaggagaatttggcagggtttaggggtgtggggtatggagaaggaggggaagggtttgggccacagggcaggtggggttgccgttcactcactcggggagggcaggagtcacagctggggtggagggggttcgacagggggcagaggttgtctagccacgtggcccccatccyttcaggttcagctggcttctggccacaccagaaaggttgtactgtgatcctggacaaagggcactgggctgcgcattgcaggcctggcacgtgactctacccctgccacagccctgctccctgaatttggcccttgacacttaggtccagtccagcaagctgggcctctgctgggtcccatgaggaggtagaagtagagctgattataaccctgtaaggcacctggaaaaggtgaccctttttcttccctcttgtgagtgagaccctgggaaaggcggagggaagccgcgcccctccgtgtgtctgaggtctctgggacaggctgtatgaaggggcctctctctggggtgccagagggatctcaggctactggctcccgcttctcccagcccagatctgccctcctgccttcccttgtaccctccctccccttgatcctctccttcctgcccattcttgwgtcctcaaatgcctctcatgtcctgggctccctaatttctaagactttcacatcttctctcatgtgacatgccactgaggctgtgaacagcactggggaccgagttctgcagttcccagcagagggctgtgacgcccagagatgctgcgggcrccagcgtcaggcggcagagctgggacctggactcctgatgcccggctccttctctttgggcatcgctggcgcctgtttccgaggtgcttcccttcagccttacatgatgcttttctgcctaggaagggcagaaagagcaggaggaggaggtctcgtagaaaacaggctgtggtttatgaccaggctgtttatggccaagaaaaattgctgtctttccttagactgtggctaacacaacattttttgcgtactgaaagaaatacttcaatgtggaaaactggctggaaacttggataacaagacagtgtcatagagcaaagtgcttgcctgttagaactgttggcggcaaaaccaaagtgaaatgaggctgacataatggagtcatttaatttgtgttagttcctaaagtctttgtgaagttacattaactccagatctattagccactggaaactccccaagatagacacaatcaaagcagccatggcaggggagagcatttttggcttcccaagcttgaacctttgtgcctggtggcactggggggcgaggagcattccacggcatcccactgacatttgctgacacctttgtgctctacaggttcacattttccagcccttcagtgttagctgcaggtttgcagatgtgccttgtcacctctgtgatccttgtcatattcctgctagcccaytgaggagacccaggcttggtgaggtgaagccccttgccccaggtggcgctgctaggatgtgtctgagccaggatccgaacctaggccrtgagaccctcctgcagtgacttctgtcagacctgccttgcttggccattccaaatatgaatcacgttttctccaggagccaagccacgcaccaggcgctgcagatgcggctattaaaaggacagtggctttgagaccccagtctagcgagagggaaaggctgcagtacaaatgagcacaggaggcgggggcatccaaggaggggcacagaagctgccctggggtgggaggtgtgtgacatgatgccctctgtctcatgcccaaagcagcgacactggatcttgaacataagaacgggcatttgcccatccgggccatcttctcaattcccttcgctcatctttccacttggaatggctgcgttagacatgcacgatccaygtgcagtgtgcrtacgtgtgttcagagaatgtggctgtgttcacacatcttgcacacacacacaaaaccatgactcctgttcctgctatctctggactcctgttgttctagccatggagtttgtctgaagtgcagctggagctgatggtctctccatgtgacaaattgtggacgggccataagcttctgggctgcagagacgggggttagagtccttccttcaccacatttgcatgtggtgtaatctcgggtcagtgacttaacctctctgagcctcagtgttggcatctgtgaaacggggatgatgtcagtacctcccttgctaggccgggatgaggacaagttgggtgactcgctcttgtgcacctggtgtagtgcctgtcttgtatttaacaactcatccgtaagtggtagtcgctccacttatgagtactctyctgtggcaggctcctgtcattctgaagaggagaacgggaagaggcccctccacatgagccttgtccggagtagacaacgtctcccttaaggagcgggtgactttgtgaatgcacgtatccctgcccactagcgacgtgattctggagcccaggctggtctggcccaaaggccggccgagtcccattgttcctgctggccttgtccccaccatatttcagggtcgtcttggagctctctgagatcccaggaaggcaggagtcagactgggcatcccctcctgggaaagaacataagacttttaagtggggctggtttccagggcttgctggagacatggggacacacagataataggcagctaaacatgggggagataatcaggctgtgggccaggggtgcgggtttctcagctttacgtaatgaaagagcacacagaagcaccattgtgcttttttttattttttgtttttttattttgttttgttttttggttttttttttgagacagagtcttgctctgtcgcccaggctggagtacagtggtgcgatcttggctcactgcagtctcccaacctccacctccctggttcaagcaattcccctgcctcagcctcctgagtagctgggattacaggtgcacgccaccatgcctggctaatttttttgtatttttagtagagacagggtttcaccatgttcgccagactggtctggaactcctgacctcaggcagtccgcccgcctcggcctcccaaagtgctgggattataggtgtgagccaccgcgcccggccaccattgtgttttttttaaaaacaaaaacaaagcgtgctttttaaaacctgttttattatacagtttccagttattattccatagcagagggagaagacaaaggaaaaatgctggggtaatacaacatacagtgctgtgggcgtgaggccatgaacagccagttgtgctctttcttcctggcgggcccaggcatttcctcaccatgtcacctgcctttggcttccccagccactgtgatcagggctcctggagcactctgtgcacatgtcctgcacagcatatgcctagtgtcattgtttagacatcagtctctccactgggagccccctttggcaggaatcctgtcttcatcatctctctgtaccgacacctagctgagtggccaatacagtaggaactggatcgagtcattcgaaccctgatctgtatcattctgtgcaggataagttattctccagtaacaaatggcccagaatcttagtgacttagtgcagcagcacaaatacttgtttctcatttaagttctgtgtctattgcagcctggttttggctctgctgcggtctgctttcattcagtgacccaagtcctctctgagacatactggggagtatggcagagggaaaagtgaaggggaaggacccaagaattgctcatgagcattctgcttgcaggtggcctgtgtgacttccattatgctctcagtcaaacaagtcatgaggcagccagaacccaacaaggtgaggctggatgatcctgtaggaaggggccctgagtgtttcggacagtaacgcaatctaccgcacttccactgcatttaaagacaaactaccatgcttattaaaacttcgtctttaygttgactttttgctctctttaaaaggtgcatgcttttttcttaccctatgttaatatgtcatsttacagttgactctgtattctcttattcttttctattttcattccaaagactttcatggagcacccagtttgtgctaaaccgtatgtcgggaatggtgctgaggttgcaccgaaatgaccatctgaaacctgccatgatatgtattgatgcacgtgtgtactcagcatgtaaatgaggctgttgttcttttcattggggtttattgagcacttattagactcaaccccctatggccggtacagaaaaacagctctctccctgctcttgagaaggttttgttacagtgggattagaaaggagctggcatttattgagacgcagagtgtgccaagcatcgtgccacctgcagccctaaggaacaggcaaatttatacccatttaacacaagaaacagactgagacaaaaacagaagcaatgcgtgcacagtaggctattctggaagaaggaccaagcttgggcctgtgtgcctccctgcaggagccccaccgctgcaggagctagggctgaggaagggtgcagcatgcrtcctgtgggagcagagagcagggtctgatgggtgagaagtctcagccctgggtgagagcaccctgccctggcagagagaggagcttgtgggcccagggtgatcctgcgtttcccaccactccgtgtgccgggaacccagcaaagtggggcttggatgcaggttatctggcatctggtctccttctctggggtggaatgggatgactgtgccccatstccacctcccttcgaggatgagagatggtcaagccagtggccttgtctgttctgcccccacctctcatactgtgactcgcttggaggggcccagaggcactggctgagcagaactcttcacaacttcatagaaacgtcctatgtgaaagtagtagtcgtagttactgtttttcaaaatggataggtaccaaggacattttccccttgcaaagcctcccgcagacaggcctggtgctgtgccggaaggccttgtggcgcaggctgtgcgagatgtcagcccgagatgtcagtctgctgtgcttccctcactgctgtttattggtgattaggttaaaggaaattcttttatttccaattagtcctccccagtgaacctgttccacattcagcacgtagccaactctgctcaacatggagccttctctcccccgtgtgatgcgtctctgctttttaaaagtaattgcattgtttgtatttccccttgcactagggtatgtctctggaacagggaagcagaggtttggttggtgaatgtgaatggataygggatggaaaatctcagccagtgtcagctgggggctcctggagaccagcaagcaaagcttctttgccttggaaacctttgttctttgttcttgataaattttctactattaaaaattcatgaatgcatcattttcggctcaatgagatcctaggacctatcttgtcagccccagttctgcagctctgatggactcccctgaggaggacgtgtgcagacttcagtctgttcaaaggaagctaatgaggtggctgggagcctcgggagctgctgcagcaccccagggtgtcatcctggggaaaaggtggcttttcaaggattgtcatgcggggagaatctcccaacattgcaagttatagagggcacatttcagaaaacacaggactatcctaaatggtcattttccactgcacaatcatttctcaattcctgaacgtgcaaagcactgtgctaggggctgagggcctgcagatgaatgggccgtcatccttgccttgtggttagaagcctgtggaaggcagctgggccctgtgtcccccagagaccccctgctgagggacgaagacaggccagtccacagagagttacagccagcctgggctgacttggaatagactcagtcctasagctgaggacagttcagcaccttcacctggccccgagtccagtggatcagtaggagagcaacagccccagttaggctcggtacgataggatagatcagctgcatttgggcaatgttatggacagcattcctctcctgctttcacgtaagcttctcaagtgcaygtatgagcagyactggggtctaaggtccttggtgggaatagtactttagggaaattaaaaatctggcctccagcaaatattrtttttcctcaaatttgttgaggactcaaaggtatacagtgttgccatgcttcctaccatttcatctctttatgttttcttaaataactaggctttatcatcttggagatgctgttctgcatatttgtaatgatttttctgtatagaaatacctccgaagtcccttaagctttggaatggttaagttggaagggatctttgagataccgaaagccctgatgccctgcctcacagatgaggatcctgaggctcagagtggccttctcagtgcctggtagaagagcctcgagtagaacttggctttcggcttcttagatcatagccactgaatcttctccaaggcggaggattcttagagagtgttgagttagtgctctgtgagagagtgcattccagagttggctatgaactgattstccacacaccctgtggagagaccaccatccatctgtcagtctggagaatcccgcctcattctcccagacatcatctctgccctgaggccttccctggcctcctgaggtgctcccccgctatttttttttttttttttttttgagacagagtcttgctctgtcgcccaggctggagtacaggtggcgcgatctctgctcactgcaagctccacctgccaggttcatgccattctcctgcctcagcctcccaagtagctgggactacaggtgcccgccaccacgcccggctaattttttgtatttttagtacagacaaggtttcaccatgttagccaggctggtcttgatctcctgacctcgtgatccacccgcctcggcctcccaaagtgctgggattacaggcgtgagccaccgtgcctggctaaaaacaaacataatttttttatagttgcataagtcaattctacatatataccataatttactaatcatgccctatcatcagtcattttaattgattccattgtttctgtattttaaataacatagaaataagcatccttgtgtttgagacttggtctgtagttgttttttttttttttttttttttttttttggtagaactggttctcggagggaatccctcactggttccgacgccctttaggtcctgtgttacatctatcaaatggctttgcaggtatgctgtagcatgaaggtgtgcttaattttcatgaaaacctgaacatttcctggtagatcatctaaaagtgaaagggaaaggggcccacgtgacctgaggccatgaaaggagaatgagttgtgttgccttcaactgaaaggacgagtctcccatccctccaaaagctcctacatggccacaggaagccaygctcacccagggaataaggatgaaatgaaatgagtgagcaaaacagtaaataagtgaaaatgggcaaattccttaactcctctacacctcagccatccttgggaagcctagggttaaatctmaccttcctagaagkatctgctstgctgtttccgtagcccgggcttagaaggaggcagacgcagcattgttagcctgttagccatgatttagtgcaaggctccaagggagagcatgagagccactggggtgggaaaaaatascagtattatcaccgatttctatgtattgtatccaaaggtctatgaaaaattaaaccttgctacatgatacttaatatgcaggccacattaaatatcatgtagtctttaatgagagacacctccgtctctcgttagtggtattagttctctattgctgctgtaacaaattatcacaagcttattggcttaaaacaacacacatttattattttccactcctgggggtcagaggtctgaacatggaggagtaagctgtatgcctgctggaggcctggggggaatctgttcccttgctcctccggcttcctgaggcccctgcactccttggctcatggcccagcctccctccagcctctgcataagtttgcctccttctgtggctccaacccaactgcctccctctctccattataaggacccttatgctgctcaaggctgtgatgctgggcctccctgagctgacmggggagggagctctggtgggttcttgcagaagctctttgggtcctgctgtgaaagtccatgtgtcctcctggtcaccgtggccacatgcttccagtggggctgggagaatggcagtgggttctccaggattgggactgatgtctggcaccaygtcaaggtccaacttcaggctcaccccaagtttattctggcaacatggataaatgttccaatgactagatggaagaggcaggatatgatggtgtttggatgatagatactactgaaaaaccacaaatactgtgtgtgtgttgaatgaatggatgaatgaaaaaaagagaacatacaacttgtgttcttacaccttggtgcctttgctcagcttcacggcttatggatggctatcaagtttattctgatgtgttataatagctatttagcatgtgatatgttacagacactgaatcttactgttctgggatcttgggatctttggagtgccgattttcttcccggaaatctctgcggccagtggtgcctttgcccgagttcttgtcctgcatccaggaagactgaggtacaaagacatatgaagggtgaacaagatgaagatgagcgtcattgagtgttacaacagctagaggagaccacagtggatagctcctctttgtaggcaagtcatccttcaagtgttcagttctcagcagagaagaggccctggagagggtagctcctctgaaactggttgtcctgatgtctgcagttctcagcagagagaggagctcctctctgcagctggttgtcccatcatctccagctatcagcagaggggttatttgtctctgcagctggtcatcccgtcatctctctgccctgtttgtcctctggctatcctctgtcatcctctcttctaccctggctgagtctggggcttttataaacctcacaggcgaggaagtgcctgccgactggtccataggcagccatgggtgggtccagaagaggcagcacaagtcccccgctttgagatcagagcaggcaccaggagctgagagaggccaggcagtgggagcagacacccctgagcctgcagggatgaggggagggtcctttctggggcccccaagggtgcaggctacaggctgcagaaacgcccaggtcctgcacctgggaggatggctgcaaccacacctgggaaggcagttcctgcctgttcctggctcccctgagagcacagggaggcttggctccatagctgcagtttcagtggctgtagccctgcccagtagggtggggctcytgcctgctccgtagagcaggaggcctgggtctgcagctatggtttgggtggtggtttgggcagctgtggcaccccaggtgctcccactccaattcagaaggggtggggctctcactggctccatggagtatacagccccagccatgcctccctgccatgctccctgccacagccggcatgatggcagcagctactgccatcatatagaaagaaggcccttgaaccagagcctgtgtgctcacagctatccctgctctgtgtagtgggcagacggtagaaatgtgcaggcgcagctgaggacacacgtgggtttgtccgaggacacatgtgggtttcctgctgtcctcctcttcagcatataccaggagaaggacgttctgtgttgggatctcatgtcctgtaatctgccttgtttgtttttytcttcctgtctctagctctgaaggggttacaaaaggagatgttttgttatttgtttgcttgttttatggaacttggtattggggacacgtggaccctgaagggaaatcctaaaacgttaggggttaagccaccgaacaaccattatttgtccctactggctcctcgcgggcaccactgggaacagattgtgacttgctgtggagcccccatgcaagctgagccccaccagctgcagtggcaggagtgcagaagggacagcagctctgtcacttggggctcttcctgagggccaggtggggtgcttgggtgtcccccacatggtcaccgtcctctccacaactctggctaacaggcaggattctggcttctccgttgaggacggagagattggtgagtcctggcctacagctggcgagaggcagagtccggacttgacagctgggtcacctgtcacagtggttggtagccgtggggcggtgtggcctgtggaaggcacagatacgggtagtagtggagctggcctgacaaagggtcaggctgacaaaaaggatgaatgacattgagaggcgggagaacccaaggaggggtggccagttcagaccaggtacagagggagagggctctggaacacrgggtgtcggggctcagggccaggctgaatcttccggagggcgatgctgggcagactcaccccaacaggagtctcrctgggcctttgttcttttgtaaaggcttttgccacttgggtgtccaagctgtgggaggttcagtggtggtcagaggagtctcatcaagggatggggctcaggccmttgtctgtggacagcagctgcatgcactgcagggtccaaagtatgccgaccacaggtgatgaggccagacggggttatatttaaattccaacctggcatttatttgccatccatcttgggcaagatacttaacccctgacaccttgatttccacatctgaaaaatgattcctcgtgactaatacatgagctgttctctataaagtgtctgctcaagcatctgacacaggtgctcagtctgtgagagcctctcgccgccgcctccttcctccatcgcccacagcccttgctctctgtgtcttgggttgtgacctaacttaaggctttgctgagactcctgggtcttgtgtggtctgagccagtggccagggtggcctcattggccctttgaagttctccacctgcctggggtcttgagttagcctctttactgtgtccctgctaggatgatatcacagggccaggtactgggtggctcccttcgcccttctcttctggcttgttggcctagtggctgtcctggcttaagcagtgcctgtaattgtagcttgagacatggtcctggtcgctgggttctctgtcttttgttctgcttccatttgttccctataacaaagctcttagtgcccagggagccactggggaggggtgytggtggtgggaaggtggaccctggcagtgctcttccttaagagggcttgccagcgttggtgcccaacagctcaaggtccacggctcagcttcacctctcaccagctgtggggcgagaagcaactcattccctctctgagcctccattttattggccataaaatggggataatgacctattttacaagctttccttggaggccattgatttatggatgttgtggctcccaaaagagtacctggcacagaggaagccctcagcaagtgctcggtgaagttggcgtttcaagccctcygttggtgttggcatcttaggccaggaacttcacctaaatacttcatcaaactctcctgacagcttttggggcttgacaactgtctataaccttattttacacacgggtaactgtggttaaatgatctgctcccagtcagaaagtggccaagctgggagccagtcccctgtgtgactcggaatgcagggctcccccgtgtgactcggaatgcagggctcccccgtgtgactcggaatgcagggctcccccgtgtgactcggaatgcagggctcccccgtgtgactcggaatgcagggctcccccgtgtgactcggaatgcagggctcccccgtgtgactcggaatgcagtgctcccccgtgtgactcggaatgcagtgctcccccgtgtgactcggaatgcagtgctcccccatgtgactcggaatgcagggctcccctgtgtgactcggaatgcagtgctcccctgtgtgactcggaatgcagtgctctgtgtcaggctgtcatctctggcatgtgttcccgagggcagtggtcacatctcatggtgtctacacaactccccttttccttgtggaaaggaaaaggcactccttacatgtctaaggaagctgactgcacaccctgtcctgcctcggggcgtgtctgtaaataagtgtggtgcctccgccatcccagacaccgtgttcctggggctacagagtggtcggcctcccttcaggaacctggagtccctttcttggtggaagcagcccttttgcagaagagcgtgggtctcttttatccaattagacacattttactgagtgatggctctgtgctgagtgcagtcgggataacagaaactgttgagaagtcagccttcctgtaagcctgcagagcaggcacagacgcaaatgccatcatgcagagccgggggtgggggcagccacctggaaactggggtcggcaaagactgtgagtctcatggagacatctgagctcagagctgtgggaacggtgtggttccagcatgctgagataatggggaaaggaaagaaaaggcattgaggtttaaaaaaccagagcatttagtggcaggaacaaagacacacacctgccagctcaagaggtgtgagtgtgttgtcaggggaagggagccgtggggactggccttgggacctggaagctcaggggccaaggcggccactttccttccctccttctgggaygcctatctcagctgctgtcctcatgcctgcagtggcagtgagtcctttcagcccaagtccccatcaccaactgactcgcgcatgattggcatctgacccacaaggggtctggctggtttgcatcaagagtctgtttgtgggccagtcagccaccatgtcacactcagggtctttttgttcagggagcctctcctcaggggctgtgggtggagctggaaggttggcagaaacctctgatacatttgggaacagaaacgacgtcagtttgattagaacacggggcctttggagargacgaagaggaggctgggatggttggcaagccctttgtgatgggctccccttatkctgctgatggctcggcccgaggggggcagtgtgacctgcatggcacaggggggtcctgtgtcccctgagcaagcgagtgagccacccctgcggctgtggctgagggtttcctgcatggcatgcacctggtgccgggccttctgggccagggaatgtgacacttgcttctttctccctctgcctctccaagcttggacagctggaggtggagagagcacagcyctgtgtactgagcacacgtgccaggcgccagaaggcatggtrcggtgttgccatcccccttttattccygaggacacccagacacagcgtgccctacctaggtccccagagtcaacttgtgacaggtctcctgctgtccctgcctctctctgactccagagtccttgctgtctgccaaacatcccttcatttattttaaaaagaaaaggctacaygtagagcgatacaggttgcctgctgttcccctccgataggtgccgcccaccctagcgtgccccgtccaggacagccacctcagtcgcccgagtcccccaaggctgcagggcaggtasgcggccctccctgctcatggcaccctcccaggtctgctgtttccatggcaaccctcttggcctgggctggcccaagcttccggactagggtggctgtggctgttggactcattggaactgtgttagctatttttagctcctgtgaggaaaatcttgtggcttataaatgtcacaggatcaaatatgttttcagagcatggggcccgctctgtgtggaatgcgattttgctgtctctgaggaagtggcctttgaagccgtgtccctcccgctcgaaggcagcaagcacctcagggccttatccggtgtcctcactgacatcccatcccctcttcagctcctgaaatcccatcagatttgtgggttaactgagagagagtggctgggtgtttttaccacagaattcacccctcagcacggcctgaaggaggtgcttgtcctccagggtgtgggaggccactctgtagggataggggagtaggaggcataggacctgcccggggtggcacaacgagtctacgcggagccrggatggaagcagtctggccagtgcttcccctctgcatccacaggcgccaggctctgctgagctgagcagtgctgttccaggcacacaggtctttgtttcttgtcaatcagaagggcctgtcctgattggaaacaattcctaggaggcatttgccatgtacgagacaccgtggtggagggtggagaaataggtcaggcgtaggcccaacatcaaggagacgctatgctggcagctgatggagacacatgcctcagaaacaacatcccatgggccgggygcggtggctcacgcctgtaatcccagcactttgggaggttgaggtgggcggatcacaaggtcaagagtttgagaccagygtggcaaacatagtgaaaccccgtctctactaaaaatacaaaaaattatctgggcgtggtggtgggtgcctgtaatcccagctactcaggaggctgagtcaggagaattgcttgaatccggggggcagaggttgcagtgagcygagatcacaccactgcactccagcccaggcgacagtgtgagactccatctcaaaataaaagaaaaaaaaaaacgaaacaacatcccatgtagggtraaatgcacgaaagaacaaggtgctgtgcacacaggggtgggtgtttcgaacgaggagcatcggagctggttctaggcacagccacactctcgtcaggtctccgcgtgctaaccagctgcctcccttccagccacacggcgggagaaacgaggacccagacacagtcttgagggccaagatgcatccatagttgagcatgagggagggcggggcactggggcagtcatgctggatggcagcaaggcagaccacaccaggcatcacagaagcgctgcagagctttcagtttctcttggaaagaagcccctgggacctatttgaggattcctcgacgttagtggacacagaatgttagcrcagccctcacgaacaggaaactcagactgggggtgagtctggtcggtagctggctgaaaaaggtggatttcctatttccagtagtcctgacccacattcccacttttgctgttgttgttgttttccagttagatacttttcatctccttccaattgtgcagttctcgaggaatcctgcattgcctgtttctggactggctgcctgggagggagcctaaatcccttcctgtcttagagcatttgcakcagtggggttggagcctttctcagttttgataagtaggagctgtttaatgttgtatttgcttcacgtgttgatgctgaacgtgggcgcttgaaaccaagtttgctcttggatccatctcggaggagcccctgggtccgtccagggtttttttgcagygtgtgcggctggtgctgtgtgtcacagcatgcraagaacccacacggagatgatcaggctcctgaactgaacctcaagaacccagtgaacaagacctacatgaggctcctacaggatcccttctggccctgatcattccttcatcactgttaccagaaacggggaggtgagggtaggaggtggtcagatggtgccgatggctggtgcagctggtggcagaggctttgaaatccgacccctttcacaagaaaaaatgtgcttgatccctaccatttatgtaaccagtactataataaaaacattaaatatgcatcaacataaaattaaatacagaatccttatgcttataatacttaaatctgtgaaaccgcttttccaaattatatacatgccaaattgtaagaccaatacaaataaaattaccagattaacttgatgagatgttttggtacaactaaattgccagtagaattgtgaacgtatatggacagctgcagagctggctccttttattttaacaygcctgtgtatacaatggagtggatctgtattctcaacattggcctttattcaaaccagggcaaatcttcactgacacgctgtgatgtcacttgagtgtcaagtggcgtgagcacctctacctttgttccttattgttagctggtggcagtgaaggtaataacacttgcacaagcagccaaagacacaaacgcaaacacaggtcctgagattacctcgcagcttcttcttacaaatggccatttagatgatttagaatatgcttatattgatttttaaaagcttggtctgctggggctgccgtaacaaagtaccacagactgggtgggtggcttaaactgcatacagttatttctcacaggtctagaggcaagctgtctggcatctcttcttataaggacactaatccaatcctgagggcccacccttatgatcacacgtaaccatagttacctcctaaaggctttacctcctaataccgtcactttgaggggaagcgtacaacatatgaattactgggggacgcagtcactcagtccatcacaactgcttttttgaggtaaaattgacatactaaaaactacacatacggaagtgtacactgtgatcatttggggcatctgtttacacccaagaaaccattgctacaatctggacagtgagcatattcatcacccccaaaagcttccctgtgccctcatcatcgctccctacccctggcgcagtccccaggtaaccaccaatccaatctactccctgtcgctgcagataactttgcactttctagagttctattaatatggggatggatcatacagtactattcctctttgatctggcttctttcactcaggataattattttgaggtctgtccacactgttcagtgtatcagtggttctctacatcgtctgcagcattggatgtggtcagtctttttcattttagccattctaacagatgtgtagtggcatatcattatggttttaatttgaatttccctgatcatgagtagatatcattgtatatagtgatatatttttatcatatgaagcatttttatatgtctgcttgccgtctgtagattttgttggtgaagtatgtgttcaggccctttatttaaataaagttgggctgtttgttttgtcactcttgcattttgagatcgtcacatactctagatacaggctgttaatcagatttatgatttgcaagtatttactttcaatctagtttatcttttcaagcgtcactcagagaagtttttaattttgatgaagtccaattatcagtttggagtcatgtcttctatgtcttttctagraaattttttcctttaatgtttacttctacacattttttttgagacagagtcttgctctgtcacccaggctggagtgcagtggcacgatctcggctcactgcaactctgcctcctgggttcaagcgattctcttgcctcagcctcctgagtagctgagattataggtgtgcgcccccatgcctggctgatttttgcatttttagtagagacagtgtgtcagcatgttgaccaggctggtcttcaactccttgacctcaagtgatccacctgcctcggcctcccaaagtgctgggattacaggcgtgagccgcaactcctggcctacttttacaagttttatagttgtaggttttacgtatcttaaaatgatccattttgttagttgttgtagatagtgcaaggtggatcgaagtgggtgtttttgcatgtagataattgattattccatcgtgtcctctgcctctgaatccagggcactggaaacagccatcctcttacttcctgtggcaggcagtttggcctgygtctcaggcttggtgtctagagtcagactacttggattcaagtccagctctgcttctgacaagccrtggggtcttggaaagttagctgacctctttaccttcagtttccacatctgtaaagtgtgttaataatagaatgtgctggtttgggttgttatagaatccgattagagaatggatgtgatgtgcttagcacagtgcctggtgcagaggaagtgctcagtagagaacagcatcgacactgtcactgctgccaccaccctggcagtgtgagtcgactgccacagctgctttccaggtgccccaccagcacccctcggccccatcctctggcgacctgccttgtcttgcagtatcttgttctcaaacataggcatcctaggatcttcacctctgagtcttttttctatcctcttgttcccttttcttggcacactctttgcccaggcctttgttcactgctcccggggagagccctctggtgacccgagctgccgggctcctgtgcagtcttgctgtttcaggtcctgtttggtgcattctactttagtcttccttaaaagttccgtgaaatagaaagcaccacgcctggagtcacacagacctaggttcacaccatgctttcctcacttgtttaaccatttgatttaggcaagtcacctgaactcagcctgacccttcttctgtgacaataataataataaaatgatttcctcttttgttattgtgattattgtgaagattaaatgggattctggatacaaaagccccttacgcagtgtctggcatgcaatttgctattaatctaattctgaaagtaatgtggatcagggctttagccacaaaaatgcaaaaggaagaaaaagagccattttgagactgaagttagtaacagcttaagttgtgggtaagaaggtaaagtatttcttcagcttttaagcttgaggagatgattatttccttcaccttactccttagaaagaaggaaattagaagagaaaatttatccttgatgaaaatacatgtttgtgtgatcctgatgcgcaaatgattggaatgtggcaatttaggtggccagaacaccttcctcccagataatgcttaattgccacagtgatgagaaggtatattcacctgctgcttggccttaagcgtttcaagagcatgtttttcttcacttgcattckatttgaaacaactaagtaatcactattcaatctctggcctttagaagatctctgtgagccccttttctgtcctgtcagtgccctttggtgcagactcagaggtgcgtggagtgagctcggcatctgtaatcacatartgagaagaacagaggcctacctctgcctcccagcctctaactctgcagcttgaggtacagcttctcctaagtttcagtgccctgtgcagaaaatgggcatttattccttacatgagcaacagacatgtagtgcctctggccctctggacttgacattctaatggtacgaacagaagaggaggtgctggagatccaaggactttgtctgcaagcaagagcagtctgctggggaaagtggcaaaggccgggatggtggcagtgaggacacctgcccccaggcagcagaacgtgactgtcacatttcttctcatcttgaaccctcatggcacagtttttgttcagtggtttgaataggaaggcgacagaaaaaaatgagtagctccaactggcctgactcrtgtgctaaccactgggacacccagctgtgaccacttcgaagagaacggtggggcctgcaggcatcaagcccctataggagtagggctttgtgtgaggagcgttggcagaggctttgttccttcccataccaattctgtgaggtgtcagggtgattctccaacttcttaggaggaagaaatggagctcagagaggtggcgtaaccaggcctgtgtcacaggtggggaggtggcggtggggatgtgcgcgcctgggtctggctgactccaagccgtgagcaggtgaggcactctgtttggcagggcrttgtcctcggttgactcacctcacccttttatagttcatttgtttggctgtaaggcgggtgcggctccctccctgccgcgcctcctcttgccgcatgccatgtgttttggtgcataccaaagaggccttcggagcyggtgttcacttactggttggtgtgcaaccactacatcagtccgttttttctgctcttgtagcctaattgaattgtcagttgctgaatgttttcaccagtgtttaagttgttgatttctgggactatatcaagaaacccatggtgatttgggaaaggtctgattcatacctgtagcattctaaggtttgggggttggtttgttgcttttatcaccagttcttggaaggcccttggctggtgcagccttgtcaacatgatgtctgttatgcctcacagcggcaacttaagcattcatcctgttgaaagtcacaactcggccaactggttatcttgcttaatgctgtctgttcaacagcagatttgacttgagccctggtttactcattgtgaaatcagcaataccactctggacaagttccccaaccaccctgaacttcaattccctcagccttgaattcgcgagaaccattgttaattgacaggcatcatctgctgacaggttcaccttccatttcgtaggcaagygataaaaagcctgagctccgcggtttgccaagtaaaaagtatttgtgcatattgttactttgaatcctcrtgagaactcattgaggatgaaagttgccttcattccatagacgaggactaagcagaacctggactgtggaccagcaatctatcctgggctcctgtggccacacgccccgcttcccccacggtcacctgaagctggacttaccactcgcctcgccatcatgggacaaaaactttctagggggtgccgtgctaccttgaatgattttatagacctttgttctgcaggatgtggtgtataagctgagatgtctgtgttgaaggtggggcagagttatttatatcagacatgtataatcaataacagtttcttttctttttaaatgacagttttattgagatgtaattaacatatcctttgatgcacctatttacagctcgttaactcattggtattgaggatactcacagagttgtgcagccgttaccatgattgattttagaacactatcacctaccatgctacaaaaactcctacccattggccaccactccccctttccacttcccccacccccagccctaggcaaccattgatctacttttggtttctatggatttacctattctggacatttcatataagtggaattctgtgtgtgttctgttgtgactggctgctttactcagcatgtaatgtaatcagggtctattcatgttgaagtatgtatcaatacttccttcctttttactgctaaatgatattccatcacatggatattgcacattttatttagtggtttatcgattgatggacccttacgttgctgccccttttgtctgtcacgaatgacgctactgtgtgtgctcttgtgtgcgtttttatatggaaatgttctcattgcccacggatgtctcctagaaatgaaattgttgggtcatacggtaacgccacgtttaatgttttctgttttttctttagtcagctttggtgagttacatgttttctccttgagaattatttctcaattttattatatctaaggttttaaagtttattggcaaaaaattattcataattttcttttacccttttacagtcttagtacctgtaatgaaatcaggttttcttattcctaatattattatttgtgtctttggttttttttctcctgtgatcattctcacagaaatttctgttttaattagtttgttattgtcttttttatttttatttttttgagatggagtctcaccatgtctcccaggccggagtacagtggtgcaatcttggctcacggcaacctctgcctcctgggttcaagcgattctcccgcctcagcctcccaattagctgggattacaggcgcccaccacactagctagttcttgtattttcagtagagacagggtttccccatgttggccaggctggtctcgaactcctgacctcaagtgatccgccacctcatcctctcaaagtgctgaggttacaggtgtgagccactgagcttggcctgttattgtctttttaatatttcggtgagcaggcttggttgacaggctcaccctgataatgggaaaggctgcaaagggggcacctgtgcgtgaggcctggctcctagccccaatcctgtggccagatcagggttgccrtaattggaaaccttgataagaattttacatttgaaggtggaggtggaggtagggtggggggctcctcctaaaggaaggggctgccgtaatgaacaaaacttagggagaagggcatcgggccagcctggtaatttgtggcctctcctgcctgcccctctgtcttagccacattggcttccttgatgtcttctgaccttcccagatgtcctctagccttagagcatcagcatttgctgtctgcgctccctgggattctcttttccttactcaaggcgaagccgttatattggcaaaaacaaaagggagggtgtgaacaccagggcaggggtcatggggaacacgctaggatctgtacgtcacagtgtgtgtgtgtgtgtgtgtgtgtgtgtgtgtgtgtgttttatgaaccatcttcccccactcagtgtaaggagggctcttcgttttgttcgcttctatttcccttccatctaaaacagtgcctggtacaacgtagttcccggatgaaagagtgaacctaatactcaaggaccctgtgatgcaaggcttatgattcgcactccacagataaggaaactgaggctcagggtgggtcagtaatgttcccacggccatgcaagtgccagtggacagaacgtggacaagaatccaggtctgttggactcaaaatcccgtgctgtcaattctcctggctcccttatactctctctctctctctctctcgctctctctctctctcatatatatatatatacacacatatttcttttttttttttttgagacggaattttgctcttgtggcccagactggagttcagtggtgtgatcttggctcactgcaacctctgcctcccaggttcaggtgattctccttcctcagcctcctgagtagctgggattacaggtgcccgccaccatgaccggctaatttttttttatttttatttttagtagagacagggtttccccatgttggccaggctgatcacaaactcctgacttcaggtgatccacctgcctaggcctcccaaagtgctgggattacaggcgtgagccaccttgcctggcccttaatactgtatttttaattatacaagatttcaaggggaataagaactttattctacttttcaacaaggacaaaacaaagccttatttaaattaaagcaagggagatattggcatatataacaaaggtctatttttcttcatactttgtcctggttagtttgtcattcttctgtcctttgctcccggcggctgagtaatacagcattgcttttcctgcagcctgccctggctacagaaccacattatctcttgttaaatgctatttggtggcgttgatggagattagtacctggtggtttatgaaaatggtgggaatccctcactcgcatctgaagtgtgagaatatttatagcagaagaaatgcgcgtgtagttcatttcctctgttccctatcatgctaatatttctttaatgataccaccctgtcttgctacaacacgctacttatttgacttgccaggtgagttgcatggaaaccctgcaatttaattaccaactcatttctctctccatttccttacgcagggtgtgaaaacctttcttttcccagccagggccttttttggttttttgttttgttttgttttttgagatggagtcttactgtgttgtccaggctggagtgcagtggtgcaatctcagctcactgcaacctctgcctcctgggttcaagcgattctcctgcctcagcctcccgagtagctgggattagaggcgcccgccaccatgcctggataattttttttttttttaaatttttagcagagacagggtttcaccgtgttagccaggatggtctcgatctcctgacctcgtgatccacccgcctcggcctcccaaagtgctgggatttcaggcgtgagccactgctcttggccagggccttttttttttttttagaagaaaattctgcggatactctcatatctcttcacctgcctcttctttccccttgtgctgccacctaacatctttattatctggcctttgagacactgscataccttgctaaatgcttgcttttcctgcttcttttcctctataagcattcatggtaaatagcactgctagaggaagagcaaagaagcaaaactccaagcatgtcactcccgactccagaggacaagggagagagggtcagtgtagattctcaagcgcctgctatataccagccattgacgagggcttctaacacacctggccatgcctcgttcttacggaatccattgagtgcatgcaatttttagccccattgaacagatgatgaaagtgagactcagaaagatgaagtaattccacagtgaggaatcagtgaaattagaataaagatcaggtttgcctggcataaagcctgctagggcctatttgaccacaccaggagggtctttgagcctcgatttctttgagatcttccttaaaaggggtgggggttggttcttgagagagatcagttggaaaattccgcatatccacctccccccttggggatttccacacacatttgtatcttaaggattctgagaagtcttccatttcagaaaatgagttgatttttagaaatgtttttaattgtaaagatttttaaacatacagcaaagttaaatctaggtggtgggtacagcagtgattgtaccactactattttgctataattcctttactgagtgtctattactatatccacctttttatccatctgttagtccatcatatttcgttcatgcatttgaaaataaattgcaaacctcagtatatttcccctaacaaccaagggagatacatccttcactagagtcgaatgtgtactctgtatcactcagtcatttgacatctattcagacttgtctcatgacccacatgagcttcatcctggtgagcacaccttatgcactggaagaggacgtgggcctgaagttgtttgctgtagtgctgtctgcacaccagctctggagttgcacgtgttgttcagttcatttatgtctttactgactgttttttgttggttttttttttttttttttttttttgctaattgtgctgtcaattgkggagagcaggatcttaaaacctccaactatgattgkggaattgtctgactccctctaattgtgtcagtttttgctttgtgtattttgaagttctttgattgtatcctcatatgttggtgagtattatgtcctgctaatggattcacttcacttcattatggacaatgatgagtctttgatactctttgtcttgaagtctatttcatatgatgttgatataaccactccagtatggtaatacaagcatactatttgcaaaggatgccttttgcaatccgttcactccaaacctgcataagttttcatatttaaagtactttacttataaacaacgtatagttgaattttgcctttttatttttttgttttactatttatttctttattattattatttttgagatggagtctcactctgtygcataggctggagcacaatggcatgatcttggctcartgaaacctccgcttcctgagtgcaagtgattctcttgcctcagcctcctgtgtagctggctttacaggtgcatgccaccacacccagctaattttttgtatttttagtagagacagggtttcgccatgttggccacgctgatctcaaactcctgatctcaggtgatctgcccaccttggcctcccaaagtgctgggattacaggcatgagccaccatggctggcgtgcttttttaatctattgtaacaatctctgtcttttaagagtatttaatttattaatatttcaggtatttattggtatttggtttaagtctgctatgttaatacttgtttcctgaatgaccccactgctttttattcatttgtttcccttttcctgccatcttttgtattatttaattctatataacatatatgtatgtatttatatatgaattacatattcacatatgaatttatctgtcagctttttacctatacctctttatgtttttagtggttgctgttgggattacaatacacaaccttaattttcatggtctatttaaagttattattgtgtcatttcacataaaatatagaatatttgcaaccacatcggttcctgtgtctaagccctgtcattgaagctatagtggtcaaatgtgtcagatctatgtacattataaatcacacaaggataatgatatgttttaagaagtcatctgtatttaaaataaataagaaaacaatattttatatttgcccaagtatttactatttctgatggtcttcattattacctaaatagccaagtttcatttccatctggtactcgtttcctgtaactccaagaattttcttctagcatttcttgtaaagggagacttctgttgataatttcttttagttttctttaatctgaaatgtttttattttgctttcatttctgagggatattttcattggatatagaattctggttgaaagttcctttcccttattctgcttgggttttgccaaagttcttaagattatacatttatgtttttcaccaaattaggggaaatactggttatgacttctttgaacacatgtgtttttcggcctcattcttgtgcctccaaggacaggtatgttagaatgtttgatattgttccacaggtccctgaagctctgttttgttttgtttttttcctagctgctcatgtttcatttatctgtcttcttaagaytggatgacttactttgacctgtcttctrtctactgattctttcctccatcactttcattcttctgtgaagcctatccaatgcattgtttattaaagatactctatttctcagttttagcttttccactttttaaagtaatttttatctgtctgctgagttttcctattctttcctgaattgccacagtattttcaataatgttctggagtatagttttaataacttaaaaaatctttgtctgctaattgcaacgtctgtattctctcaaattgatgtcaatttattgagtgtcttttctcttaaggatgggtcagtttcttggttcttcttaggtcagttaactttcaattatatcctgaacattgtcatcttatgtgtggagtctctggattttgttatagtcctttggagagagttcatttaaaaaattattatttagcagttgtttatctttgttggactgtaattgaaaactccacctcggctgggcacagtggttcatgcctgtaatcccagcactttgggaggccaagacaggygaatcacctgaggtcaggagttcgagaccagcctggccaacatggcaaagacccagctctactaaaaacacaaaaattagctgggcgtggtggtatgcacctgtagtcccaactacttgggaggctgagacaggagaatcgcttgaacccaggtggcggaagttacagtgagctgacatcgtaccactgcactccagtctggatggcagaatgagactctgtctcartttaaaaaagaaaaacaaaattctacctcttggacatctcgaatctcagttttgttcttttctccttagctggacttcactgactctgctccatgcacaccaggttcaggagtaagccaaagctctgggcagattctatgtacaacattctggactcctgctctcggccctctcctttcctgaactctccctccctttcccttgctgtggttgccccaaactctgtcttcagactttttggccaaggaagatggcagagtctctccccgagctttcgtttccacgtggtgctgactcggcctgtcctcagacaagaagtcataaaggaagggtacctggcaccgtggttttccttcttccgggtgtctgttctctgttctctcgactatgtctgtttttcttttcctgccagtgccttcaggttgcttattaaaaaaaaatgtgtccagaatttatagtaattatttgcaggaggctttggagcttgctcagatgtactggaacttttctacttttccaactttcacgcttccccagtttatctgactgtggaactcttgttacacctattaagcaccaataagaagttctggggatgacggtttttctcaggtgtcttgagaatggtttttctcaaattctgtctctagcatcttgcctccattagaagctcttaagattctcatgattttttttaaaaataaaatgaccaatgaccaaatttctgatccaaataagaacacttkttgggtcaatgcccagggattcaataaataactattgggtgtctattccttaaccgaccctaggaaggtaaaatgccaraatgagggagaaccctcgtgctcagcaggcggagatgtcatcacccttgctgagaactagagaagggttgctacgtggccgccccctgttattaccatcccgagtcaccgtccacaaagtgttctcatatccgtcagcccagttcagtgytcacaaatcagtaaggcgagtcttttaatttgtaaaacacagaaaaggacactaaggcttgagaaggtaggtgacttagtggagggagctgggttccatcccagatgggtttgcttctggagcctgtgttcttcatacaccctcatgtgtctctgtccttcctgcacaccgatctgcmggaccctccccatggggctccttcagatatgctctggcactgtctcccatttgccttaggaagaagtttgcagaacagtgtggcaaacccatgcccggagcccatgtgggccagagactgagcccaggggtgcagagtggaatatgccctctgcccagcctgcctcctgctcggccagcctgccctgagaccttcactgaaatgcttgcatttgtcgtgtttgggagcwctggcttgccacagttacagtcacrctgtctgggcaaaccagtctgttgtagatacctgtgactagccttggaaaattcctttccttgtgctgttgaattggatggtgatgttaccacttggcacagtctctctctgcctttgttaaggctaaacaggatgagggcactgactgccctcctgccagcccctggcctgccctcctgccatactgggccctctgtgtcccattttcactcctactcttctagtcttgcaactgagagcacagcctcttcctacagtaagagggccccaccctgaatcctcacttctgggcattggggcagcatctcagccccacttcctggctaggggctgccggccctccagggaagtggacaaactacttctgctctgacggcctctgttgtttccctgtgaggcttctgcagccccagggtcctggtcatggtgcatgtggactgcacccttctcacctggcagcctcctgtgaaggctgagggccggggaggatgcccacccgctctgaagactagccaatcgtgcctgcccaaggctctgctgccctgttcttcagtgtctgcagctgaggcccagacaggcatttccatttgcccatgccaaggggttctgggcctgccacagaaccaatcatgtgggtccaccccaggtatgtcccagtgaggacagtgatgggagatgctaccccaaccccccttcataggctgctgtgggtgcccggcttatgcactttactatcgcagatgcctggggacacccacagccttgtccccttccccagctccccttcaccctggcccagcgccctgccggaactcagcctccctctgtgtggaagagtgaattcatccctccctagggttccagccacctctgctgtggttggctcctaatttccaaagctctgtacggccatgaggtggggaaggaggaagagggacgttggccaaggtgcctgtggctcctctctggctgatttggtcatagcttcttggaggaagttctgtgggtgacagtggagctgccattggcctagctggagcgtggcccctgccctgtgtccctgccggcccctctgcacctttgagcccaggcctgtgactctgctgagtctggggctgccgctctccacgtcctgcctctgcaaggagggagcagatatactctagctatgtgtctgattcatttgcttttcaatttttaaaatcccccccatttcattatgtttcatttcattccttctggcactatgaggtttttcacagtatgaaattgaaaatgaagatgatgaygatgataatatttgttggaatagagcatagcaaaaactccccaattaacacaaacttcagtatctgatgtcttccctgtttctctgtctagtaatttgtgtcagtgtctagagagatggtggagaagatgtattaagaaaaacttgactgccagaactgttcagaagtaagagagacttgggggcagtaacccacctgcgctccttgtgtctgagggtggaggccgtggcggatcctgtaagacaggggtgaggggaactgatgatgatgtgttccaaccaaacgacgggaatcccagacgtgtggccagcaggcccagtccagctcgcaggtatatttgggctgcctagggtgaaaaaagaaacaacaaattragctgtcattgtaaaaatataggaatttcagattcaatctcgtttctggttctctcgagagatcaggagctggagctgtgcagagccgcatgctgtggcctggctgccagaggggcaggcctttcccgcagatgagacctgcacctgcctctgcaccagcctccctctcttcctgggccctggaggcatttttgttgccattctgaacttagagatttctttccaattctaggacttaggaactgaaactgttttgggcaatactgaataagccatsatcagatgtgaccaggctgttgtggagccacagaaggtgggagcacttgctgaaaaggaccagagggaggcacagagcccccagcgacggggtggcctgggacacggggctgccaggatgcacatcagccccacgacaggggtgcttcccacacctgcaggcctgcagcttcaaacaggagcctttgtggacctggacgggttgggagcagatcctgccctgggaatggggactgggagggtgggctgagggtctcggttggggaggctctgtccttttagccccatgcggcgtgctggaccacctccttctggagtttcctcactcgccaggggctgccctctctggctcgccccgcttcccggccccctctcaggtgctggcacctgcccgccacgcctcttgctgtgtgttgtccactcacckcagggccctggctcctatgctccttgacctctccagaccccggtgtccagcagaggtgttatctcttccaggaccttccttggactctgggctttcacccattctctggctcccatggcaaatgtcccccaaatatagcccttagcgaagtatggtggagttgcctgctcacttgtctggccagttctttgagtacaagtcatgtttgaatggcccttgtgtcctggtgcctgtcgcctggagaacagtgggcattccctcctgtctgtcaagtggcagggaggaatggaggagctgaatctgaggacatggcactttattcawttgtcttatttctctcctttggccttaaaaaattaatcggggccgggcgcggtggctcacgcctgtaatcccagcactttgggaggccgaggcgggtggatcatgaggtcaggagatcgagaccatcctggctagcaaggtgaaaccccgtctctactaaaaatacaaaaaattagccgggcryrgtggcgggcgcctgtagtcccagctactcgggaggctgaggcaggagaatggcgtgaacccgggaagcggagcttgcagtgagccgagattgcgccactgcagtccacagtccggcctgggcgacagagcgagactccgtctcaaaaaaaaaaaaattaatcgggtatagctctgtgtgtctcaaggaattgcacatttaacatagactgtttctagctgggcacagtggctcatgcctgtaatcccagcactttgggaggccgaggcgggaggatcacgaggtcaggagatcgagaccatcctggctaacacggtgaaaactcatctctactaaaaaatacaaaawattagctgggcatggtggtgggcgcctgtagtcccagctactcgggaggctgaggcaggagaatggcgtgaacccgggaggcggagcttgcagtgagctgagatcgcgccactgcactccagccctggtgacagagtgagactccgtctcaaaaaaaaaataaagatagactgtttcaaaggacccactgactgtgtggttttctatctgatttcggcatagggacggctgagttgacacacaggtggggcagctttgtcaggttcccaaagacctgccaggaagccatgggtggagagaggctgctgctttattgtttcaatgcaggaatgtatttcttatccctaattgtcaattkcatatcattacagacattctcctattcatatttcaatggttgtggcattttcagtattaagccagacacccaaaagatttttctggctgagttgatctcccacaaggagaactctgttttcaaatccccgaagactcagggccactgaggaggtgtctctgtgcatctggtaatgcatttcacctgtcggcgtcctgagccacagcgggcaccagagcgtgtgtggagccctggtggcagctgctcagcgatggctttgtcaagcgctggccagagaaggcttcattacccatgtttaacgcgattagaaaccgtggcggcagcggtaataatacgtgacatttgcgtccgcatttccgcttcacactgcgccttccaagtgttttcattcactgccctgccgtctgccaggagcacttccagaaccgcctcattctaattctcttcccttcctctccttgctgcctccagtgtggacgacgctggtctctctgttggcttacattgatcctccctctctcctggccccactggccccagcaccggccctgccacctcggccctccagcctccgcctgctcctgaagccgctgcccccagcgctgtccccgcagcgccttgggctcctaggaaggggatttcttttcttctttgagatgtcagtccaacccacaaaaataacatgtgttcattttagaaaagaaggaaaagtatggagaaaataatgtttggatgacacggaatcccagcatccagagagaatacctccctctctgggcccgcacccatattgctatctgtgtctactttacttcattcacaccaaattgggatcgttttgtgttcactcttctgtgcctcttcccataatataaaaagagcttttactgttactcttcaagaacacartgcaatgtcctgtagacacagggggctaaagcagccccctcctgggatgcagcaaggtatggtctgactttgctcccctccagcctgaagtccagccccactctctccatgctttataccacactgcagtgcccactccccactctctccatgctttataccacactgcagtgcccactccccactctctccatgctttataccacactgcagtgcccactccccactctctccatgctttataccacactgcagtgcccactcgcccactctctccatgctttataccacactgcagtgcccactcgcccactctctccatgctttataccacactgcagtgcccactccccactctctccrtgctttataccacactgcagtgcccactcgcccactctctccatgctttataccacactgcagtgcccactccccactctctccatgctttataccacactgcagtgcccactcccctattctctccctgctttataccacactgcagtccccactccccactctccccatgctttataccacactgtggtgcccgctcccccattctctccctgctttatcaccacactcagtgcccactcgtcctgtgtgtgccacacacttacctttcrgctctcagtcctcgtcctggggtgccctgcccttgctcaggggcctagtggctctgctctacctttagaaggctctaagccgagtgacttccccatgctcccactggatgggctcccagctctggtacagcgtctgccacagctccgcatataggtgtcgacctccccactcaccatttgtgcctgattgcaggggctgcgcttcctttgtccttgtgttcatagcatgtggccttgtgctcctggcagagctggcactcagcatgcatgttatgaatgaagaagcgcactgcctgcctcggaaatcactttaggaggtgtttgggattttccatctctaaatcctccttcagcaggactaagagctgtgatggtgcgtgctagacggtttgttggcctgtggcgctcctgggctctggtaggcgctatctcaaaagggccggagttagggatgccgggaatccaggtgaggagttttagagtcttcagaggccaacaggcgtggagcaggtgaggtggaggtcagcgtgagcatgtgacgccactccaggcctgtgctcgcaccaggttccccaagccctgggcaggagtggccctccccacatggtgcaggcttccccattgtgggactggagcaggaaaggtcacatgccatcctgacactgcatttccagctccatccctttgggtgactagtgtggcatctgtgtgcctcagtttccccatcggtgaatgaggaagggttcttgtatggatgaaatgaggtgattgttctgaagttgtgttaaattgtaaaacactaaataatggtaggctataatagcaaaataattcttttgttactgtcatcaagtgacttgcccgagttcatacggcaaataagttgagcttagaacaaatgtaaaaaaaaaaaaaaaaaagcaaagactgaagaagcatattttaactaagagatgcttttcacaaaaatgccatatcatatcatatccctgtttcccagcttggagctctgggaaggaagctagataccatcctcttctctcttttttataggcaaggagctagaaagggaggggaggactcaaacacactggtcatggacttgcctgggactgtctgcacacgcagtccattctctctcattgaattcctgtaagaacgtcatgggatagacgttttttcttattttatagatgaggaaattgagacccagagaggtgaggaaatagtcaaaggtctcagagctggcaggtcaccctgtaaccctgagaagcagacaggatacgcgagagctcccaaacacaaaagcacgtgtaattttttagaaatctttcccctctccttccctggcagccactacattgaagaacccccgagtctaccattttggggttctaggacagaaggtcctgcaygcagacatcagtaggctttcattcaccatgcaccttctctcgcacggtgatgtcttgtctggtctttcggggctcccatgagatcacgtaccgggaggggctgaaatcctgagcagtgaagtgacaggtctcctagggaatacctgtggtcctctgtcttctccgtgtgatgtaccagagactctgtgaacattgtcttgcctaattctcacaacaagcctgggaagcaggtgtcctggcaagacctcggaaagctaacctggtttgacccagcccacaagtaggacttggcagtgctggggctcctatctcaagtctgagagtctgagtggctgcaggtcagtcacttcgtcctttggccagcgctgtcctgcccagagccatgtcccctatctgagcgaacactgaccgaggaacccttgcgattgggccccatgtgtctacttgcaagatcagaagggcgcgccttccccagtctgcagggatggggcctcctgtggccacatgtgcagcctggagattcctcggcggatggaaggcagtttcctgaaggtggaagaggattgaaagagaattgctgagcggtttagaagtgatgactcagacaggggctgatcattaagtaaaaaactctctctacactatgagtaccactgaaatagcaccaggaaagccagtcagcagtgcatggcctacaagagattggaagaatgaagtttcaagagcccaggttttccattgtctgtgcaaattgtcattgatggtggtagaatatttgtcattattgtcactgctaactgtaatgacaggagacacccctgccaggtagcctgtgcacgctcctgctgtgcgtacagctactctcatcttctctctctctctctctctctctctgactggacttgaagtcagggattcagccacatttgcctaatctctctgtctctctctgattggacttgaagtcagggattcaaccacatttgcctaaaacagtggctgttagtgtcggcacacaaagcattttgttgaatgaatgaaggcaatcacatagcttaacctgttttacaaaaaatttgttttcaaaaatgaattctgctgagtataacttctcacagaggtttctataacgtagtagcagctaaggatggagaaatatggacaggatggtattacgatcatgtaggtttataaataatagatgacacctactagcaaccacatagcatagtagatgcttttgctatactatttctcatctttaccttaatccttcgtgacattattgttgctgctttatagataaagaaatttgatgggttatgtaatttaccggagctcacacggctacgtaaggtggatctggaatccatagyggtccagaactgatcatggactttggttaatctcaaatatgtatgaattgattcccaaaactttgtgtgggaagagcagaaaccaagacagggattggccaagggcagggatgacaaaaatgctgagcaagtgtaagtagaagagtygagtttgggttgcagccagtgtggtcctcagggaggcaagaccgggccacgcggtgcagagatctgggcaaaagcgtggagaagcggccgcggtgggcgggaggcgtctgatcgagggctcaagacgctggccctgtggtttscgtggcctgtgtctgcccaaatgggtcctattctgcccccacatctgaaggttataactcttgctctgttttgttcaaggctgtgcgctgagtggatcagtgggaggcaggacttccttcctgcaggagagatgatatctcccttggcaacttggttctatcagcactgcgtataatgtagtttccatactcattgattcattcacagttcaacacrtattcatgcgctaattaggctctattccttaaatgttagaagagatcttagttgtggagttttctgctttagatggagcaggtagkmacagaatccaggtacgattcagagcactgttccctagggcatgtcctcaaggcagctggagaaacagcttggtcacaaagaatcatgcaaaaaacaaacactgaggaagtccatgggtagacagcggaggggctggggtctcgagaagagagatgttgctcccgrcggggaatgaggagatgcttctggaagtagtggcttttttgcgccatgccttgaagagaaagcatttgtgcaccggagcagaggtgcaggggcgttccgggaagaagagctgtatgatttttttttttttttttaccagcttatgctgtggtaacagactattcctaaatgtcagtgactataagcatgagttgacatcttcttacattacatgtcaacgagaggttggctggggccttgggaccctgccctgcatgacagtgctttttttttttgaagacacagtctcattctgttgcccaggctgcagtgcagaggtaccatctcggctcactgcaacctccacctctggggttcaggcaattctcgtgcctcagcctcccacgtagctgggactacaggcatgtgccaacacacctggctaattttttttgtaaattagtagagacgggtttcaccatgttgtccaggctggtctcgaactcctgagctcaggcaatccacctgcctcggccttccaaagtgctgggattacaggcgtgagccaccgcgcccagtgtctacatgacatttctaccccaggartcaggtcagccaacatcttgtacytatgacgggagaaagaaagggagccataccacgtggtggtccagcgtgcttctgatccagtgtggcatatrtcactctgctcaggtcccrtggccaaggacctgtggccaagcctgacatccacgaggtggggacattctcccatggtggctaccctgagcgaggccccgtggtgcgggactccctcggctgcacggcgaagtggctctgtgggctgcctgcggggcctgcctggctggtttctccttgttcctccctgtaaggtcaatgcttctgagcaccaaagccctgcctttgggccagcaccccgccctcagccgcacatcaacacctctgcggcctcttctrtctccttttgaattgtattattgctcttaggtgctcttgtaatgctggacaaattctctgtgaataagggaaaaaattgaagcataaatcatccggagagtagcattttctaatttggatgtgtggcaaaacaactctgggtgatttttattctttattttcaacacagaatttctctgacaggccatcrtcagctgctatagagcaataaatcagagtcatcttttccgggtgaaatgggcttaatttctcatccttttgttcgtgtttcccttcctcttctaccgcatggyacttgtaatcctaatgatgctgtgatgagatatgatggtcagagcctcagacttatcaggatgggctgacaaatcgtggagatccgcactggtcccacacccgcctctgctcaggcgggcaggatgtagatctgcagactggaccagctcaagttgatagccccgtagcatgcagagaaaggagcactttccagaccgcggggcccagaggctcaggtccaaagctttgtgtgacctctgggcttggctttttgtacaatgagagctttggactaggtggtcttcaaggtcaactgtaaaatccttgacaccacagacagggttccagtgggcacctgccttaaggtgcgtgccagcctctgtggaagagtgttcatccttctttctagggctgtggttgtgggtgattgcactaggaaagacttgcagaaactgtcattgtggatatttgccacgtcattaacctcagtctcctcctctgtgagatggggatgtcaggatccagctcctatggttgcggtgaggattacrtgtatgctcggctctactgcagctggtgttcagtgagtggcagttgtctatggttaatattctcatttttcagattagaaaactgagcctcatgaggtcgaagtgtttcccgaggatctcacagcttgcggttatagaggtggggttagaatcatctagaagctcttttcctcacccytttggggcagtttgggaggtgggaggacaagagccagggcctcggggttgcttcctgkacagacagggaacaggctccatgacctgagggctgattccagcagggtgggcaccctgcatgtgcctttttccatacctatgaaagggggcaccaccgrgtgcagagtcaatgagctaatgcaggtgtccagcgtacactgagcactcaacagtgttgctgtcgtcgtgatttcatcctcataacccttgggtggcscygttttcrcctccttccctgttttgagcgtctcctcagagggtctcatctatgagacagcggtggaatgaggctgggtttctaagggagctccagctctggaaggccggttactaggattggttgaaaacgaaatctcattgcaaaataagttccctcctccatggggctaaacacgggggatgctccttattgtatttgaygggtctagaaggatcaagatggcctttgaatattaatctgtcactggtaccattttgtctgtttgatgtctaggatggaaaaaagaggggtgtgactatctcctgtctgatgcgagcattgctgcttggaaagcagaacagaagtccctttccaaggcttggctctagtcatcgacccccttgttttccctgtgatcctgagccacccacctgccctaccgacaccacgggagaagttgactggcgagaaccrtgttgtgtgagcgcgctggccttgccactgctcaccttggctgtatcttgttcacgttacacatcaactcccggctggcgcagccccactgccccacactataagccttcccatctcaggagttgggatggaggggtaaacatgcattaagatagtgcgtagaaggcttaagggtctcagctcttcctgagtgtcacccccttggctgtcacctcttaggcatctgggaggtcccagaaataagagaagtgaagttatgcttgttcagcccctagcatatgccattcacgatgctcaatgttttctttaaattacctgttcataacagagaagtgtagagaatcggcagaatccacgcacagtgccaaacacgtatattgatggccttctgtgtgtcaggtgctgctcctgaggactgcacctacaaggtggtgcttgctccattttacaggacatggaagggtctgaggcagagaggggctgggctggagatgaggatggaaaggtggggagggcagaccccagaggcccatcccagcttagcctgctctgctgggccttccttgaacacctggccagcgctgcccaggcttgctgggtgaccagccaagggacytgagtccactccccacacacctatgtgtcgggtgcatggcaccatggttcctgaagcagcagggcayatgcagaaacatggtttcagaagaggacagtattcttctggaagaccatggaagcctgtagctcaggaagaagcagcaggcagcacggtaactctgtgtggagagaaaaccaaagccaagaactgaggctgcccgaagcacaggacagctcagcttttttttttttctcatgatccgcccacctcggccttccaaagtgctgggattacaggcgtgagccaccacgctcggccccctccctttttttttattgtaagcctgggaccactgctgtgtttgagaacggcattgcactaaagttatttcaaggcaccttgtcttaactcaaatgtatcagacgttatctgttatcctggtgaccccaagctttcagtagattcatgtattgatcatccactctgtgctgtgctttgtaagactttagagacatcgttgtttaaaatgtgacagtcatggttcctacctgtgtgactttgtcagggaaagtgacagaaaagtatataaaacctaaaatgtagaagcttgttaattaattaattaatacatttttaagagagtggcttctttattttaaacaaatagaactaaaaataattcccgatttcgtgaagtatttgctagtcatagattttccacaagatgggattgccattggcgtgcacagcaccagcttgggcaccctcccgcgcccacgcacacgtctcccgtaagcaacatcgaggggygtgatgcttgcaaggcgttgtcttagggaccgaggagaatcaacagactgtgatgcaagggactgtggagaatcaacgggctgtgatgcattcttcctctccaaacacctgtggtttcctagagataaaaatgcacccacaaaagggtgagacaagaccctgtgagcgccatacacagactgtacggtgccttgggattcccaggaaggaactctcaggagtggagagagggcaagacactgtggccagcacacaagcatggagatggcgtggagaatgcgtcacctccagggctgggacagacctcccagccacgcactcacccagtaccgacagcagctctgaggtcggtcgatgctgtgggcttttccattgtacacacaaaggccttgaggtcaaggaacttcagtctcttgccaggcctaagatttgaacccaggtgtttcttttgttattttctttttttttttgagatggagtctcactttgtcacccaggctggagtgcagtggcgccatcttggctcactgcaacctctgcctcctgggttcaagcgattctcctgcctcagcctcctgagtagctgggattacaggcacccaccaccacacccagctaatttttgtctttttagtagagacggcattttgccatgttggccaggctagtctcgaactcctgacctcaggtgattcaccygcctcagcttcccaaagtgctgggattataggcatgagccactgtacccaacccaaaccgaggtgtttctgactttagaagacacacttctccagtggtttagagccagacagttttggtggggagatatttcacagggcttgtcttttggtacaactttatagaaggattattgtggaagagtaaaccctacatatttaaagtgtataatttgatcagctttgatatgtgtctatacgcaaggaattttcagcacattcagtataacaaatgttgctatcacccccaaaagttctttgtgcccttttgcagtctgtcccacagcaacccctggcgtgcttctgccgtggattagctcttgtgttccaggattttatataaatgggatcacatagtgaggacttgcatttgtctgacatcactcactcagcacaatggtttggagattcatccacgtggttggcctgcaacaatagtttgttcctttttgtagttgagtatttcattcttaaagtattccattatttatgtatgcattcgcctgttgatgggcatttgggttgtttctacttttttggctattgctattaaagctgccataaccattcctcaacagacctctgcatagacgtattttcattgctcttggtgaatatctgggagtaggattttggcccatatgataggtctgtggataactaagaaactaccagaccaggtcaggtgcagtggctcacacctgtaatgccagtactttggaaggctgaggcaggcaggtcacttgagcccaggagtttgagaccaacctggacaacataatgagaactcatctctactaaaaataaaaaacattagctgggtgtggtggtgcacacttgtagtcccagctactcaggaggttaaagtggaaggattgcttgagcctgggaggtctaggctgcagtgagctatggctgtgccaccacattccagcttgagtaacagagtgagactgtctaaaaaaaaaaagaaagaaaagaaaaaatagcagattcccttgcatgctcccatcagcagtgtgtgagagttctcgttcttccaccccagtcactgccaatgcttgatgtggtcagtctgtttcattgtagctgttcaagtatgggtgtttcccattgtgatagtttgacatttacatttcccccatgactgtggatgctgagcatcttcccaagtatttatggattatttgaaactttctttgatgaaatgtctatttaaatattttgcctatttttcattaggttgtttgagttcatattattgggttttgagatttctttatatagtcttggatacaaatcttttgtctaatcaatgtgttgtgatttttttttcccagtcttgatttgcttttgaatatcaaaagttttacatttgatgcagtttagtttctcaatattttcttttgtgacttgtctatcttcaagttaacttaccctctccccagttacctccattctactgttctccattcaggaggtgtttttgtttgtttgtttttttctgaggcagagtctcaccctgtcacccaggctggagtgcagtggcgcaatctcagctcactgcaacctccgcctcccaggttcaagctattcaggagtttttttttttwttttattttaattcattgtatttttaagttgtaaaatgtccacttgcctctcttttatattttctatttctttgttgtaaattcctatttttaaaacttcattttgaatgtgttttcttttgtcacgggagtctggttatagcggctgctttaaagactgtcttgtggctccagcatttgggtgatcttggggtacccattcgttcttctgaatcgatctcgttcctgttgtcagtttcccattgtgtcttgggcattgtgggtgttattttttgcagactgtgggttctcttgggagcctctggagaatagtgatgatttgtcttgtcaggtcctcagtccagttaggttcagaccttaagttctgcctggccctattgggatgggaggtcacatctcagctcctcaagctcacctccccaggcctctgctgcattgttctgggtctctccagtgtgacttggttaatttttaacaaccagccttggatcatagcatttgctgatttttgtagtgcaaatacttgccttctgggcaatttcaggctatccacgtgacgtcactggatgaagagtggagaagagatgctaacagttggctcctgggagcgggaaccagctagctgcagcacaccattgggtctgtcccacccgtgtgcctcttggggagtcaggctgagacacgtgtgtggctcaaatctcatttcacggctttcccatgctgctgaggtctatcctgtacataactcagaggtaaatctgaaacgtgtgtgtgtgtgtgcgtgtgcgtgtgcgtgtgctgggtagtcaaaccccagttctgttttctgaggctttctttttttttttttttttaagatggagtctcattctgttgcccaggctcaagtgcagtgacgtgatctcagctcactgcaacctctgcctcccaggttcaagcaatcctcctgcctcagcctcctgagtagctgggattacaggcgtgcactaccacacccagctagtttttgtattgttagtagagatggggtttcactatgttacccaggctggtctcgaactcctggcctcaagcaatctgcccgcctcggcctcccaaagtgctgggattacaggcgtgagccaccgtgcccggcctttacagctttgtactgttcggttgggtctgttttgctcagggatcaatccgagatttctgcaggtttctatgcagaatgaaagggtccacttctctagctctctcgcctctaagattcccccacctccatatgcaactctgcagcctacaaagactccaccccttttcctgggcagaaaggcgatatttctgttagagtttcggcctccagtgctgttgcctgatgctctgtaacggggcatttttttccacactgtggaggaaaggtcgagggaaaagtgggaggcgccgccaccccgtgggcgagctcattccatgtgtcgactcctccacattctgctgcttttgttttactcccggattcctcagggagctgtttttgtgtgcttttcgggagctttcccctgtaggcagtgggaggcgtgagttgtagtggggtggcccctcgtgctggagaacacgaagctggtggccgctgcaggccgtctgctctggctctaccctctggggccacactgaacaccgctgacccccctgctcatgaaagtcattcaggtgatctarggccgtttccagtaactcattcagcaaacatgtaatgagcccttgagttctaggcctgtaaaagatgagtaagatgtaattccctcactctgtagaattcacggtccaggagcgaaggaggtggacgaaataggtatccaaagaaaccagtgccatcaagcgtggctgatgatgggttaaagtgtgagcacagactgatgggtatagcgagggcttggttcctgggggtgggatggggagaagtccaggtggcttacaaagcagactgtattggagcttatccctgaagaaccagtcgattcctaggctaagagttgaaggcagggcttcctggtggctggaataggattgtgccagggcccggcagcatgatggtgcgttgacggttcccaggcaggatgcagtcccgtggtacacgtatgcaggcaagaaccagaggtccatgggcccagggagttggggggctttgaatgcctttcctaaggaggttctggcattttctgtgacctctgctgtcccttcagctccatgtggccgggtcaggtgcagggctcctgtcgtccatgggaagcagtgttgccaggtaccactgctggccatcaggtgcatgctctgtgcccagcgcttggcctgcggcttttcaaacctcaccgttacactctcaggttggcattattgtccttcaccttcacagcaagaaaacacttcaagaggcttgactgatttatccaggatgacactgatactgaggcagagcttggatgaaagtctgggtttctgtgactccacaccctggagttcttctctgtcaccctgcactgagctctggggcctgggacaagaaggcctgtggggtcctggccatgccccctccccgtgctcggcatggaccttgttgattgtttgcaaggcacatttgagtatgtccttttcctgtttgttttcccccctttaatctagggaaaatgagatttcacttagaattgatgaaatatgtaattagatataatagcatttttaaactaatagctactgattcaatatgattgaggcattttgttaacaaaatgggggcatttcactgccttaaaaccagtcagctctctactgagtcgttctctccaggaggcttttgggtgcctcttagttccaccagcctgttcttcaatacctgctatgtctgaggcattgaktcaggtgctagaaaggtgaacacacagaccttctgtctccgctcttctgaggactctgcacatgtgcagtgctggcctcctcagacgtgcttcgtcagggaagccactagaagcacagggagagaaggaggccagcagatggagaattttkccaggtggaggtggggctgagatgaggttagccaggtggaggtggggctgaaacttgggaatgacaggagcagagtgttgagtgaaacgtgagttcggggtggggacaccaatgcgagcaatgccggccgcagaggcccgtgcagctcccatgtgttcagatggggcgccggaagaaacccacggcatggcattttacatgtcacctgagcccccatggcatgttgtcacagggtcacactgaggcaggcatcctgtagaaagaagggaaatttgcatcttaacatggaaagatttctgtcgaaaaagattgctgcaacgtagtcttcttgtataggttcagctccacttagcggggagatgattatacagggatgtttatttccatggaggctgatgacctaggcacggtgtccstcagtagattttcattcacctccggaacggatggcatcccaggaccctaatactgtgttttagctggcttaccagtccggcccatctgcagctcttctacaaaagctgttgtagggcttgactctgctggttctgtggtttctgatgagcctgatgagggaggctgccacagtgtttctgaaatccaggtgccaaaaacactcctgccaatttctcttgcttgcttgctttaatgacataccaggagcaaaagtggccagagaggttcctcattctttccctctctaccttcagctctctgggcctgagcttcgtgtcccagctctgtctagtgtccacgggatggatttggacccgtcctttacctctcgcctgcctctgtgtgaggaaggcaggaagatgcacttttccttgggaacctcagatctgggtcctgggctttggcctctgggccgcgtctcacctggaactgggggaggaagccctgcctcacctgccctcctatggaggctgccccagctctcactgccagccatgcctgtctggaggcccagggaatgacatgtcctgtgtgtccacrtagacttgactcctggcagtcacttcattgcctgagcttcagtttcctcatctgctttgtgaagacaaaacccatttcaggccaggagcggtggctcacgcctgtaatcccagcacattgggaggccaaggcaggcggatcatgaggtcaggagtttgagaccagcctggccaatatggtgaaaccgcatctctactaaaaatacaaaaagtagccgggtgtggtggcacgtgcctgtagtcccagctactcaggaggctgaaacaggagaaccgcttgaacctgcgaggcagggggcaggggtttcagtgagccgagagtgtgccactgtactagcctagtcaacagagcaagactccatccaaaaaaaaaaaaacaccaaaccatttcaaagatcaaccttggaaggaaatgaaaataaatgagttaacatatgtgattgttgcgaacagtaaatattctcactctctatagttaaygttctttactttcttctgttgtttcttctctgtgctaccttgcttgatttcctatgttctgaacactagcctttgacatttatttccatgtgggcttctctgacagcagggaggggcaggtgtgcacacccctggatgaggctggtgttgggggcgggggttgagctgtgtacgctcccagatgtggcagtggggggcaggtgtgcactcccagacgcggcggggaggagggggcagatgtgtgcgctctcggatgcggcagcaggggggcaggtgtgcacctgaatgcagcccatagccctttcttatctggcccctgcttacctctcagctgtgtccctcccccggcccctctgtccactcagatgatcatccagggtccctggctggcctgcatgcactagtccacctggctctttgcaagtaatgctccctctatctgggatggtccttctctacccacagccctctacctgccagctccccttactgtgtgtcttaacttggtcaacacttctctccagctcttcctgaagcttctcaggcaggatcagtgcctgatactgcatactcctctaacatgctaaaagttctgtatcgtagcacttaccacagcttacacaaatgaagcccggctctctgttgtccatctctctcatgggcttctgaagctcctggaaagataagggcttgtttctgattcattttatgtccccatgcactgagtttagggcctgcaagatgacagctgttctctgaacactgctgaaccaaacccagtgtgatttgtcccaagcttctgccctcagatctggccctgggcggcatccctgtttctgccgtgatgtgatgactgcctgccctcacacattagcgggaggagtcgcgtggtatggtgagactgcagggcctcaggagactacagccgagtggttccatcagcctgtgtttcacaggagtggccagtgtcctctagctgtgctgcaagatccaaattacatgagtgtgatgggggctgccaaggtcccgcttgcttggcagggtggcctcccagttgtggcacccacaccttcagagacctgttacggcaggtgtgggatgcagccacatctgtggcagaggtgatggaagcagaagcagactctgtgaccaccacactgccattccttgacctctctcctcgagttcagccaggcattccagaagaacctaagaggaactgagaggagctgagattttgtcaatgcaccagcttttcatttaaggaagtgtggaactgtaacttagctgcctctgcaggtgctgctggtcctgaacctagttccttcacctaggcagttgctgtggtagcagattttttccagcttactgtgagctgaacatgacgctttggaaaagcaaggaaacactctggttctctgtcatctaaggcagagaaacttcaaaacagttgattttccattacaattcagaaagcaggagggagtgagccctgttggagccccagctgtgtgccctgccctgggcccacgtaggtcactcactggctcctggctgccactgtgtaggcagcggctcctttctttacagaccaggagggaggctcagggacagggtgacttgcccaagggcacggcagattagaagtagacccaggcagaaaccaggtctttcagactttaaatgaatagcagaaaagtggtaaagaatctttgtttgtttgttttgttttgcttgagacagactttcactctatcactcaggctggagtgcagtggcacgatctcggctcactgcaacctccacctcctgagtycaggttattctcctgcctcagcctccagagtagctgggattacaggtgcgcgccaccacgcctggctaatttttgtatttttaatagagatggggttttaccatgttggccaggctggtctcgaactcctgacctcaagtgatccrcccggcttagcctcccaaagtgctgggattacaggcgtgagccaccgcgccccagtggtaaagaatctgatagatattttaatcttaatacaaacatcttcagaattttcagtgaggaacattggagaaaacccaaaaacccaccgttacagacagaacaaatctggaagagtgttgaaatggttccagcactaggcggaagggtccgggcagtgccatgccgcgcctggagtctgagcgggtcatgaagggtaaaacyagggagcatggagaccgtgctgccttgggccctcaagccactgccttcctgtgcatggggtcctccgcacctgctctgggccacacactggtagcatggggggcaccaagttgaagaaaacagctctgacacaaccaaggtaaggatggagtggagacgcagacaccctgatattagcttgagtgaagtgttacctatgaacacaggtcaatgggtgaaaataatgcccagaacatctcatatttatcttgcattttataccttcacaaaatgtcttcctaaaagctacctcgtttgatctttatcatgataacttcctttaatagccatattttttaataacagctttattgagatttgatttgcacacaatgcaatttacccatttgaagtgtacggctcagtgatttttgtttattcacagagttgtgcaaccatcaccgtcgtccactttaaaacttttgaattgctcccaaaagcattataatagctataattgttttgagcaccaattatgtgccaagtggttcaaatcaattctcccaaatcccgactagccctgcaatataggagatccacgttgtggatcaaaaaccaaggcctggggacactcaagtgacttgcctccggtcacaaagcaaacaggtgagaagagggttgcgctccagtccgtgttgctgcaagcccatgcccttcctcggcacagcaccccttcccgaatgcagccctgcagccgggacactagcccgggcgccaaagcctcggggagtcgagagcagtggtgggcgcctgagctctgcctactgactccaagacctggccctgcatgctgtgtgtcagaggccgtggggaatgaagctccgggcaccggctcctccctgcttttgctggacctgtggctgtttggacccagcgggccaagcagtcccgttaagatggaaaaactgcttcctcaggaggcctctgcagaaagaaatcaatttaaaatgacccgtggtgcaggaggagcccaggtcttgcactgccttctgccgtttggagagggagggcagctggcagccagtggcattaggtgaattccattttattaagcactattttctgcgctgaagaaaacaatacttaaaggtcctaaaataaacattgatccggagaagtgcaagcgaaggggctgtgcttcccacagcagtgctggctgggatggagggagaagctcccgatgtcgggcacttccacgctgagaacagcactgctcrgggaaggcggtgtctggctgagtcctaaagggcaaggggagccggctccgtggtgggagggccggggagggcccctcgctctggccggtttgctcacgctctggtgactggcgggtaatttccactcatatgaactcagtgcacctctctgtgacctgagggtagtgatataggatctccgtaagcataaaatgagaagctgtgtatttggggctttcccagtgcagggtcgggggctcttygcaggttccctccctgggagaccagccaggctgacagatcgaggaagcagagtgctcagagcacaccatccctcttcggagaagccacctctgcagcaagaggccaccgtttcctgatgctcactctacttccaacccttggccttctctgaactcacagaatccaaactgaagaaataatgggcctcacgcaacctccaatttacagtgaggagctcaagattcagaaaacaagatgcctgcgaatcacagacttccatgattgaaggagtgcgaggctctgtctcatgcttgcacctccccaagtttctcccattgagtgttttctctagccctacatggagcaaagaacaggaccacagactgcctggccccaggccacagcttgtttatttgcagaacggacctctggcagagctctcagtcccctaactgcatgggccacagctggctgtgggagtgctgggctgcttgttaacaacgagcagtattatctccaagcacctgtcagcatgtgtgcccgagttcaggcgatggggacgactctgtggaccctttcagtcaacgcttaccacaggttcctggctcctgccagcctggctttgacttctccgtctcccatttgccatctctgtggccttgggcaagcgaccttattttctgcaacaggagaatctgctccctcccagggctgctgcgaagatggaggcggtggcgaccgagcctgttgcttggcagcggggtgggcccacagcaggcccgggggacgggggcgccattgctttggtgttggtgcattctccgatggtgctttgattggatcacctagagctttgactttcaaaatacagcttatctttcccctttaattgaaaataataatggccgggtgcggtggctcaagcctgtaatcccagcactttgggaggccgaggcaggcagatcacaaggtcaggagatcgagaccatccgggctaacacagtgaaaccccgtctctactaaaaatagaaaaaattagcctggcatggtggcaggcgcgtgtagtcccagctacttgggaggctgaggcaggagaatggagaatggcatgaacctgggaggcggagcttgcagtaagccgagatcgcgccactgcactccgtcctgggcaacagagcgagactccgtctcaacaaaaaaaaaaaaaaaaaaaaaaaaaaagaaaataataatgaagaaggatttctcttttttaccataattgatctaggaggctgaaggataaaatgatcctctctcagggcgtgatccatacgtccgtgttcacgccrtttccttgtctgctcaaagtcccttctcattcaggatggacgagtcaggaagatgactgcttccctctcacttggcatcgtacttctttgcaaaacagcataggctggtgttctgcacaggcaatcgattcacatatgatgtaccacatacatttggaaagctagtcttataactaacaactatctctcaatgaaagttcagttgaattatatgtggctagcctcctgagatccgactccttgatttgtatttaaatgtcattgtgacttccctggtgaggctatccgctgttcaaagactgaatcatatgatctggtattttaaaaaccaccatttttttatagactcttcaaaaatcacagcacctttttttagtgccaactcttgactattattgtcacatttggccataaaattaaacatgaaaattggcattcaataatagtattaattttatttaactctgccgtcagagatgaacagaagcaagtagtggtggagaccgtctacccgggaggccgcrgagtgcygcgttcygaggagtggatggagggccggccccgcatctggtatttgaaatgaagcccctccttggccttgcttttcactttgcaaccttaggtcatctccttagcgcctcagctccttggtctctccmtctgtaatgcgggtttcagaatcatgacagcagccactatttatagagcgctatttatgtaccggatgcttcgctgaccgtttgtatccaccatctatcttatctaatctacacaaaatcttacaaagtggggtgtatcagcctcaatcagatttaaaaaactaaaccccagtgtgttttgcacattgtgaggaactttaaaattgtgagcgaaggtgactattccaggaggacagtgtctygaggggtttatgtagtgggacaagcctcccagaagagccatagtttgattgtgtgttttataggcctgtacaaaagtaattgcactgacctaaatataagctcccctgaagtcctgccttggaagatttgtgtgggcctggtcctttcctccatctaggatttaagtctattccctttagcgaatctctagagagcatttcaaagtgccaagtgcattcacacrcacaagycccttcctcacagggtgaccagtgacccaacwagtatgcttcttattttccaaaaggaagtttgggtgtagagaagctaaggcttgtgtggaagagaygcaggtgactcagacagcccttccctcacagagctcccagcccaggaccaaagattgctctctgggtyagcagacagctgtggcaaggactggcctcttgtcccctctgcccattcagggaagatgtctctgccctgatgttccccgcagaagccctcctgttctgcagagaatcctggactgtgggcccagacccagattcttgtcttggtcagacacgaacagcgggtaatacgccttgtcctcagcatgaagtccttactttattaaaaattgaaacaaggctggcgtggtggctcatgcctgtaaccccagtattttgggaggccgaggtgggaagatcacttgaagtcaggagttcgagaccagcctgggcaacatggtgaaaccccatctctactaaaaatacaaaaattagccagatgtggtagtatgcacctgtaatcccagctactcgggaggctgaggcacgagaatcgcttgaacccaggaagcggaggttgcagtgagcagagattgcaccactgtactccagcctggccaacagagcaagactgtgtctcaaaaaaaaatcaaaataataacattagaacccactctagcaaaaaggcatcactcaaagagctgttaccttgctgggcagacccctgggcagggcccggcaccgccaccgccaccctccaggagcccgcccaaaaggccattcccgccaacacccgctgcagacgaggcaggtgccttcgccgtcagttctgcgcgggtttcctcactggccttttccacgcagtttccaaagataatgatttcccacccctttgcagtgacttgccagagcatcagccacggttccgagtcackttttggaaacsttctgatggggaattgcatgaatattctctgatatgtgtcactgaccccaacataagacctcacctgtgtgtttaagcttaaacccaggrcgaggagggatgtgccgtcctgtgcaaaccacacctgcaggtggrcaggcttccgagrctgcgggggccaagtggtgagggyggtggcatgaatgtggcatcaaggcgtcgttgctttgttgttgttatgaaaagtagcttgctcattgagaaagccgttatggagccatcaaggcactcagctgatcgtggcctgtggcctggtgacaatagaccctgtgtgggtgctaagaacatgcaaaccctcccagctgttaggtgcgggtggcactgactgcattccacagagatgctcagggaagtgtcaggcctcgccccaaagtcacctccaagccgagctrggcatccagcccaggtggtgggctctgaagcctgccrccatctcccgctgcgctgctgcccyggtgcctaccacgatggacaggccactgccagctacacctcagcgccttccgcccttcctctctggaagatgactgcaataggtgatctcagcttcgtgcccctcgrtggccctgggtttcttccttaccttccagcacctgggtgtccctgcctgcgggtcgtctccctgtgagcctctcagccaagcgccaccaccccgcatgccctctggcactccctgtggggcagacaccccgtccacatctctccagccacccaccgtcatcgggagctctgctctccacaggagtgacaagcctcaaacctgatggcctcggccctcattcaaagttctggcagtgctgccattgaatttagagcaaggtcacctaccagggcagccggccaggggctctcgccttccatsacgcaggccttgcagctgctgcacacaatgcagcagtgtcttccggcaggggtgaacccaggtgtgaggacccctccatgggamagcctctcgcagttttccgggttaacagtcacagggctgccgtcacttcctggtggggaggagccaggaggagggggctcaggtttaggggctgtgcctgggaccaggtggatagaagtattagaggtggatagaggtattaggtagagcccctctgtggtttggggaattcatccttggctcttggaattctggcaataggacttgaagctgggtgaccttaggtgagtcaytcgatttcttggtaccccagttttgtcactgcaggaaaaggaacgcggcctttgggatttttgccagcgtcggccatcccagggctgcagaggagaaggcaattgtaaatgtgggaagcagttggccgttaacacaagcagcaggcctgttggaggcagggtctgcagtttcagggtctctgtcccatgctgctctgcaaacagcatgagcaagaaatkgtctctctttaggtgtcctgcctaagcaaagcagagccaagtaaagctcaagacaaaacacagaggatggagtctgtgacacaggctctgagcgaggcttgctagctccatgatgttgggccagatrgcttgggcacccagaggtgcagcctgtcatctgtaacatgaagcagagcttggccttccctgggctggctgtaagttaacaaagatgagcgtacacacagaacacccagcgccgggcttggcacacagcaagtgctccttacattttgttttcttcccttttctgttttatgggcagagttagctacagttttgttaaggttggaggaggataatagagtgtgatgattactcaaccagaaattgtttgaaagatacccccagattagatatcacaccgttgtagttccagtggccgcagcatccagcgtgtgctctgacccagggagctgcctgctggctgtttctcttttctgtgttcaacaggaagagaacctggtactgttgtcaaactcaactgagaggtgaaagttattagttccttttggattatcaagcagtgaacttaagctggcctttttcatgaaacttaggaaatattctgaccttttgtttgaagagagcactagtttgcttcagtctgcctttgaggcggggaagtaagaggagctttttgctgggtggaaaattagaagctcttgctgcacgggtaggttactcacaagagaagaaagagacatggttagtaagcttctgaaaaaatgttcaacctcaggggtaattcagacctcaggggtaattcagacctgcacattaaaacatcagtgaagtggcattttgcctattactagcaaagattcaaaactgatcatcgccagtattggcagtggtgtagagagggagacaggcctgtccatgctgctcggagatgggcttctggaagactcggcctctgagcctgaaacacctcacaccctccaatgagtggctccatgtctgggaacagttcctgagagtcagtcgtaagtgcaggcagaaacactcagcacaaagatgtttgtcaggtctttttctacaatagtcattttttttaaacttggaaaagagctgagagtccaaaaaataggagaaccattctgtaggctatgatacaaccctaagatagaatatttcgcagactaatttttarygatgggaaaatattcatagcatattaagagaataaaacaagacttcaaactatgtatgtgggtgtatttctttgtgtatatgatacatcatgatttatacatatatatgtagtgattttaaactatgttaaatacaaatacttagggaaaagactgtaaagatgttaacattagagtataatatttgaatgcttttattttcttttttatgcttttttctatcttccaactgtttaacaataagctatctacttagagaaccagaaaataatagtaaaagtgatttttttaaaaaccatgttttgccacaaaagcactgtcctctgcttgcggggagcgtctctagctcttgtgtggctcagccccgcatgtcatgcctcaggctgaatactagagatttattggcactgcagtagttctttcccaagctgtcgtggagactgagacttctttgggtcttatcttgtctttatatccccttaacagcaggtccycttatttcttgctcgttcaagggaatagccacagaggccaattagagcatggttttgctgaatgttttggccacagcacaatctatgcaataataaaaaaaaaaggcctactttttttttttcttttaagacagagtctcactctgccatttaggctggagtgcagtggcacaatctcggctcactgcaacttccgcctccttggttcaggcaattctcctgactcagcctcctgagtagctgggactacaggtgtgtatcaccatacctggcttatttttgtatttttggtagagatagggtttcaccatgttggccaggctggtctcaaactcctgacctctagtgattctgccggcctcggcctcccaaagtgctgggattacaggtgtcrcacccggcccaaaacgcctactcttatccattgactgataaaccctctgttgttgtattagtttgtttttatgctgctgatgaagacatacccgagactgggcaatttacaaaagaaagaggtttaattggacttacagttccacgttgctggagaagcctcacaatcatgatgaaggcaaggaggagcaagtcacgtcttacatggatgacagcaggaaactcccccttatgaaaccatcagatcttgtgtgacttattcactacccygagaacagtatgggggaagccacccccatgattcaattatctcccaccgcgtccctcccacaacacacgggaattacgggagtacaactcaagatgagatttgggtggggatagagccaaactctatcattctgcccctggcccctcccaagtctcatatcttcayatttcaaaaccaatcatgccttcccaacrgtctcccaaagtcttaactgatttcaacattaactcaaaagtccacagtccaaagtctcatctgagagaaggcaagtcccttccacctatgaacctgtaaaatcaaaaacaasctagttatttcctagatacaataggggtacagacattgggtaaatgcaaccgttccaaatgagagctgagggggggctgtgggaggggcacgcccacctggcctgagaaggaamtggtagggggaggaggcagacagcactcagaggataaacaggcagttcccagtgggctgatggatccccagggttaaataattgtcagcgttctccatgactgcacaggagtttaagtcgccatccagctcactatctatggcacactggttctttcctgccttgctgtgttatggaattgaaatttttatctggggtaacacaggtcttcccagaggtttgaagcaatgactgtgtcttcagctccaaattgtgtgttgaaccagctctgaagtcagggccaccttaggartctattatttcattttcttggaatgaatccgttatgaattactaacgataatgattcattatagtgtctcacgctggcatgtgctgattctccaacagccggcagaaattgccctactgatgaattctctgctgtgttttcccctttctcgtagaatggctattcaagtggacaagttcaactttgagagtttcccggagtcccctggggagaaggggcaatttgcaaaccccaagcagctggaggaagagcggcgggaagcccgaggcctggagatccacagcaagctgggcatctgctggagaatcatatccttttccaggggccacctgggcctgggggcacctttgcccagggttccaacctctaagaaagacccgtgagggtcttagctattgaattttcaccacaggtagctcagaaatgckgtggcaaggagatgtggaccaaaggcttggcatttccttaacctcttaacacttcaaaggccccactcggagcagtattgattgggggcgaggaaaggtcttctcggagccggtggtgctctcgtctttggatcacatgcttcttgccagtgttgatattcatgttagtgacaggttctaatggccacctatcagtgccgggctcagggggttcacagactgacagctgaaaacacaagtgcaattgtctgagaaactgaaatcggattgtacagcttaccgaggcatgaagatgccattttgaaaagttggagagagttttcagaaggattgtgctataacacagtgtttcacacagtcactgagcctggtctgaactttggatcaatggctgactccttgcagacactccactgactgaccgagcactttggagaagcccaggttccctcatttgtttgttcagcaatctttggagagcacctacttttgagtcaggcattttgcaaggcatttaagaggctgagatgcaaagacaaggtctccatgcagttgtttgtctagtatgaagtggatgtgtcctctgggaattgagcactgttggggagcgaaggcagagcaccctgccgagtgctgcaggttcagaggccactgggtgggggcattcaaggaaggcttcatagaggaggtgacatttgagtggctgctagaagtagatagaagtttattaaggggacaaaggtaggaaacagccccaaaatactgaggcatgagagcccatctccggggaaggggcagctctgatgggaatgtctgttaatgatctcagtcatgcacacattctgcagatatggggatacacacgttgctccgttgtgtggtctgggatccttccagatggcctcctggattccgaaagtgtcctcgctctrcacagcatagtttccagaacctgaggccaattcctttgttcaagctaaagggactttgagcctggcagactcactgtctccaaggagtttgtgacaaaataagcactttacatgtagatagaaggttttgtgaaccagacatgaaaaatagagtgcttggggactcacgtagtgaacaggaacagtctgttgtggagttaccggtgtttatctctggtacagagagaagtaaaaaggtggggataatgggagttgtctttcccttgtattccccacagagctcggcacaaagtcagggttcagccagttcttaatgagcaaaatgccatagcaaggagcgagtcagactggttcctactgtgtcgggcgtgcacccatcaccccatttatctcctccacatctccctgaccagcactgtggctcccatgaaggaaattgagtctcagccatgaggggtagggccagggaccaacccaggtaagtttgctggcaaagtgctcacccccgagtctcaggcttcaaaggagaaggctccgcaggcaactcccacgctgycaggctggggaaaggagggacccctggcactcacctcccagcgtctatgctgggtcttgggtctttctgataggcccatgtttctgataatctttctgtctttctgttgggtctttctgataggctgagggttggagaggctctatgtgaggcaggaggcatctcttactcgggtctcagagattcagcctctggccgggcgccccatgcagagcaaggcrgtcctggatgggtctgatgcagccccagctcagcgccagcagcaccagtggaggaaggggcaggtgcatggtgggcctggcaggaggttattcattctcctgaacgatctctctttgggctcagataaaagccagagccctaggatggttgggattttgacctctgtgtccccacgcttcacagagattgagccctcccctcccctcccagggcctcattgtgctgggcacacaggggcaccctgctagtgtcagagctgctgcctcccagacaccaccctgggctggtgctgccctgggccacgtcacccttgtcggcaacctgactcctggggcggtttcattatcctgtcttcccgtcttgcagatgaaaactgtgactccacttcacaaagagaaagtggcgtggccagttcctgcaccccgtagcttgtctgccagcctgcagtccccgcccagcacatgctgccttctaatgggatgatagtggcccacagaactcttgcgttctttgaaaaccagtatcaaaaaagtacagaaaatgtctttgcgtttgacttctctattttctgtatatttgcttaataattcatgcaacacatatttattgattgcctaccatgtgccaagcacatctgccccatacatttactgatcggaagtttatgagagcttgattgtccctataggcaaatttagtgaaagagagttaacattaaggacatcatccctccctccctccctccctccctctctgcctccatcccttcctccccgcctttctctctctccctctcctctcccttccccccactctcatctgttgatgacatctggtgtcagaggaatagcagaattttgctattgtaaacctgaattcaagcagatggaaagaccaaagattgaattggctaataatttcattatgcattttaataatattttctaaacatttagactttgtacaaacatttgagcttaatttgatacccgtccatagttgtagcagttgcccacytgtagcgcatgggtctggatagatgcrttttaaaggaaattggggatcttgcactgggtcgatgcacacctgtctatgaagcagctacggtgacacgatgggcagcccagggctgccgggagctctcaccccactcttcacctgttaatgacaaatatggtacagatttgcttgttcttaggaggtgagccctggagatgcccccatcaaaggggaggggacagatacagagatgggcacttgcagtgcagcgttgtggggctgatgggagcttccctcaggtcacgcctggcaggagtaggtggagatctcagcccattcccgttcacgtagagagatgaagagggcccagggttcagcatgtgctgtgctgtcctcagcaggggacccagaaggcagggtatgagcatggccacattgatgtctttgaaagccaccctggccacagtgtgacaagtgggttgcaaagatgcaagcrcccctggggatgctggtgggttgaggagccactgcgtgagcagctctaagtcagggaccgtgagggcctgagcgaagggagtacccaggaaaaaagtgccgagggaccacaagggcctgaacaaagggagcggcacaggaagaaagtgcagaggcggccacccgtcaccaagaacctgcagggttcagacttgcaggtggcctctgagtgcctgtcccttcctctctccttcccaatcctctcttcccccttctctccctcctgcccctcccctatgcccttccctacttaatttctgtcgaaacagagggttaaactcagtagcctccttgttcttgtcccctccctcagaccccacgtgtgattgggcacccccgggcactcctcctagagtgctggagggctgtgggtggcctctgagtagcgcccagccctgctgaccagccccttctcccattctgagatggggcacgtttatcacaaggagcccagggccagagaaattacaatgaagacacctaggatcatgtcccagggcactggccgggcacagggcctgtccctgctgtggacagggtgacctgttgtgggggaggtggcccagggcggtcagccatcctgcttccagagtgggggtcacattctggtgctgggcctgaccggatgagctaatgggttaggtaccccttttttctttttcttttcttttgtttgttgttttttgttttttgaggcagtcttgctttgtcaccaggctggagtayagtggccacaatcttggctcactgcaatctccgcctcccgggttccagagattcscctgcctcagccccccgagtagctgggactacagatgtacaccaccacgcccggctaatttttttgtattttagtagagacagagtttcaccatgttggccataatggtctgaatctcctgacctcgtgatccgccygcctcggcctcccaaagtgttggtattacaggcatgagccaccgcgcccagctgggtaccccttttttctttaggaaatcttttcttaaaccctatttatcattcttattattatgactatgaaaaccacttcttgtgtggctgctatgtgttagctactgtacagcaagctttcctcactacctgccaccaagcctggggccatgtttcccacgagaggctgggaaacctggtcagacacaggcagtttcctaccattctcccaccagtccctgccccgggtgaccttggtcatggccaccttctctctctgcttctctattctcatcatgaagtggggacagcaagggcttctgcttccccggagctgcacggggcgagtccctgctcctgtggcacactcgggaagcactctccctgtgtcccttcctgtcacgcacacgccaggttggagggcttctgctgtctttgtgcatttatccttattctatcccaggatcaaagttttcacaaaggactcctcatgctcacaartctcttaagccctttcttccacatttcctaggctttcttgcccacatcagcctgctgattttaaagagaatccttccccccagccccccgacccagacctctcctgcttgataagagcrtgcttgtttgtaatgtctgtgcagtttccctggagggcgggggcatctcttcctagtacatgcagcatctggcccagagagctgggcttatttgctatacagtgatgctttctggataaaacctacctacctttggtaccttcttcttttaagcttcttcttaccctccagctaccaatactggacaattttactgaacttgggaaaccttagcatagccaactctctgtgaactctgttaatagcagataatagcctttaccacgtgatctagaaatcttctatatttgcctttgggataggactaatgacgccacattgttgaggactggagcctggggtcagaggctggccctgccactcccagcatccagaaggggagactgtgtgacctgagggccatgtactaatctgtgcagctggtgtgacggaacctgctgcagaccattgctgtcaggatgagttcgaagaatcatcggcctttttggtcacctatgggtgagcagaagcattttccttacctcagacctgcaaagcaggtagtacctacccctttcaaaacataagtaaattttggaagttcaataactcaccagagattgtgcaactagaggcatagtcaggatcccaaaacttgttattttcctgttgactgcttcaactgagatcacatctgcaaggtgcagacatagcttctggccctggaaggtgtcagcaaaggtgaatgccccttgcccgtttcctgctggaagacctcatgccacgctgctacctgacctcaggggaggccctcctgactcatccttcagagtggacctcactgtctgctcctcagagccttctctgccatcagcctccctcccgtctcggcctggctgcaacagccccttcccttgggctcctgtgacacccagtacttcattcttgttagttacagtctttaattagtacagaaaattagtttttttctgcagattttctcccttgccagattgtgccrtcttgaggtcaggtggaatcctgttcatccaacagccgtttattgaggctctaccatgtgccagaggttggactgaacaccagggcrcaccagatgctcaaaatcaggtgtggaccctgctctgatagtatgtgttctcttttgcttgcccaagtgctgtgtataatcgctagcacataggtatgaaaactgtttgttttttgagacagagtttcactcttggcacccaggctggagtgcaatggttgcagagaggttcactgcaacctccgcctcctgggtagctgggactacaggcacctgccaccacksctggctaatttttgtattttttagtagagttggggtttcaccactttggccaggcyggtctcgaactcctgaccttgggtaatctgcccacttcggcctcccaaagtgctgggattataggtgtgagccaccatgcccagcctaaaatggtttgttgaatgaatagtttccatttcaatgacacagcaaacagaatggctaccagctcagctgcgcgatgccgagtgccgtgatgagtgtgtgaaaggaactgcaactcacgggatgagtctacatcgcagcctggctccttttccagagcagccctgcacagaccgtctgctgtggaagcaggggagggacacgcttctggcaagcctagggtcaactcaccctttcattttccttgtttttgttgcaaatcaccctttggagagcatttcagggattggtgcaaggcttgctgaggtatcmgaatccagctgtgtgagctggagtaggaagaattgggtgcgcagtttggctgatccccatgaaggcgaatgacctgggccgtctgagcaatctcttcccaccaggcgcatccgcctcctccattctgtctggaggagcatttttaaccaatttggctgctttgagagtgagkyagaggctggagaagcccaaggcaaatggctttagatacccagagtaggggattggagtggaatatctgtgaaatgcggaggacaaatgagcagacatgacttggagagtggagggatgtggacggtgtaaccatgatctcagtacagggggccttgtgtcctcaaacagctgccttcccgggcacagggagcccaggcacagcttgggtctcaggctgtgcactgctgaggggtgttggatcttgcagacaacagtcaccctctgcaaagtgaagaggctccacagtggcggcggtgtttgtcagttttatttgggcttcaccagcaggacagtgtaaggattttaggcacagtggccctgtttgggtgatctcacctggaatgcagtcacactgggctttgttctccattttcaagactgccttctttccagtaaggaggagttgccttccgctgagctatcctccctttcaggacagaggcgggactcaggcacttgacstgggctgtgtgggcccacccttcggcctctcaaagtggcttctggcctattctcagacatgtttcctaatggagctctgtcttatctcctgaaaaaaattaaatatctttaaacaagattcttttaaaacatagcacactgtgtttttctaatcgttatgtttggagaaatagttttctgtaaatgaattttactataaacggctcctgccatcagtacagctgattccttgatcatcttaagtaaaatgcagggttgcattttgtatctgccttgagggaatttggcttttatagctgtttgtaataacgtggttctgaggcctttaatctcccgtagcagggaagccctgtcagccacagagagacgtcctgccttgccagccarcgaggccgtcacatcaccctggctgtttggccttcggtgggctggagggtaaggtgggagaggcacagatttgattgctgcctcccccaaatccaaatctggtggccatgcccaccttgaaatgactttgaaagtggccggggtttgacacatactcagcacagacttcagatctggaacatgagagcggggaagggcctttccccggcatccacagcatcatttcccatcttcatgtgtgtgcatgcatgtgtgtgtgaacgtgcacacggatcgacgtgtgttgtgtttgtgtgatcaggtacatgttggacatatacacactgtatttttagcgtgatgattattgtgagcatgcgtagcttatgtaatagaatcataaagttacagagcttaagtaacagctaaaacccatatggcacttactagatgccaggcaccgttctgggcaatttatacagatttattcccttcactttcacaacaactctctgaagtagttttatccacgttgcacagatgagaaaacgaggaggcccagcgaggtcacctcgcttgctgtaggtcacccagctggtccgtggcagagccgggggcacgggcagctgctgccctcagtgctgtgtgctcagctccatctaggaagaagcacaagagcctctggcttctgccagggcctcgcattatccccacttaccagaggaagcctatggagatggcagcattcctaggtctcaccactgattggtacccatcgccccatgcagagctctgtccatttcacctgctctccactgtgggactctggaatattctcacccaggcaagatttgcagcagtgagccagttgcagacctctccccttggcagcrcgtcccactgtgtgacatcttctgtccagttgggtctctcacaccagggagctcagctgagacgctggggcacttactgaaatgagagcggcaagagcatcagcattctgaaagttcatgatgcaaattagaaaacaaagtcatggcaaagaggctcattaatcatttaaagcagtctttccattagtgtaatttctatttatgacaatttgctaatttatttgatctgaagtggggctaagctgagcccttgcacctgtagtcattcactccagagcttgcgcgtgggatgcaaacagcctattttccagcagggagagatgacccaactgaagtcaccgccaccccagagcacccacttcatgatgctcaacccaaatccagtgtgaaaaccttcatgtcaaattctccatgatggagttcaagcttttgctctgtagactttggatactaaccagatgttctgagcatagcacttacttttattttatttttwtttatttatttatttatttatttatttatttatttatttatttttgagagatgaggctcacacacctcaggtctacaggttccaaagagaacctcacagattcccatctggcttcacgtttcccaggggcagagtgaactaagcaatcattgttttcytaaaatgccaaaccgggtcatggtagacttcagtcacataaatatagacaggatctcaaagctgccccatggtttcaaatggtctttgactgcggtacattaccaaatattttactgctaatggccttacagaaaatgacaaggaaggtgttttattaccttgtgcatttgctttgcatctggctgtgtttttcaaagatttggaagtgaacactcatagttcccaagacatggagattaactgagatggcacacatgaaaacatttgtaaacaaaaaggctctgtacaaatattgattaaataattaaatgtgataaataaggaagaatgactactgataataagtaggatataatccttgcccaggaggctgggcttctttaacatagggaggcccccaacttggtctctgaatccccagcacctaacacagcaaggacaggatgcgtgctctgcagggtgcagtggtggcagccagggaggacagaagggttggtttccagggtagagacatcccagataaggcaatgtttgagctctagaagatgggggtgttcaccagaatgacaaggctaagggtgctccaggcacaggggaagcagagcaaagacagcaaacagcgccgtctctggaagtgaggacccaggcacacacgcacacgggctcagggtctaaaaggggaagcggcaacaggaaaagcaagctgtgagggagcttatggattgtgctggggtgttgggactttgtcctaaaagcagtgggtcgccctgaagggttttgacccagcgagtgacgggatcaccttcaccgtgaggaggacagacggctctggtcaaatggtggaatgaagtcttcctttccacctgctcctggcctggccttgtacrtctagaacacatttggttctgtggggttgtgctccctgcctttggaaattaggcacaagagtctccaaatgtacatatagggcagtacaggtctgtctctgctttctctcccagcctcctgccctcagcccttggtgaggcctttaaagggtgtcgagttggaatgaaggaggccaactagggacaggattcttgctggtgtgtaggttacctgacttgtgaaactcatttctgctctaaagggttacagtggaaaaccagagcagtgaccctgctctgaaccatgcagcttgcagagaaggaagatgggatggggcctctctcttgggggtaattatggggagtatccggtatagctcagggcacagttgacccttgaacaacacaggtgtgaactacgtgggtccacttacatgcagattttctttcacctctgccacccctgagacagcaagaccagtgcctcctcttcctgctcttctgcctacgcaacgtgaagataaggatgaaggatggtccactttcacttcatgaataggaaatgtgtcctctcttcctcatgattttcttaatattttcttttctctagcttactttattgtaataatatagtatgtaatacatataacatgcaaaatacgtgttaatttactgtttatgttatctgtaagacttcagttcaacagtaggctattagtagttaagttttggtggagtcaaaaattacatgtggattttcgactgtgtaggcggtagacacccctgaccccatgctgttcaagggtcaactaaatatccttttttgtttgtttctgtttttttaaattctttttttttttttttttttttttgagacggagttttgttcttgtttcccaggctggagtgcaatggtgcgatctcggctcactgcagcctctgcctcctgggttcaagcaattcttctgcctcagcctcccaagtggctgtgatgacaggcacccaccaccgtgcctggctaatttttgtatttttagtggagacggggtttcaccatgttggccaggctgatcttgaactcctgacctcaggtgatccgcccacctcagcctcccaaagtgctgggattacaggcatgagccactgcacccggcctgtttctgttttttcaatgtgtatttttttctcttcaagccagatttttaaattcacggaagggattgagatctgatactgttggagagagcggggtatgacatatgcaacttttgtaaacctcagtttccccttcacagaagagccacatcctctgcatctcacatgtggcgggtatgaagctcgaatgtggctctgagttgagtgtgctgtgtaatctttgtgggctgaacacacacataagaccgctgctccgaggaagcgtggcttcctccagtgccaggtagagagtaggtgctcagtaaatcttcccggacacaagcttgtgtgggtggacattcgctgataaactgtggccttgcataggtggtcactgaaagctaccatcaggtttcttctgcatcatccctggaaaaaatcattcattcagttgacttgtacttgtgaccaactctgtggaaatgaattagggactcagagaccgtaaacctgccccttgtcctcaggatgcttaccggggtctagtttgggaaatcggtcatggccacaagtatctgaagcccagggtggctggcgctaccgtggaagtgaggcacggggcccagagccaaggggcagcctgccaagtgctgtgctggggctccctgcctgccatatttggggctgctcttcctgggcaagtagccgccccttgcccctcttctaggaggagccccacttgcgtacgccacttactcctggagttatgcttcaccatctcactggcaggggackagctgacaccgttattggcctaagccaataacacagagcacatctgtgttcccactgccttatgtcgtcccccagaaaacttcatgtgtgacctcacaggagaaaaaggctttctgagtccaaggggctctcgccctcttcaaggggcaacacaagtgcctctaacgttccacagcacccaaaagtctctgtgtctttagtgctgctttgaaggtgagctcctgaccccgtcactctggcacgctgtggacttcaggctggttatgctggaaacacggattcatgggaggagtctggacagggaagggggcactgctcttggagcagcagaccccgaatttgaaaccccactggggtgagtttgaatctacccctttctggctgtgtggctttgggagcgttacctaacatccccaaggaggcttcctaaacctgaagttgttgtgaggactatgtgggatgatctgtaggtaactgacacatcacaggtgctcagggaaaagcagcaggcatttatggagcctctaccatgtggcggtgactggggcactgtcccttcctctcccagggcttggaaccacaagcagtcctctgaattctttctttagtggcttggattgcatgttttctgttctttgaaataatattttcccacgggaaggccaagaagctaagcagttgggaaggtggggctgcctcctcattcatcttgctggtttgagcagggatggcagaggaaggttaaactgagcagggctagccccagcccctggacctcacggctcactgcctccacaggtgtttgaccagcagggcatgtgagaaaactgtaatggactccaagtaactcagccgtgtctctgaggcagaaagtggcaagcttggaggacgctgtgagaggaatttgtgtttccttgcaagggtgttagaaactgcctgtgggcagctccagatatgagaacatgagctgggctgggacgtgggtcttcttagggctcaggcacgcagggatgtcagtcattaaacagtgggcatgggttaggggacttctgtgaagcctgggttggccccagcagtgatttcacagttctgttgccagtgtgttcatctctgtctcctgagaggcaggggcagaatggtgggggtaaaaacctgttgacgatttggaaacttcatccccaagtgcctaggaagagccttgaggggaggcagctgcttcagcaccatggagagctctgtgctgggcttccctctgggctggaaaaacactggccaggcttggtgtggacactgacccaactgctggccaactgcagggccytggcacaacctggccctgtggacagcaggatctttgtccagtgggactcatggctcctggtttccaggtttacggtgaggagtcaatacaacatatcgaataatctctgaaagccagagagcagagtgtgggttcaggggtcagcctggctgggttcaagcctggcccctgccacttgctagcggcactggctttctttttctttccatgagcctcagttttctagaaaaatctttgaaatgaaaataacagtacctatctcatacccaccatattctgaagtcttagcttgaaagtggtgagtattgcagtgagaagatgcgtgttgagcacttacccagggcatccttcacagcaagcaccttggaaatgttctctatagtggcaataatgataggaactactatygtcatcatcattatggattgacctcttgctccaaatgccagggtccacgtatttaagagatagtagccacccccatcactgccaccattgccactgtatgktgtagtattacaactgtggctgtaatcgctgccttcagccagccttgccattcttgtgcacaggctgagatgcaagactgtttgggtggcttacagkgctgaaaggaagtcggatatgcatgcaggtaattagctttattagcktagctgtataattttatggctcatgtccgaaagcaaaktaatacagaaatatgctattggaatggcttccaaagctccagcaccatttggcaacttggtaattactcacaggcggacttgctccccagactaatcactgcagagcttctcagcctggccgggcctgttaggcatggtctctgctctgcaggcacggggctgctgcctgcctccaaagcctggtgtgagactttttaatgaaagtaatatgccaaaatgtaggtctttatttcaagaaagtgaaaataaactccaaagagaatcaggagggaaagcagaaagaaagaaaaacaaaaatgtgtgttttgagcccaagtgtatcagtgacttgcctccctagagcctctcagttctgaccggggtgaggcccacactcaagtgcagctgtgtcccagcgtcccaggcccatagtgaactctcaacatttaattttgttcatgatgttaccaagggcacattattgtttacttttgttatgctaatttttgtattactttaagtaggtgcacatggttcaaaatcgttttaaaaaatagacattcccatcttcccttttccttctccacctcccagagcacccacttttatttgtttcttatagaaacttacaaaatttatttctgaaataataagtacatgcaaacaccctttttaccgcaatttttttttacacaaaaggtatgtatacattttgcatcttgcttttttcacttactgcatatcttgggaaacttctcatattatttcataggcaatgttctctctcctctttcctgctgcagaatattaccgcaaagcgggagcatgcctgtgtgccccccgcctcgtcaacagggatgcttttccacttccatattgttaccagtctggcagacgggctcttgagcaggtccttttcctctggagatgtcgttttgcaggaaagagcctggcctctggagttaaagtggctccgggggtggccgttctgtccccgagtagcccgggacgtgtggttgagccctccggtttctggttctttccctgagtaagagtggcaactgtcctggccccacctagttgaagggaacaggcacagcccttgtcgtagtgcccaacatggctcaggcatgtcccaacgtgtcttcccttcccccttccactctgggacccagttggacgactctgagatttagaattggccagtgggagcgttttcttcagtgaggactggtcactgctctgagcgtgacttcgtgtgcccatgagccatgagggccgtgagatgacagctgaacgccgaaaccagaaacagtgaaactgagctcatcttgccagcacggcacacacgtttccactctcctctgcctttgattagagtgagtcacagcatggctcacaggggtctggtcaggagtggaggaagtgagatctgatgtcttttttactgaagaggaagttgctctgttctgtgggggctgcaagggaaagagaagcagcagcccccccctccctccgctgcaggcactccagttcccggggtccagtcccctcacactccgcaggggatggcgtttcctaggaggagtggcgcactcagggcaccgcagcagtggggctgagcccaggccactggtgaggtgggggcttggggcaaactgactcagcagagctgacccctcctggaaaggacagcacccccccaggatcacccagtcgtgcgcggtgaccagtggtctcgttgggggttggcattggctctctcctgggcctccccgcaaggagggaaacagctttgcacactgctcggtgagggtcttgttggtgccgggactcgacaggtagaaagtgcagggggctgccctgagttagcctgagaccttctagaaacttaccctaaatcaaaattagttgcccgaaacctctaagaattctcataaagggcactggctgtgttttcctgccagcagtgtcacagcacgcagggctggtgtggccgatggagtaacaggaattgaggcagctgcagggtggctgtgggcagggatgctggtgccaagcggttgccacagaagaattcacaggactggtcggagttatctgggagcaggcttgcatctgccccgtgcccctgtgggcagggaggagttccgctctgtgagcatcacgtggtgctacgtgacatcccaggttggggctagcatcctgcctgtcactcaaagccagcaagttgtttgaccttcccgaggctcggtcccctcacatgttagacggtactggctgtgtgtgccgactttgtgccaagggccagcatcagttacctcctggtgtgccagagtagatcgtcagggagccactctgttcctcatgctgaagatgagttgtgggtgcactgctggtgaagggcagcttttgatgaataccgtcattttctttatgcctacattcatgcagacttgccatgcatgttttcattacattatttaatccatgtttatggagctacttttggtccgaggagttgcatgagacatgagagcttcaaagaaaggtgttcacggttcctcaagggaaagagacatgcaagtgccaactgcagcattgctggatcacgctcgaaagagcattgtgcagaccgccagggcaggttgggcatgtggctgtgctcagttggctcccctgaggggcatggttgtgttgggtctgaaagagaggagtctgccaggtagaagaaggggagggacattccaggaagagctgggcacagagcctgaaaaggagagagcagggtgcgtccaggtctgcggcacgccgtgaggatgtggatctccaagtccactatgaaaacagacatggaaatggacagttagcatggagcccctgaagctccacaggagaggcatctcgccagggctgtggggcacagaggaaggagcccctcaccagggctacgagaaacacggcacgtcttggtttgtaaatccttagagggcagagtgagtttaactcccacagggcctgtagcatcagtaaggttgaaagccttcccctctatcttttcatcctcctgaccacctgcagaacgggcactggggactccctctgtccagagtaggtgtcgttgtggactgaggctgtgaacactgcacccagggcccctccccctggctgatagacgactgggtgccagtgatggtgcagcttctacagcagaggagtgcctgtggcttgacacgcttctacagtggagggatgcccacaccatggtatagcttccacagtggaggagtgcctgtgcctcgatgcgcttctatagtggaggagtacccaagctgctgtgtgcttctatagcggaggaaagccagagtggttttggagcaggtgtgggtcaggctggggcaaccttaggagccctggaattgagcagttttggaatacactgtacagtttccaagaaaataaaccgtgggtgcctgtcccaaacctgtggtgcgtgttacccgtgactggcagacgtcatcatcgtaatgctcacagggccagccctctggcctattctttgtcttcctctgtctccacattttctcctgtgtctctttatcctagtggggccctaggacctctgcctctgagattcttgagggcagacagtcctgagagctagactgtcatcagttcatctgcaggaggttctccttcacctcctctccagagagaggcagctggagtctcagggccaccttggtgctcccctccctctaccctgaccttctcctaggaggggcctggtatgagccatcgtgktgtcccttgggtactacatggggagagagggctccatgccggggtgggggccagagcagcacagcagtgcaggagatttccctggccaggaaggagcggggccctgaagcttcttagcagccttgcctttgtgcgggactcggggtgctgcggcgcatgtgcttgtggcggcccatgtatgggtatgtgcccattcacactggtgtgcatgcacatattcatgcagaaacatgacattcggggcctggtattgttgcccagtttctgtaacttggaggcctttggcagtggctgagaacgcagcctctgggggcagagtgggctgccatgtggtgtgtggccttggccagtttcttgacctttttgtgcctctttccttctctgtaaattagataatgcctaccttgtaatgccatgatgaacgttaaatcgctgagcacgtgtaagctgcttagagcgggccctgcctgcagcacgcaccctggagatgggagctcttggctgttggtctgcccacccccacaagtgtgcagatccatggggttatggtggactctgcattttttgcttgccctcttgaaagatgtcaagccccgagtttgatgataactcatggattcagggagccccagcggggagcagggtgcagccaatcccacctggcccgtggccaccagaccaggagctccaggagggtgccgcatgtgccgctgagctgggttcgggaccctgcatccagcccagrgcccagcctgagtggatgagcacgtgcatgaggaagcataggcgtgggaaccacatagccctgggattgcatcctagctccagccctcacccagcaagactgtagggagggtgaagtgcaggctcctgggctgagcacctgccccttcaccactggacaggtgtccctgggcctctccgacgtgccagatgcatgctttgcttcctccccttccttcagaaaagttctttaatctttgctgatgagattcccttactctcacattcctcaccttgacaagtaatttaatatggtgccttgagcattaaaatgaggatattcaaatctgtgggttcaaaggaagaaaaacaattcactcattatctgtggcaatgaaaccctgcaatgccctgctcataaagacacaaaccttcccagccaatgagttcttaatactaagcaactcctcttaagaaaataaaatttctgggaagctgagcgtgggttgccgtttactcaggcatttggccgtggacagggtaggggaatggagacccattcgcttcagccatagtgaaagcaggtggcctaatcacggagctgaacagcggtcccttcttgagagccagtccccaggcacagacagccacagatattttcttttttttttttaaatttttaaatttttttattttttattatactttaagttttagggtacatgtgcacattgtgcaggttagttacatacgtatacatgtgccatgctggtgtgctgcacccactaactcatcatctagccacagatattttctaacctcacttggggcctgaatcgcctgaactaggtgctgggttatgagaacagatgtttccaggagtgctcagtccctgagggagacaagccttcgccttcccgtatttgaaaactgagaaaacagaccgggaaggggtccctcacaatggcctttgacccctcgtcgcccagccaggccagccctctctccacctgtgagcctgccacatatccagagcctaaggtcctcccaggagatgcctaggaacctggtttcacctcaagtctggggcttggctggccatggactgccctgggcaggcggacatggtgtccttgggcctggctgtttctcctgagaagagtgcagtggtagggagcaagctcaacctctgcaaatgtccctgggcctggagcagggcacctccttagccctgatggggtgctcggaacggagagcacgaatggccagatgcccgtagggcctgacctccctgttayggcttagggcttgggaagggaccacacaggtcatgcctgaggtcccaaacaccccggacatccaaacccactgggttccacgtgtgctggctcgttgagggagagtcggattcgcttttgcaaaaagataaaggagctgcagggcgctgcttccttgaggggtgcctcgctgctgctggcgctcaaaacaggcccggggcggcggcctccgtcctcatcgtgggagatgcaggaaggcaggaccccgatccccagctgttgcttcctgtgcctactcccctagaaggagcacccctcatggagatgcagcctgactgctgagggaggaaatggccactgacgcaaaatsaatgaacacacagggcggctgcatgcttgattggaggaagctgcctgcaaaattgccttaggaaggacgagggggccgcaggggggctgtccttgtccagtgcttcctgagctcctgctgtggccctctgctcagatgccgctaccctgcgagatttctcagttctctgttcctgattatggcttcctccgggcttccttagcgtcgctctgcttcctaattatagcctccttcctgggtcggcattttaagaaaatctaccttcgtaactgtgcttcagtgtccagctcaggagtgtgaaacattttcaaattatcatgcagccattgccaccatctgcttcccgaactttttcaccttcccaaactgaaactgggcacccatgaaacactccctcccattccttgtctccctcagggactgagcactcctggaaacgtttgttctcataacccagcaagcacctagttcaggcgattcaggccccaagtgaggttagaaaatatctgtggctgtctgtgcctggggactggctcccgagaagggacaactgttcagctccgtggttaggccacctgctttcactatggctgaagcgaaggggtctccatttccctgccccgcccacatccattctgtctctgtggatttgaccagtgtaggtgcctcagatcggtggaatcataggtgtttgtcctgttgtacctggcttattccccttggcataatgtcctcaaggttcatccatgttgtagcatgtgtcaaaaatgtccttttctttaagggccgaataacattccattttgcggatagaccacattttgttgattcattcatctgttggcagacttttggttgcttccaccctttggctattgtgaagatcactgcagtgaacgtgggtttgcaaatatctgtctgagtccctgctttcagttcttttgggtataaacctggaagtatgattgctggaggtcagcatgttctgaaaagactgtctgttgggtcacagtcagctccataaccctaaaccctagctcagatagctgcctgttaactattgaatgaatgaggtgaatgctagaatccgaacttccaggattgtcacagggcaaaatgagataattaaaagttcattgcagagtatttgtcagtaacaatatcagttcagcaaacataggctgtgtgtgtaatgagatggagaaaatttcgtttggagaattcttctaagggagggaattatctttgcaggaaacactttgataaattgcttgcgygagagtaagacccccaagggagttcgaggcaacagaaatggtgggtgaattcctggggcaaggagagaagtttctgcatctcctccgagagggaggaggaacaggagagaggagaagaatggggatgaggctgatgctaacagtaggtgacacttacttaatgctacccacaggccaggggtatgattccgtgcactcctcatgacggccctgtgaagttagcactgctagcatgctcatcttacagatgaagaaagtgaggccagggactttaagtaaattaaccaaagctcattcgtgggggtgccaggattcaaagttgggccgagtctccagaacctgcccttttcggcaccaagctccacgaagagaagagagggagcagagccagtgagggcaggagctgtttactcagggccagggcatctctgccggcctcagagcttcagccacagctcccaagccctcggattctctactgagggaggacgggatgagttagacatttggggtgctgtggaatgaagcaagcagcatgtgcggactggagccaggagcaagaagaccctgagcagtgaaccctgagaatgtgcagaagccatcagcaggcccacgggtgtcaggtgcaggaaggtttgctgagtctcatagccactgcactgtgctgcgtgtggaggggctacgggctgtgctgctgaatgaggcgtggcctctgcactcctacctgggacatttgctcatttagtgttcatttattcatcaggcaatatatattgagcaacttctgtgaaccaaacactgttctaggccctaagaccaggtctctgccttcatggagctcacaggctagggctgaagccaagtaacaggaagatgaccgtgtctagcacaggttgtcatgggatgcatgcacactttctggagggttcctgcaggagaagcaaggtcaggttgagatataaagtcagggaagagaagagggcagggaaagacatttccaggcagaacacgcagagtgtgggaggggaggcttggaattcagagagagcacacagtatttgggaagaattgaaagaagtccaaaatagctaaactagggctgggcactgtggctcacgcctgtaatcccaacactttgggaggccaaaatgggcagatcacttgaggtcaggagttcaagaccagcctgggccaacatggtgaaaccccatctctactaaaaatatacaaaaattagctgggcatggtggcgggtgcctgtaatcccagctactcgagagactgaggcaggagaatcacttgagcctgggaggcggaggttgtagtgagccgagatcatgccacagcactccagcctgggtgacagagtgagattctgtctctaaaaaaaaaaaaaaaaaaaagctaaaataggacacaggagtgggtagaggttcccgagcccccagggcagcatgttgctgaccttagcctgtcctgctgctggtggctgtggtggtgtgaccggcgggctctcttgggcagccttcttgtctggacagccctctgtggctattgcattggaccattgatgagggggatatgcccgctctgctgagcacctctgagcccgactcccccatgagccagcaggagagacccaggggcctccatttcgtcctgctccctctctctcgcaatgctcagcctctgctccattctacctcagactgcaggagctttgttcccataggactgtccctggggttggccaatgcgattctcaggttctacgttgctgccttcaccagaatgggaacctctcagcttcagggtgcgtggcccacccttccttcatcctcaaggccacaccacctgctgtgcatggtgtgcttcagatgaactggatgtgtttgttgaatggaattaatttatgaaaggaagaaggaaggtggggtattttctccacttttgcagtcactagagaatgtcagaaactaaaattttccccttttattgcaacttaaatgtggtggctttaacttatgtaggaaaagggaaagaggtttacagatctgagaatcacattggctgtttaatactagcgcaagggagatttctgttttctacatttttaaacctaatttcttcacccactgatacttgctgagagactttatggcttcctcgattatgagcttgcttaagtgagttcgttcrtaataatatgtgtaattacatcaagaaggataacaggaccgacgtgaaaccagcatgaaactgacgcgtgtcaaagaactcatgggttgtattgaacagtgaaccagtttgcatattttattaaggaaaaataaccttccatttctctttattttccccagcaagaatagttgttggattaaaattatcccagtggatttccctttcttacataacagtagtttaatttaccagatttgaggggtaggaggacaagcacttgctgttttatatgcccctgatgtccacatacccagggtgatgtcatagtggttggttagacagtcccttcagaagaggggagacatctgctgtaggaggtttcccatctgagggtctctgtctagagacttctagacgttcttctgtccctgggctccrcaggagttgcgttttccttgaccaaggctcacccctccctgaagcgcagtggcgaggcgagtgtggaaggactcctgaaccagctcgtcctggagcacctgcagctggcgcctctgcagtggggtgagtacccgccagccrcccatcgattctgggtggatgtgctccttttctccaaatgcacgagcaaggtcttggggggtgtggctgggcaccccaaatgttggtgggtactgaaggtcatcacgggaaaccttgggggaaaaagacgggctcaccatactgcgccagcacctctgtgtgaggtcatctttgttcacctaggygggcagctcagcactccggtgacagtgcagacatgagaagggctcatcgcccgttgaaacaggtgcagcaggcggatcttggcctacatcttgacttgcacttggtgtagagtgggccgtcttccgaaatggcaattgactgtgtctggcggggtgtgtgctctgcaactgtttccagaactgagagtggcttgggatggcaaaagagaacagggtgtggtgaaccccttgcgttcaccccactcaccacgactatgcatggacagcttttcatgctgtctgtgtggaaaattgtttggtttgtaaatgcctcaactcaacgttgtgttcaaccccaagagaacgccattactggacacttagcacagtttatttgactgcttcttcttgttgcacctgggaacttccaccctacactgtgcctttctacattgaactcaaaaatattttgctgagaaacaagcttagcatttcttttgaagtgagaatctttattatctggaaattatttaatcagctcatctattttggatcccctgcagacagtcagttgcaagcatacatatcccctttcttcctcttctttacccaagaggtcattgtgaatgagtagctcctctttgatccaggatccggttcattaataaatttgttctgcccctttcatgggctagagacacatggaaatgattccagtggtgtgaggagaaaacaagcctttctccttgcactccaccagcgcccttcagcctggagaccccctgatcctgcagaggctgcctcctggctcctcacaggtgaaagctgtcgggaccaggtgggcaccrtcatggcggctatgggtttccattttacactcgggctccttctgtggcctcttcctcctctctgagccagcctgagtggcaggaaggaaaggcttggtgtttctgcagagggtttcacagtttggttctctggaggcttccctgtagcccagccacttttctaggtggraatgtcctatctatctcctgatgacctgagcacagtcagccgtgtccctagactcagatagctgagccgggaaagacatctgggcccccctggccgtgagatggggtcaggcccagggggattagctgtattttatctgttgccagaggagattccaccaggtagctatgcaggactttcatggggcaaatgagcgaagggagggccacaggcagaacaggggcccaagagcaaagaacagagtgacttggggtggggaagtgggcagcaggtgggctcctcccttctgtctgagggtcggcagccctagccccaggtaagggttttgagatggcttgggggcctttgtttgggtaggtgaccaacggggcacccaggagcagagccctgggggagaggttctgatggtacaaggctgagcggggagaagtccctgcagtctggaaacaatgcccttcccagggcacgaactgcccttgacactgttctaggtgggccctaagggtagggagggttctggaattggagaggcacaggacagagaagagggatttatggtgtgccagacacgtttacaaatgtcgattcactttgattctgagcctcagagcaatgtgtgaggtcgccatgggagaggtccatgccgccctaagatggggaaatggaggctcagggtgcctccctggtgcagcatgtcagattggattgttgagcatctcctgtcccaggcattttgcataagagctgccacgcactcctcaccacagtcccgtgagtgaggttttctccatcatttacaaacagggagactaaggctcagaggctggcacttgccccaggggctccagagtgagcagagccgggagcactgcgttacaggccaccaggcctctaccagccagggatgaacctcagcccggtcctgcctgaaaactggtggggcgsctggaagaagcctgggcaatttgggaatttcagatgaagaaaagctttagtccttaatgatcataaaggtcctttctgttcattttgccctctcccctgggtgtactaagaacatcctttaaaaatttacaatagtggggaaattagagagaacagtggacaattagagccaggactaggaagttggtttggccccaggacgcctctcagcacagaacagcctggaagctgcacacgcctgtgtgggcagaggtgcctgccgggaggcgtgaaggctctaggctaggctcagccccctgctgtgttacatgctgcttccatttcttgccctgattttcttcctctttgtactagttcattttctgttgcttatagcagaatacttgaaactgggtaatttataaagaaatgtatttcttaacagttgtagaggctgcaaagtcccaggtcaaggagctatgtctggcgagggccctcttgctgctggggactctgcagagtgctcaggtggtgctgggcatcacatggcgagggagctgagcgtactcatgtgctagctcaggtgtctcttccttttcttataaagtcaccattttcccrcccatgagaacccagtcatccatcaacacattaatccttgaatggattaatccattcatgagggcagagccctcacgacccaatcaccaattaaaggctccagctcccaacactgccacactggggattaagtttcaacgtgagttttggaggagacattcaatccgtagcacccttttttcataggggggctcagggatttcttttggaaatgtagtttggttccatggcctctcaggatcaggtagccctggactcagatcccagctctatcatgtgttagctatgtgaccttcagcacatcacttcacctctttgagcctgagtttcttcctttatggaatgggatgatgcctgctggataagttactccagggattacatgagatgatgtctattatgtgctcagtgcagcccctgctaccatrcactattgtttcctctgagacccgcacctgtctcctcgccaccctcctacccmctgtgctgactccctttccccatagatgacgtgggccagtggtgggaccaggcctgcgcagatgcatactggcccccacagctgggctcagtgcagggtgagaggtgacatttcattgacgttgttgaccttgtttcactgcagcctctgggggaacaggtagggggacagggtgagagaaaagagccgtggtattcactgcactcttgtctgaacgcaaaggccttcttcatggtgcttcagtcccctctgtggtgtagtagaggcttttggtggagccaggggtcctggatttatgtttcggtccagccacgtgctgcgtcagggaggcaccctgagcctccatttccccatctcagggcggcatggacctctcccatggcgacctcacacgttgctctggggctcagaatcaaagtgaaatgacatttgtaaatgtgtctggcactccataaatccctaccgcctgcaaagcaatgatttattataatcacttctgttttaaaagctacagagtcttttatgcagatatttctgttattcctggaagatcaacccagttctaggagccatatacccaagccctggtgtgaaaactcacaaggggctctccttgaatctgtggcattcatcctcaccacccccttgcccaccccagggactgggcagtgcatagacccccttcctggcmtccatgcatggtggggccaccatcagagggaggcccaggcaggagctcttcagtctgggggacagtaaggagaggggtgaggccctgcggtctggagtgtggcccacggcattaagaggtggttacatgtttttcttgctttcagcgagtcggaattggcccaagagctgccatctttttctgtctctgttcttggagaatttgagaaggtggttttaaggtctcgtttgcatggcatagagagatggttagcagttggtaggccagctgtttttttctggcatagagagatggttagcagttggtaggccagctctttttttcataactaaagaaaggtagccttgcctttgttagggtggtggtttgagacgcagcacttcagccatctgaggacagtcatcagatgtgggtgagtgacttcatcatgagaccagagcaggtctatttgctagtttggaggacataattcccgcttcagcaggttgttaggcagctcaggtggtataaagggtggataggagatggggcgcttaccacatgtgatgctctgtaaatgagtgctgagcaaaccaattggcagtcagatctatttttgttaaattattaaggtttgaacagaaaatacatctggatctaaaggaattcggattccctaaaaagactagtgaaaatgaggttcaacttgtcttaatatattctatcaggcaaaagaaacaaattccccagggaggggtagtccagctgctgccactcctggagtgagcctgtggacagtctctccagccagaggccaccagaggaacctcgggagggcaggaggctccttctgcagcaccacgtcgtttcttccccaggcttgctttttctgtttggtaattgatagtgtttgggttgccggttgtgggcacagaggcatgttggcaaataatgcgaatataatccctttatcctggagaaaatgcatggcttttaagaaacaatgctaagatctgaaaggcatttctgccttcaggaggtgagcctgtccctgtgggagccccggcagtgagcagctcagcggtgcgcttttagtcgctggcggcacctgccaaggccagggcctagcactacagtgtggaaccatttccagaaatggggcatgatattttcctgtttgcagtgtcacagtttatctcactattatcatatcttgctgtttccagtgaacatgttaatacatacattttgattcgattttctgactagacaagttttctagttaagagttactgctaggtcaaaggctatgaacctttttagggatcttgagatgtttagtcatcacatgggcacktgactctcgattgtgacgtgggcactgttggaacttggatttccaaggtgatcttccaagggggcacaggacactcagccttcccctgtgaggagggtggggagtgcagggagggtctgggttgggtcaagtccttaaaccttaaacgggaccccagcacattcttgagactttgcaagtcatagggcatgggagctgaactgggtagcaggggtcaaggtgactccagccccctccccaatgctacagctggatctgtgagtcccagtggggcaagggtcttgccatggccaccagggtatccatttccactcctactgcattctgccacttaagaggcccttggcatctttgctttgcttgggagccatggctatgccggccgcctgcacacctgggttggtccctgactgcagcaagatcacagtgaaagcctgcagggacctcagctgagttgaatggcatctcttcccgaagaagccatgtgggggttttccatttctgagcagagtcttctctttgagcattgtttgggatcacacatttatatawctgtgtatatacaaagagagggagaacaggcaccttgccctgtgacttatagttcaggcccttgggatgtggaggaacaagcagacgcggaccccatggaacgatcttggcttcaaatcccacagacctgcttctggtctcaagtttgctgtgttttgccaagttggccgagtgccctgagcagttacttatgctctgagctctggttctctgtgaagtgttgtgactcacccaccttgcagggatgttgggagaatgaaacaagctaacacaaataattccttgccatgtaaccagtgctcacaaatcgagcatttaaaatctccctggtttctttctctgtcttctctctcttcattccctcgaggaactccaggctaggagaggaggtgcctggtgtaggacagcagggccaacacaggggaggcctggggagagcctgcgggggccggagcagcctgatcctgcaggcagagggcatttgggaggaggggagatggctctgaagggaaggggctgggatggtgttgtggaggagggagctctcagttaggttagagggatgggttgagtttaccatctgggcagggacaggtggagagttcagaccttagttagccagccacggtgtggtggtgcatgagaagagggtgagttttgtctgcccctcactatgaccacgtcctgcacctgccttcaggcccactgggagcacgtgtggtgcagggtccacatccagggacacagcccaggaagctcccctcccatcccgcgcagtggaatccaggtctcggacccacccactcctcacccccagccagggctttggggctgccgtgttccctgcgccccaccccmcatgacctgggctcccctcaccattcttccagagtcccctccaaggatgaactaaggctgcagctccctagaagcccccatggcctgtgggagtttctatcacacccgtaggccgccatgccgggctgggccctcgttccctggcagactcagtatccccagctttggcctggcctgactgattctttctctgacttggagcaggctcactaattcagttcaaaaaggaaaagtttcttcttgaatttttgaatttgtacatagttttgagacaggctcctgcttatcgctcaggctggaatgcagtggtgcaatcatagctcactgcattcttgacctcctgggctcagcgatcctctcgcttcaaccacaygcagctaatttttgtatttgttatttgtatttgttaatttttgtagagatggggtctccctatgttgcccaggctggtcttgaactcccggcctcaagcgttccttctgctttggcctcccaaagtgctgggagttcaggtgcaagctagcaggcccagcctctaatttcaaagcaactgttttgcaggacagctcacctgctgggccaggcgtgaggtctttaggttgttatttccgagccctgccacagccctgaagcctgaggttctcccatgtagaggaagaacttgagctcagcacagctggtctcccccagcactgcacagctgggagggaacagccccaggttcaaatatgagttccttccaccagaatctcaacctccggctagatcacttcatgaaaggaatatattctcatggtagaagatgagagacaatcagaaaacatagataaaaaaacagcctttccctatccccaaaacaacctctaattcatttttgtgcattcccaagtctttttgctamtttccaattctaattttgtccatagggatgatcctactgtatttatacttctgtgtccctttttacgcttgacaaaagtataagcatttcccatgttataaacatgtctcgcacatattgttaagggctgaactatactttatcaaatgaatacaagataatttaatacttgttctattgttgaacatttagattgcttcagaatgtttgctattataaaagttacatgtagtggctttttctagagccttttctgtgttttggggcgattccctcagcgtggattctcagaagttattaatattttatgggatcttggcagagagcaaagctgtcaactttattgtgtgatgatgacagcagttgcgtggctcggactggcaaggagtcagcgctgagccaactggggtctcggcacagcctccgctgcaccctcgtggtgagtcttgacttcagctgatggtcaagtcctgtgaacttgggtttccctcttgtaaagtgaagatacttagtggaggtttgaagaaacccccaggagcccagcagagagcatgttcctcatgttcctcaggcttggagcccagcagagagcatgttcctcaggctcacagaggcgggtgtgatctttgggggctgtgctgtgggtgctgatgccagactacgggcagtgggggaccacmagaatctccctgcttctggggcctgaatcccggagtgagtgtgttcctgctgcagagggtctgatggcaaggcaggaggcagagggcagggctgggccaggagcagggccatgctcacaactggaccccgaatctgcacatcgggctggagctcccgagacccctccgtctcagcccatgaacagtcctggaaagggtgtgmtgctcccatcctccaggtgggaagagcaggaggtagggctggacctttctgtgcctgctgcagaaacccagcatgctccctgactgtctattttgaggaccatcttccaggcgtttccatagagacccggtcatggtgactaatggggctaggcatttgccatgcggatttgagtgtcccacgactgtgccaccctccgcctgcctcttccactgctaacactttcctctttatagctctttgtattttctcagatgcatcaatgattggtctgtgctgtctttcatagacatccagtgaatacagattaggttttatccacattatggagtggatattttcagtacacattctccaactaatcaccaagcaaatcccaccgtgagctccagttctgagctgtgatgtgaaggctgcacatgtgggaacgagggcaacaccagcctgggaggcagagcagccacctgatagcttgtgtgcgagacagtcctctgccttatcttggaggagatgtggtgctctcacatttggggagcatggctcaaggtccaaactcttcatgactaggagagtatagcggacagcagatacaaaggcctagaagagtgaggtggggctggacatggttcgtggggacaaatgattgctgttgttggagcctggaaccacagggaagatgggtgggctggtaaggagagggaggtgaggctgggggcctaaggttgcatggaggatgttgattgattgattgatccatccattcattcaataaacatctgttgatcactactctgcaccaggcactgtcctcagtgctggggacccaaaaataaactcaatccctgccttagagccactctctgtcagatgagggctggggttccagatcagtcagcaggttgtttacacagatcctggtatttgctggcctcagagcttgtgcagatgtcccggaagcagaggcgagagacagactagagcctgacccccagctgccgccttcctgggaaggagtcccggtacgcatgaggatgtggctcagaacccatgggcctccccgaggacagaccacctggagcaggctgtggatcccatggtgtctgggtgttgctgcttccatcygaacagcaccttctgccctgagccagctccgttcaggagtctggagcccacggtgccagcagccagwgctctgcctggtgcctctgaggctgagctgcgtcctggtgctttctggggctttgcagagagacatgtccctacagcgagaacgtgccctttcatcaaattgtgtaacatggacatcatgtggggagctttgtttatttctaacatgaaattcatgtagaatggctgctacgagttgctgaatacattcagagctcagactgcctggaaaagggagtgagaaagccggctcccactagccggacagtaggacagccgcaccgatggtggcagtgggtgccccaggccaccctggcagctgggcttgcccaccggccctctgcctccttcccaggtagcttagcaacagcaccagcagtggatttttccagcacagcccacatctccaaacatctgctccaggccagtgttagtcagtacttctgaggcctgtggaggagcctccgcccactggggcaggtgaactgggtggttttgttgactctgagggcctggtctgcctgagctgagagccacttcctggagaccacgatggtgaattgggtggttttggtgactctgagagcctggtcggcctgagttgagagccacttcctggggaccatgacggcttgtggcaactggcctgaggcccagcttgcccggcagtgggtgtggggggcgaaggctgtcgcatggcccagttggcatccctgggcatgggttgacaaagaggatcgtttgtttttctttacaaaagtagttaccttctttttgaagggggaaaaaaaatgaaaacaacctatattcagaggaaaagccccagctcctaatcccccatttggagaggcctctgttcacaggcccccrgtgttccatctgtggacatggctgctgtgtttcaggcgcagtctcctttctgcgtccctgtggcaaccctggaggaggttgctacgacatccctcatgtggacgggagaaaggaaacctggaatgtggcagccccagggccacctcatcccatctgaacccaggyagcctggatgcagggcctgtccccaccctgcctgctgccttgtctctctcctctccctcctctctcttcttcccccgtcctgtctaccttcactcctcaatcttctatttagctgcagacatctctgtttgaaataccatttgggagcctgcttaattgtgatcttgatccccaaaagaaaaagtgtttgtggagcacctactgcgcctttcaggaaggcgtaacttccagcgtcccctcatctgttcctcccaatgccccagtggggtaagcactgtctgcttttggaagaaaccggtgggtggagaggctttgtgactggtcccatagctgctgtccctgcccccggttatgcgcgtgtgggacttgtctttcccacggcgctcagggcgatcttccacctgtggccatgcttgttgttctcctacctggagaattctcatggctacagagccctgaggatggactcccaagcctggcctttggctcagaaggccccccactgcccacagcgccttcttcatccttgcctcccttccctgggcctgtctatcttccctgtgacctgggctccaggcttcctcagctgcagttgcttgtccctgtgagccatgctccccccaggccttcatacctgctgcctcccataggcttatccagccctttccttctaactcaggttcttgtaggcagcctgccttggcctccctggccccacacgtttgtgcctcgcctgggcccagctgcatttccgcctgcgcgtttccccacccccagcatggtgtctttctccttaaggttgtactgtctgcgggctgtgtcttccgctgctggtgggtgcctgagaatgcagcagcatcctcagcacctgygggtgctcagtamgggtttgctgactccatcaaagagtgaatgaggccatcctcctcctatcggtccaaggccagatttgagcctaggcgtagatgtcattcttccacatgatttaaatagttccatgttgatgtgcccagatgcactgagacagtcccttattatcgcttattaatgtttcatttttccatttataactctaaggcacgtattcctggcatctgccttacgacagccctggtcagttcccaaggatccattcccagagcagccttactggtgcagcgtgcgtgcctgtggccagcctggccttcagggtggttgactgacccatgctcctgccgagaagaacggcctgactgtgggtcagtctggatcctcggcaaggcagcagccagtttgagaggatgtgcgctccagtcctgggagagggaggtactaaccccagagccagcacagaatgtggcaccatggtggctgggctggtgtttgtttccggaggccagaggtggactaggggttctgatcctagagccagggctacatctttctgagccaggtctctggagaaaactccagtacaaaggacaggaatatggccgagaacagaagccaagtggaacgaattgtcctcccagcccctggctgcttccacctgaagtaactctcactgcaggaggccttcatcacccttgtctgctcctgcatgacaccccctcccatttacttggccatttgtctgtcctcttcccaagactgtgagctccttggaaacagtgactgtgtccaggcagatgagaggaggtgctctgcctggcttcctggatcctcctgagcagggcatggcactgagggagagcaagtgcagggagcagttggcttacccccggcactcactcacagcctgatggaggggtgggggaaggtgctggggagaaagggacagttctgcccaaaccaggatgctgggaagggtccagctgatgcacttgtgagtgttcacttattactgttatccttttatgatgaataatatgatcacctatcagtgatcaatgtgttggcannnnnnnnnnnnnnnnnnnnnnnnnnnnnnnnnnnnnnnnnnnnnnnnnnnnnnnnnnnnnnnnnnnnnnnnnnnnnnnnnnnnnnnnnnnnnnnnnnnnnnnnnnnnnnnnnnnnnnnnnnnnnnnnnnnagaataattttttgttgaatggatataattttgttcattcattaggtgatggacatttgggttgagtgcacttttctgatagtgtgaataatgatattatgaacagtcatgtttaagtttctgtgaggatgcatgttttcatttctattgggtactatcctaggagtggaattgatggatcatatggtaactctatgtttatatagtatgaagaagcagctagattgttatccaaacaggttgccacatatccatctaccagagcacacacccacccatccatccatccacttatccaactgtctacccaccaacccatccaccagcccacccatccatccatccacttatccaaccatttacccatcaacccgtccaccagcccacccatccgtccatccacttatgcaaccgtctacccaccaacccatccaccagcccatccatccgtccatccatccatccatccatccacccacttatccaaccatttacccatcaacccatccaccagcccacccatccgtccatccacttatgcaaccgtctacccaccaacccatccaccagcccatccatccatccatccatccatccatccatccatccacccacttatccaaccatttacccatcaacccatccaccagcctacgcatctatccatccactcatccaaccatttacccaccaacccatctaccagcccgcccatccatccatccatccatccatccactcatccaaccatttacacaccaacccatccactggcccactgatccatccaaccatttactcaccaacccgtctaccagcccactcatccatccatccactcatccaaccatttacccaccagcccatccaccagcccacccatccatccatccatccatccactcatccaaccatttacccaccaacccatctaccagcccactcatccatccatccatccacttatccaaccatttacccaccaacccatctaccagcccactcatttatccacaagcccatccaccagcttatccaccagcctatctacccatccatcaactcattcatctgaccaccatctgtctgctcccactcacccatccattcatccagccacccactaactcattcatctacctacccattgatccattcacccacctatccgctcatcagtccatccacccacctacccacccacatattcgtccattcacccacatattcacccatccagcaaattgctattgaacacctttggtgccagtctgtgctagactcaggggggctgcctctggggtacctcagctcttactcctcctcctctagctgcctgctgctttctttaagagacatctttttttggaagggtaatttctgcagtcgtctattcctgtgggggaatgggacatggggccatgcctttcatcatttgattcagattccaggaaatataaggttctaatagtcctcctcagtgtggcattaggccaactggtgtgctcctagtgccttctggctcgcggggctggggcagaccctccagcaggaaatgagagacacagtataaatgcctgcaggtgctgaggaaagggtgatgtgagtgcagctgtcaggttctgaaaacaagctaaggaaagaagtctgaaatctccatagagtggcaagtagcaggttattaatcctaataagccaagagctaataaaaatggactcaacatagcatgccctatgcctacccaaggtgggcccaggtgtccgggttataacaaaactsagccacagagcgaaggcacctctcagctggcggactctcacttgtaatcagcataactacctttattgagaagcctctactgcagggactttgctggcatttaaattcactcatgtcacacagtcctcacacaacctcatcagatacataaaaccacccttgttttacagagagggaacttgaaaatcataaagctgatttcatgaccaccagcgagtaagtgtgggagcgaagagagacggcccgcctcccagcactgccccactccccacttccaagggaaagcctcagaatatcagtggaaagcctttctcccactgcatggtagcccctgcaagccrgtgcactaagtgtttatttgctttatttatgttgcaaagaaaaaatatgcacaaacatacttcagaatttaggaggtaagaaaggatgtacaagtctccttctccttaaccctgatcctctccccatgggctgctgttgtcccatttctggttgtgtctgcagacatagtctgtaaatttcttttccttaatggtgtcctgtgacagctgttctaccatgtttgtttatttttattttttcacttaatggtagatctcgggtatgtttccatctccatcctgtggagctggtgcattcttttgaacctatgcatcagatgcatcctcctttatttactctgtaccttttgatggacgtaggttgtttctaatgttttgctgttataagcatgatggcaacaaatatcctcgtgaaatatgtcattcctcaccagagtgagtcgcactgtatgatattcctttcaaatggagcaatctcttaaaaaatatcttctgtgttggaaccatgctttaaaagacctgcttcatttggattacatttttaaaacattctcccatrttttctcctggtacgttcatggtctcatttgctttaatattcaaaycttttatttatctggaatatactaaggtgagkgcggcatgggtcctccctttgtttttctaaaaagccacctaattggccccaagtcatttaatcaataatctatcttttcccaatcacttttctcatatatttagggaaattgttggactctcttctgtccgtgtacccaggagtgagcaccacccttgtagtcgttctagctttacagtacagtatattttaatatctgctatagatagtcctccctcaatgcctttttgcctttctaaatatctacctgtgggttgcatatttaattcatttaaaatttcctattataaatacagttatttaaggatatgaattttccggtggtccctgtttctactcttttccatgttctagaatttaatgttttaatgtttgatatgttttaggcattctgcaattaatttatatttcacttctgtcccgagagttaaawgatagtttttaaaaaaacttcctatggtaattactttgttttgttttcttcttttgttattgctttctaatataatggtattatcagttcaatactatttttaccacttacaatttaccaagttttctttgtgctaagatttttgtaactatgccatggacatttttaaacaagttatgttccttgttttaagtgtattgagttgaaaatgtatcaattagctctactttattaatgatacggggtagttctttaagatcctttcttatttgatctaccatggggtttgagaggtgaatcacaactaatgctcatgtgggtccattgcaccatgagtgatcttgtattgatgtgacatgtgtgtgtcccatgatacctgcagtgtgaatgctgatggcctgtggcacacagatgctcataactgttgtcctttggctgtcccctttattatttaagatgcccttctctgtctcctttcatgttttttgcccttatttcatccctctttgatattataactacccacccctgccttctttttgtttggctggtatacttttgcctatcatttgaatttaaacctttgagaatcacatttttatgtggttctcttggatgaagcattgagttttgctttctgatccaacttcaaagtctttttaattcataagtgagtttaggccatttatatgcattgctgtggtataaatgtttggtcttggttatgtcatacattctgttggctttttgtgtttgtaatttttctatatacttttgtgatctgctttttcttggttttgttctgtgtgataattttcttcctctttctttttaaactttccttctacatcttctgtctgacctaccactccttccttccaaggtctgagttgcttaatttttctgcacaattgttataatactctgatatttagtcatatcacagatttgtttcttgtttgtctctctaccctcattagaatataagctccatgcaggacggatttgttgtcagtgtattctcagagcttagaactgtccttagagcatctattacatgcgcaataaatatttgatgaagaagttaataatacagactttacaacaatctccagagtaggtagtgttattactacgctttaggggagagaacaaagcgtatgtgaggttgtcattcagtctgcaaagcaaggaccagaacacagttactgtggtttcaaaattcacgtttttcccaatatatttatatttcccaaaatcataatgatgagctagtggcctccatctggatttcaagccttggtctgctgacttccaaccacgtattccactgcagcacgctcctttaagaggaaagaaaggaaataatatcatgcacaaacttgcagaaaagctgcaagtatggtagtaagaattttcttttcctgaacattttatttatttatttatttttgagatggagtctcgctctgttgcccaggctggagtgcagtggcgcaatcttggctcactgcagcctccgcctcctgggttcaggcaattctgcctcagctttccaagtagctgggattacaggtgtccaccaccacacctggctaatttttgtatctctagtagaaacagggtttcaccatgtaggccaggctggtcttgaactcctgacctctggcgatccacctgcctcggcctcccaaagtgctgggattacaggcatgaaccactgctcccagcctgaaccattttagaatatgtggttgatctgatgccccaaacacctccaaattattaatgtgtatttcctacgaacaaggacattctcttgtataaccacaatacagtcatcaaaatcaggaaatgaatattgatatatgatgatctcatgccgagatcccattccagtttttccagctatcccagtagtgtcctttatatttaagatttgggtctcatgcagaatcatttgctgcgttgagctgttatatacatttagtctccttcagcctggaacagttcstccatctttctttgacttccatcaccttgacactttaagatattaccaatcagcgattctgtagaatgttctcacttttggtgtatgtgatgtgtcctcatgattagattcagttttgaacatttttggcaggaatgtcacaaaagtgaggctgagtccttctctttgtgtctatcaggtggcccacaatctctagttgtaccattgccggtgatggttatttcaccatttgattaagatggtgtttgcttccctctactgtaaagctactccttgtctctttgttgttactaagtatcttgcgggaaggtgctttgaaactgtgtggatatccgattcctcatcatggatatccgattcytcatcagacctttaaatgtgcttatttatatttgtatggattcatcattttcaattttattcattgggttaaaattcattgctattattagttatttcgatacccagattatcctgatttgacctctgggtgctccttcaggctgtcttctgtgtctcttgacctgtctgcatcattattctttgagcacacacttattttctggcacaagatattccaggttcatctcaaacataagccctgatatcactcatttctcacaggagtcttgattccctctaatgaaaattgatatttagaggccaggtgcagtggctcatgcctgtaatcccagcattttgggaggscaaggcgggcggatcacttgaggttagagttcaagaccagcctggccaatatggtgaaaccccatctctactaaaaatacaaaaactagccagctgtggtggtgggtgcttataatcccagctactcaggaggcagaggcaagagaatcacttgaccctgagaggtggagattgcagtgatcccacaccaaccaagatccatactttggcagggtggggtgtcattcatattgggatgttgctgttcccaagcattctcagaggatggagctgggaaatagacatatacatatgaatagaaatagacacacacacacacacagcctcaacatctctttctgtctgtccaccttaacagtcactggcccacactgacaccactaatcccaatccaccactgcacagttccttatggtttgtcccttttccttactggtacctcatgtcctcagcatggagaggtcggctttcattatctttactgtaatctgtaacttatcggtcttcctgtatgtaaccaatctgccatctccatcccagcccttcccacactcctaggctctcaacgggtcaccaaggggacccagcccagagatcccacaggttcctgccttcccctctcactcctgctctggcacccaggccaggcctccccactgtgtggatgccctcctaccctggatgggctctggtatctcacacggggtgcatcaaccaaaaataaagttctaaggccccctgaccatctgaatggacttcctcctcagccagggctcttaaaattgaacctgagagacaggttcaggccatcatgggacrtgggggtggaatattcctcattatacctccccagcattaacatcaacacatttaggtctgataaggaacattttgcaacctgttgtctctgaagcccgctagctaaaagcttcatcagcatgataagactttggtctccacaacctcttatgctaacctgacattcctttgatcccaggtctttagccaaactcaaccaattgtcaaccagaaaatgtttacatttacctatagcctggaaggccccccatgtccccacccctttggaattgtcatgcctttttggaccgaaccgatgtatttcttaaatgtatttgattgatgtctcaggcttccctaaaatgtataaaaccaagctgcaccccgaccacctcgggcacatgttctcaggacctcctgagggctgtgtcacgagccatggtcactcatacttggctcagaatcaatctctttaaagattttacagagtttgactctttgggtcaacaggtggctcacacacggggcagctctgctgtgcggataccttcctccccctccctggaccaactgggttctcttgggaccccatggcttcaggctgagttgtttggggagggaaggggtggcctctgaccttaggtccctgccttttcctgtgacattcccttccctgccgtgtctccatagctttccttgccattcactcttactcattcttcccggcctaggtcaacggtggcctggtctcaaacataccttttgctttctcctctctctgctcccatcccaggggtggctctttctcactcccctttgatgatctgtgtctgtttcaccccctctatgaactcacaacacagagtgggtacaaagtaaatgcttgttgaatgagtggtctatagtaagccttcaacaaatacttgttttgtgaatgaatgaatcagagagaaacagtccgtctcctcaaggagtcctcaggcgtgttgaggagaaagtctgtcttctgccagaccagaacgcatggacatgggacctgattccttctgctgtgggagagccacctctgtctatagagatgcctgtggctcttgccctgagagcagccttctgaaatgctttcttcagaccccatggggacagccttagttgtgatgatggcttcttttgctgggcctccttgagtttttcctctgccgccacctaatcacagcaaaatcaagagaatgtagaccgctggcttgaaccggtgctaatgagtgcagatgtgaatcaagcccaggtctctgtgggattcttagttccaaagtttcacgtgagcttccgggcaatgttcagacatggttcctgcggagctcatggcgtcacccttggacctggtgatatttattctcctcatcttaggatgctttcgactgggatgtgtccacatcggtgcaggtgaataactgctggcattaaacacctttgttcccagcagatgagccagtctgggtccaagcgcttttcttttgctgagacttcttcacctctaggatcaggacaatgaccctgggaagggcggtagtgcccacagccctgcagggcttgctggcggtcggcatgctgctgtctgctctacagacgctgtccattgctcccggcaggcctgtggagcaggtatgctactgtcatttacagagatggaagctagggctctgcagtcccctagccaggaagtcacagagtggacgtttgaatcagcatctgcctggtgccatccacaggacgaggcctatgtcacagtgtcccagatgtattccatcccttaaatgagaaaatgaatttcaaaagatatgacgtgctaaaaataagtgatggagatttcagtctttctacagttttccattgtttccttctaagattaaaaacaaatttaacccctggcgccttcatcttgcaggaatttttatatccccgaattttgcagcctttccaaaccctcacattgaaggacggacgtggaaagagaaaacatatgttgttggtagagataagagtaattgaatgggctatttggacgtggatcagctgggacttactgtaccagtgaatggaatctcttgtttttcttggatgcctcatccaaggacagcacaggaaagagtcctgggcgccagctgaataaatggctccttgaactagcctcgggctgcaggagagggaggggggctttgtggtggcctgatggagctgggccagaatgttgggtgcttagcagggcagggaggcattggtcccrctggtgggcggtgctgtccccagcaccttgatgctctctggtcccagtcctggctgggaactgtggggctttctggccatcctgggtgatgtcagctagagcctcagacctgcactctgttttccagcctgcccggtgtgaatgctgctccttgcccgctccatatcccctcccgtgcccctcagtggcagatctatttttagctgcagcttcaagccaaggctgcagacacagccagtggggatgagtggggtgatgttcggggttgtccctgccttccccacgttgacgtgttgagcatctcagcctttctcagaggcgggaacagcgattctggatgggaagtggaggccccttcagggaacgcctgctgagccatgcctggcaaggggcaacagtgctcctgctgggtagtactgcacctcacaccatctgcgagtagaaagggcctcaccccgcaagtcccgggtcccgagcctgacctgttacagtgctcaaggttccacgctctggatttcaccacaggcctggggcagcatccccagcagaggaagcagtgtcctgccaggggaaagaggtgctcccyggcagcctggagagcatgtaggggccaggcgcaccccttctttgggccctccgtgcctcctccctgtgctgcagctgggcagcgggcaggtctctgtcctttggccctttccgtctctgcaagtcctgggcttcctggggctcaggcctgctcactgagtcctggggagacagggaccgcgcctgtggggttagtgcatcaggcmcyatgctaggacccacctgagcgagagctgagaggggctgcaaagtccgtagccttcctggcttctgccactttgcataaaatgcagccaattcctgtggtgttttctcccggagaagacacgccaaatgagcttttgtcagtagtctgggaactgtctcctgagatgggagcagagcctggcctcagagccctcccctctgtgtaggtgctggagcttcctggcagaggaggggctgtgcatccctgtgcctctgccacatgccaggagatttagagaggctcccaagggccacccaccggatcgaaaggtggcgccacacggagcacacatgtctgtacaatgacctaggctgtgggaaggacacggcacccagggggaatgcagtgccctggtgcatgtggggccggaccagggcgctgtgaccctggggagcccctggcctcaccgtgcttccyctccctttctgtggcttacttaggacttgcccaggacttgctgagtatgcacagagcaggtgcttcatggagagtgagattaagacacttaatgtcccaggaaggaagagaggtctggtagcacacgtaggtcagtttaggccttggtactaagaggtttgggggaaatcactccttctccttgggaatcaacagaggaagtgatccttacaggcgtccccgcctctgggcccctttgaagctgaccttgagcctgatgaggcaacttcaaagacagcccctgacctttcccaggcagctcttgctgacatcctytccccaaggcccaaggctggtgctccgtcactggatggctgggccagcccaacagctggaagaacacggctgagtaacctttgctctctgagacatcagtgttcccagaggacaagccccttctctagaaacaagctcacaagtccccattgatggtggaaaaggcagagacctggtggggcagggcaaacacaggcagcagcccttttgtgaagcaacacaggccaggaagagctgaggccctggggccaagtgccctggcggtgtctcccagcagagccgtttttgctcagtgaccatgaccttacagaacctgtttctgaatctgtaaaatggaccagagtcccaatgtgtatggcttcagagagatgaaatcaggtaatgtacacattgtatctgcctagcaaaggcacctgatggtcttgcattcagacaggcaagtagtgcttcgctgatctgtgtccaaggctctttggagaatggaatgataaaaacacgtggacacaaagtttcatctttcccctttcccagggaggtgaccatttcacccttggtctacctgggaggccccaggctctcggtgaagacccctgcttttgtrgggratggagtgatgcagcactggakcatggcaggcaggggagacagtgcgtcttcacgttttcccatgtggagaccaaggcttggagactcagggggtctgttcaaaaccactcgatttgtgggctccatagcaccccagagcacatcccctctccrgtggcctagaatgggcagaaggaaaagtgcagagcatgttaaatataagtgaaccccaagtttcttttcaaagaatcaatacgtcagtatgttcagctctcttattctttgattctccattttaaagtttaacttcctggttctcttcgcccccttgcttctagtttcagtaaacaactttcccaacagtcctagtcagtagttcacatctgttcccctggtcacccaatccatcctgactcatcctggtcacctgctctgacctaagtcacctttagttacctgttcctaagtgtccttcccaccagactactcaccccaccactctggctcataccccggctctctttaaagtagccaatcggaattagcttagactgtgcagtccaaccctagccaataggggaatgacacagcagtaggggctacctgcatcaggaataagaactcgttcccctcccctgtccaggtgtgctctcaccattgttaatctgcaaggagcaccctttctgcagaaagtaaaaattgccttgctgagaaaattacatttatgttcgagtgctatttctttgcggcagcagggaacaagcatttctaacaagcacaaacggaacccagttcttcccgccagcatatgccgcctgacagaaaatatagaagggctgctgtgggaaagtgccagaaagccggtaggcgccagcctgtgagacgcctgctccaccggcagccacagctcccaggctctccaggctgtagtgtttgttgactgtagcctggtaaggagcagctatttccaggtggtgaaggtgagggtgcagagcttacagcctggaggtgtgcagggctgggaggcccctcagcaggaatctgccactgggcccgaggaacctgggagagaggctgcccyccatgtgagggcccacggacggcgacaggcattggtctgtgcttagtgagggatttactcggttagcacttgtttgctgaccatagaccatggacccagctctgggccaggaactggggtgcaggagggatgagctggggggaagtgctgaaggaagtgtggaaagagccaggtttgggcttcagacagccttgagctccaggcctggtttgttggattacctgagcatgcatgaggactgtcagagcctctttgagctgggggccggggatcctgtgacacacagcagaggcctagatcctggcattgggggtgactatcccggaaacagccattcattcaccaaatgatcatgcatgtagcacagaattatgatggcagcagaaggtcttgcacaggagtggccagtggctccctgaggttgttcccgacctccaccccttggagccgtgtaacagccccttttggactgggttctgagagcctcagcatgtgtggggtcatacccggctggtcttcagtgggctagctctaccttttgaagatgatgtgggcttttttctagagtgcatgtgcttggttaaggctcactgacagccatgggtggtttgggaggatcatttattcaactgtttattcactccacaaacatctgtccggctactggatgtgctgacactgtgctgatactggagctgcagagataaaagatgacctgttctcacaaagctcacattgcagtgagcaagtgtttgaaccaagagtcgaggtgtgagtcatccccaaagcgtataaagttgtacccattttatgactgtgagttcctttttctgggaatagggtccatagttttcatcatattcccraggggtctgtggccccagaggggctggacttgttttaattaaagaattagcagagcaggtcccttccctctcctatcgtggttccttcagggtactgcctgctgtcccccaacccaggttgctggccacagagctcccttgacgatggccagaacatactgcagctcttcccaaagacgtgcctctcttcttggcacccaacatcctctgggtgccagggcctggctgaactgttatatgtccccagcttctctctggccgtctggccgcatggggcagatctgacatcaggacccattctgtgtgtgtaggctgagtgtctccggttggggagcagagcagccactggtcattctcttttttggaatggagaaagtgtcatgatgtcatcagggagaagcatgaattttccttctttctgaagctgtgacatgttaccatccagatgcctctgctatttctggaagcgtgaactttattatgcagaaattcagctttgcttagtaagcaatagaagcgctgccttaactaaatgtctctgggggtcattaggacagtgagcggtagtgattgctgcatccaaaaatggaagcgcaggctgggcttggtgatcaggaaaggagccggcctaaaagctcctgggtgctgcgagccaggagtccaggaacggagagacccctcaggtcacacggccacacaggggcacgtggcatcagacgcaggcagctcggtgcacagcrgtgactcctcctggactctgactcgggccagaaaccggggggctggaggagtaaccctggagaaacaaaatccctcascttggcctccacgccactcctagagcatagaggacagggagtgctgaaagggcagcgtctgctgtgggaaaggagggagaacccatgaagacgtgacatctcagagatatctgaaactcggggcccaatttcaccgtgcagaagcagaggagacggcttctagatggagaccgtaggaggagccaagactgagagatgggacttatgcgaggcgtgtttaaagggacaggtttagagcgggtggggagggtgtgcagactgtgccccccccggattcacagtcccggtcgcagtggctacttgtcggctctggcctcggcaaaaccgttggtgctgcttgaaggcacagagcattatcattgarcagttaagttcctgcaggtgccggctgtgttgcaggtgtagacactcatggacgagcagactcttggggagggggcccctcacctgtgtcctgtcccctctagcactgatctcccacccacccagtccccagatctactggggccttcctggctgtcccctatgtatacacacctgacagtggagtgcagagaagatgtgagtcagttgcaaagtcaactaaaaatcttgggaaagatgcatgtttctctagattgataaaaatggcatggaagagctgcatgcggctggagtcccaccctgagccgtggaggagcccggcagaggagctggcctgggtctcagcagctgggcggaggccccggggaggcacggcaagcatcacgcaaagatgcacaaccctccttatgatcgcggaagtcaggtgcaaaggaagcaccccatgctgtgctgtcacacacgtttgtcagaaaagtacaggaaaaagcagccaaaacttgactctttctttgttgttgttgttgtttaaagagttagtccttatggcaaagggaacctgaattttattatgtatgacccctaataaacttgttttcataatgtttttagatttcatttttcaaggcaaagccccagtcacatcttatttgccatgatgctttggtcccacttctgagcaggttccttcgagtagcctttttggaagcagttctcccagatggtgaagcctcctttctcttcctttctactgccagatgtttatccacagtggacaactgggaaggccctgatgttgagctgatggctcgatggttgggagacaagtgctagagatggggacaactgcctcttcggtgacctgtcaataacagctgaaggcagcagggtccctggccaggccacctgggtccattgcaccttttttggggctagttgctctctccacctgctgctggctgtgtgcagctgttggcaggcagcccagggcacccagcctcgtgcttcctggtgagcaagttgctttacaagcagygggccgcccaggcagggaggaggcagaggtggtcagacggccccatgctcagctcctgactctcagagggcaccatacggagctcctgtggctgctccggctgttgtgaggctgctctgtggccaccatgccttcctcggccagtggcagccgtgagagtgaacgggccttggacttggtgtcagcaggcctggactggggtccacgttgccccatgtgtttattgtgtgaccctcggcttccccagctgtcaagtggagataaaatggggactgtcgccttgggttgctgttgggatgtggggagaatcgcactcagattgtcagcgagcacactggaaatattgctatgcctcgccttgcctccatgggacaggccttcccctgcaaatgttcattagcactctttatcctcaagatacaaaccagactcctgcgtgtgtcctgcgataccaggcccatgagccgccgccagcctctggcctcacctcctggcgctccaccgctccctcctctgctgtgctgatccctgtgcacttgctggaaaccatggactctcacactcccctgccttcacacatgctttccttctgcctggagtgccctgggcacctttctgctctttcacctctgtctgaaccagctccccccgcccagattcccagggcgtcccgactgtcccgttgctccttatcaccctgcttcctctctcagacctcagtgctcccgggagcagaggtgtgtgcccgagtcatctctgtgtccctgtgctcagcagcgtcaggttcacagcagcagcttagagaatacttgaatgaaacatgacagacaacattagaatgaatgggtgggtagatgaatgtttgaatgaatgagcacgttctccttccacctcactggttttgcctgtacttttcctccatcccctccccttccttcaacacttgggtttttttttttttttgcaggtgctggtttttgacatgggaggaaattaacagtgaaagcaagcctgtcctatttacaaagggagttagtgctcacagtgcagctaatgccgttgctcttgagaacattcacaaatccattttgcacgccaccccccgccgctgtccagctgytttgctgttgacctgtgttacccatgagctcaggggaagctgagaggacattgtcccacacctctctcctgctagactcaggctgcagcggggagctggtgggttcgcttcccaaggccaagtctcctggcctcccggtcccagagggggagggcagtagaggaaggggagccgccgcagggctgtctgaggtcttgctttctggggagcagagatggcttcaggaaaaaatccccggagagggttggccttgaccctgaggtggttgcagggagaggtggccaaaggctggaagaggtatgctgaaattcagtccccaacctgcagcccctccagtgcctgtgtgcccctccacccccactccacaggcctctcctccaaatccccacatctgaggggccctggctgagagcacggcacagagggaaagaaactcagtgcactggctcagtctgtgctccgtgtccctggctgtgtgcgttgcctcggtcaccctcccacacagcctgtgaagctggagagcatcatttttattttaatgatgaaggccctgggactcggagttggggaacttgctcaaggtcagactagatagagaagatcaagaatttgaacccaattctatctgtctcaacatgcaaatgctttttaccaggcctcactgccccctagttctgtgggggacccaggtttcctgttactgatgaaataagaggcatatggcttggcccgtgcctcaagcaattgccagtcttatgagctttataaaccacgcatcaagtggcctcttcacaagggcggccctgaggtgctggggtcgagcgggcttgcggcagaagacaggacatgccccacatgccgctcctggacatcctcccaccttggtagggcttttcattagaggttcccagagagaggcgccagggcctgggctgaccgcataagactcccctgaagagcgtaaacaggggacttcccactccctcaccttccagggaatcttatctagaaggtcaggagcggagccgagatgacgcgtcgtgtaagcacttgcacagctgtggtgagctgcctgggaatttctttttatcctctcgggtctccacgtggacctgccatgttgatgatgccgttgtcatttgaaggtattgaatctgaagttcagagaaggaagtgacatggcaaggtacccctgcctgctagggcctggagctgagcgccaggcactgcactgaccctagggctgcgtgggagcagcgtgggattctaaacaggaggtctggaaagcccaggcctgctcacctgattaccgaggaaaacaaatatttagctgctgcctcttcacttcccatacctattttggtttgatagtctagatgcagaatctttgggcctattttatttacttgtcttttgatctgcagcccagctctgggttacaaggagaccaggtaggcccgattggcttccagggatgtttgtggaggaggcagcgtctcccgcctctcagagacatgaacaaataatggtttaatcattgacgcatctgcctcaggagaccgtgccagctttgaatgaagacgattgataggaagggaaggagccagcccatgccaaggctcggtaccccatcagccctcgcttcaagccaggaagggggtagccaggttgggtgattttagggggcatgagcaggccagtgtgcttcccaggcaggtcgtagggaaaccagcgctggcctcagtgcctgtttggcaccctctttcctgagcttatttgagaacctgccactgccaagtcctcagatgctgctgagggtagctgcaagcaaggcttctgtgagatttgaccaggaaagagaaagcagagaggagaggatgagagcagcacctactaggattttacgtgtgcaggcgtgatgccgagtgtagctacggcccctgctactcttaccatctcaccgaggctcagagaggttaagctccttccgtggagccacatagctggaagtggaggaaccagggtttgaatctgggtggctgatgggctgcccttactgaaggcgttctgtgtgctgggtcctgtgctgggtgctccaggtgtcacctccctgaccccagggcacagacacggacaccaagggcctggccagtgcccagcttccgtggctggcaagtggcagagtgaggcctgccccagcgtgggctcctgcctctttcctgtactaaaagcgtcattcatggcagcgtctgtgagctgaggctccagggaaccagccacccctatcgattctgactcaaagaaagtgagatgacttcagttctgatgttccagagtcatgtagggggtggaaaacattccagagtgtggaagaactcgacctcctgaggtttctgaacccagaaagcctcgcaaatccctcccagggtccgataatcagatagagagtgatgagttttctcctgtagaatgttgaaggcaaaaacgtggtcagatgtgttaattttcctggttttattgttttgtttggatgaccctttcagtgagaccatttgccctgaggattaaaacaaaattaaaccataaaattaaataatattttggtataatatagtattatatacgtatggtatacacatgtatgtgataactacacatatgtaggtagtataaaatattaacatatttatttgcaaataattagaaaacccaaaactaaaataagagcccttcgcttcctttgtaaagataccctaccttggctctcaggcccttgtccattgagaggcctctgtcccggctctaccctgggtgctcagagtgagcacatgttgctctcagcagtccactgcccccagcctgcccctggcccagccccttcctgggtccagccatcattggcccaggaggaactgatgcaaaggcctcctgttttttttagagcttaggcctgaatccccaccctgcaggaggtggtggctgaagccctgtttgttcattcattagtccttgcatttattatttccttcctttgttcattcggtcagcaagcatttcttgaacacctgacttgtgctaggtgcaggtgattcaggatgaacagagttctgtccctttcttcccagtcccttccacctgtggggcagagtctctttggtgaataagatgggggagtcataggtaccatgggcgcggggatacagtttctggctctttcctaaaaaggagaagagatttggaaaatgcctctgatcgcttggcctcccctcctccttttctcatgaggacccacactgcaaatgggaaactggttgtcgtgtctcccgaagggcaagcatcctgcacattgctcctgccaccgccatgtgctacrggagccgagcttgggaaggctggccagaaccatctggaacagggaaggcctgggggccagaggcctttacagaattcagcatggagcgtccccatgctgacaagacaggagtggtttaatgccaggtgttggcgtcaccacggaacacttcwtgggaagcctagactcacgggaaagaagatacaaagaacctttgcgaatgacgaacagcagcgtatggcttggtcagcggctgacccagatgatcagacagggggcaggccagaactcaagatgccagtttgctctgcctacctccaagagactatgtttgcagtttcctctccccaggggctgcccatattttgaaagatgatatcccatcctcttgaataaaggatcatgaacttaccttttcatgtcatcaatcagaaacacacatctgccaaccagagctcccagccagcccaaggtagctggtgtaacctcatagaacagagaccatgccagcccagagggagaaaatggaatattttctttggtttgtgctgcccgatggaagataaacacatgatttccaactgattgtctgaaatattgagaatcattaccattaacaccattagtgcctttgggagcccaggtagaaatcatcagtctgactgttctctgtcattttatacatttggaaactgcccacaagaaggaagttcatcagtggcagaaccaggaccagggaggagaacagatattgtcagagcacgcactgtgtatctggcactcggtgaggagcctcctgtccagtggggaaggcgggcatcaacccatgaattcatgatccggtaccagaaataacatgggcgcacactagtgttctggagtgtgaaggagggagaggttagatctcagagactgtattagtccattttcatgctgctgataaagacatacctgagactgggcatgtctttaaaaagaaagaggtttaattggactcacagttccacgtggttggggaggcctcacaattgtggtggaaggcaaggaggagcaagtctcatcatctgtggaaggcagcaggcaaagaaagagcttatgtaggaaagctccttataatcatcagatctcatgagacgtactcactatcacgagaacagcgcaggaaagacctgcccccatgattcaattacctcccacggggactctcccacagcacatgggaattcaagatgagatttgggtggggacacagccaaaccatatcagagacgtccttcattcccctggcagaccctccaggagcatctgtgggatgcacagccagtccgttcaccaaatccagtgtccttctccacctgcccctcacagagcccacccagatccttcggggagactgtgcgtgactgaatgactttggagatctcctgctggtgccagctcaggcttctctataatgttaacagcaagtactgtatgcagccatgcatatgttccaaagatcatcaaatgtaaacatttgccgtgagtccgcgggacctttccccttcccgactcatttcccttttgaacgttgggttcggttttccggcactctccaggattcccaggctgtgttctcgtgttagtgctatcccacttgctctgcttcctctggagaccagagttcagggacctgctctgatggatgatttgaccgttcatccccgtttgaaataggtaccaggtggaaagcaggcccggtcccatgccttccgggatgcaccaccgtctaaccaccatcctgttgtcactcgcatacagctcccggagtcaagatggaggagcagttggtgacatctgtggtcagcatctatcttttgagttgctgtgggtctgagctcctgaattccagttgaaagtagcatggtgacacggggagagtgtgtgttctggaaggacattgacttaggtttgaatccggtcaagttcaagaaagtatgctgttccctgaccctgatatactgctctcctcggctcccattgtacgttgttcatacctctctgcagtggttcatatcgctgtctgatcacattgttatacagaagttcctctattcactgacaggttaggctctgacagtaacagtgtgtaaggaacccatgacatcatctgctgcttgggagctgagctgatgtgcattttctccattactgatgcttgtgaaagttcctaaggtgaaaatctgtggatggagagcttctgcagttttctttttacacgatgatctcttttagacagagttcttttgagcatggaggatatcttactcatcttgatcctsccatatcaggaatgcttcttggtgtgtggtaggacttcattaagtgatttttgggaaggtggatgggggctgrrtatatgggaagatgagttgatagctagatgggtcaatggtcagatgggtcagtgtataattgggtgaagggatgaagactggattagtagacaattggatggtgaaaggataaatgggtggaccrctgatgagtgggtagatggccatatgcatttgtagatggatggatgaatgacttgattgttcaactcattgacacagaaaaaagttttccttctgtgacttatatccctacaaatggctaattatatggcccagtggttttcagatgcattggcatgtatattagcattttgctcttcctttaacaattatgatgacttctgattacagtgttgtcacaggtagctcagtttctccccaggacaaggcaatgctgggattgcaatggcaagagagccaccaagagctcctgccccatgaggggcactggtgctttgggctatctggaaagaacactgaactctgcgagtcaggagccctgggttctagtgttggctctgcccctgcttatcatgagaaccagccatctgcagggtaagcattaattgatgtcatgcacataaaataattaccactgtgatcagcccatggtagacattcaaaaattctagttactacttcattcttctgagcctcttctcagtccctcatacccatttgtcatatgtatgaggtgagaaaacagatatcagagcaatttcataatggtctagtccccaggggagcactgagaaggggctcagagttctaagcaattggacagagatgcagggttgggctcaagtgttcctgggagctgatgcgggaaccgagaagcagagcagagagcccctgggaggtctggtcactggtggacaaggaggataagagctttcaggccctcagaccattccaggccctctcctggacaggagccacctcagggcctccttcaggtcggaaacactggtkctgagccagggcgaagtgaggtatgctggcagagctggctctctgggcagacagactccactgtgaagaagtggcttcacctcctgaccatctcatcctctgtaaaatgaggacattaatatcttagaactcaagaattcagtgaggcagagggcagagagcactgagcacacttcctagtgtggacacgctcagaaaacgttcacactcatgatggtgttaccacaacagtgtccacacaccatatggcgcattattgaatattacacgaagtactctgatctataacctggaacatgtgatctgtttaatattgtaatgtaatacatttacattataaaagtatagttattccataatttccttaagacattcttgtggctagaataaggtacataatgaaaatgcagaaccagaaggagaggagagggagcagctacacctgttctggtttctgttctggtatctggcacacagcggactttcccagagtcatggccttggccgctgctggcccctgagtagaacacagggacagccccagtggcaaatgattggagatgcttggtgtcaacagggaacctctcctggtgtcaagagagcagtgtcttaatggcccaacccacatcacccacctcccatttgctctgtttctggctgtggccctctaagtgggcttttggagttctcgggagatcttttctccaggtatcctagacgaaggctcaatgcaatttgggaatggctttgcctgagaaatggctggtgatttgtcatccagagtccaaggggacactgagcactctcgtttgacttgggggccagttggcaccttgagtaactctcaggcagaatcagggggccgggaagtcacccacattgagtgttctgaattgaccaggcaaaagcttttcaagatgattccatccaactttggatgtctgcaaaacactgcattctgagcaaatctgtctctagcctcatatggcacggtcaggctagacagcacacctgctgaggggcttcagtatgtgaagcagcagcatctagagttggcgaagcaaacgctgagccaagggaaggctgcctacggggaagagaaagacaacaagggcttgttgggaacatgggcacacaccactcctgagtctttctttttaaacactgtaattcatctaagtatataggcttctatttcgggagctgggagatatatatacccacacatgcatatttatatggggagagctgtatctatacatttgtatgtctatatatagaaggtgatccaacttgagctatatgcacacacatagattttggatatatatatgtgtgtgtgtgtgtatatatatatatatctcacatatatgtttattccatatctcatgtcctggtttcctaataaacactggaagttttcctctctgggttgtgtattgcaggcaatcaatctatcaccgtgtgatatgccactctagactggatatctgtgtgcatgtgtgcatgtctctcatgcatgtgtgtatttcgtctattttctgtcatctttagaggcaacatgggcttcagttaatagtattttatctgcagtgtttgcagggaagcttgcagaggagtgagcaaagtgcccctcgcgtgtgatgcacacttggtgctcaggaggcggcggctggctggacaggggacatttgtcttcagtcatgcagtcctgtctagacctaggctgtcatctgcctgtccctccatacctgcttcccttctccctacaatgcttatggaaaaagccctttagatggtgtgatttgtccaaggaaagaggctatggagctcctgggacaggccctgcgtgaggggctaggggccttgttccagttccggcagaccaagtccaggccccacgtgccccagggctgctgctgacacagggcacaggcagaggcggcagggagcggaggctttggtggtggtgagctttttgccttggagggtctttaagcttctgttgccttcaccagctgtcagggaggcaggtgctcacacccatccccaggccgggccgtcaggaaggcaggtgcttgtgcccatccgcaggctgggccgccggagaggcaggtgctcgtgcccatctgcaggctgggccaccaggggggcaggtgctcatgcccatccacaggccgggccgtcgggaaggcaggtgctcatgcccatccccaggccaggccatcgggaaggcaggtgctcgtgcccatccgcaggctgggtcgcctgggaggcaggtgctcgtgcccatctgcaggccacgccgccaggggacaggtgctcgtgcccatccccaggccgggcctccagggaggcaggtgctcgtgcccatccccagacccggccgaggcgggactgttgcagggtttcctcattggtctgcaagtgtggtgtgcatttgggtgaggagtgggatgaactggctccggaaccccctgtgcttgcacgtgtctttccttctgactgaattaattgcattgattccatccctcagccaggatggaaattggttccatttgtttttcacctcacagttccgggggtgtgtggatggaagagtgtttcccccgctcagaaaacctctattggttttgctgtctcccatcagccagcattcagctctgctggcaaaagcccttagttttagaaggctgctgcatttgctccccaggaaccctctgatctgcttcttatggtcttgcgccttcttccttccctgttgtcagagctttgtcctgctgcgcacccacagttgctgcatctggggaccctgcagggcagggatggctgcaagcccagatctcggcacacagtcatctcttaataagtcatcactgaatgcatgattgaaggaatgaatagtgtgattgactggaccagatagcttcaagagcttgttaatggatttagataatcaatttgcatgatcaaaaaaatggattgatttgctgtggtcttgaatgcacagcctgcctgtacagttagcctactacctgcgcctgctcaccctgggcctcctccacagacagcatggtgggtggcctgctgggcacagccccagcacagcagggactggatgagggaggatgggaatgggcctcctccatgcccaactccgggatggcctcgcgtctgtcagagttttgaatgtatcagtcagcttccaatgcggctagcatcgtgtttgctgatgctgattgactagagctcagcaaaagagttgccttttctttcagagaccattaaaattatatgtgtgtgggggtgaatttctttaggagttgtttgtaaatatccatcttcatttttcttcttattcctgagataatgtattcactgcctccccttgatttaggataattcacctcgtcctgccagaggcagtcagttcggagagatgagtctgcgtttcacaggctggtgccaactggtggggcctggtcgtgggccatggataggaaaacagcagccaagccagacaagtgttatcctgatccccaccctcccgcagtgctgcctgctgcggggggtggggggtggaactaagagctcagttcaatctgggattgatgattgatcatcgggttcagtggggagccatgagcgcaggccggcatctgttcttgctgggactgttcacacagcctctaccgcttccggcaccaagccgagctgtctgaccatgcctcctctccctgcagcctgtagcggtgtttcttcacagaatgaagttcaaggcccatcgtggccaggccggcccccttggccttggcctcagcttgcggcacccacctcttcctccatgtttccctttggagcttcccagtccccacatcctctgaagccttccctggtgctctggtccttcctgctccctcttcagagtgtctcctccaccgctctgacccatgggctggctttccggtctcatctgccagcctggaaaccctttgacaacaaggatcctgcctggccccaaaggccacagcttgtctgttagggtctacttggctgcaagtagcagaaacccccgagtaatagtggcttcagtaaagctcacaggtctccgtcacattaaaatcgrgwggcagacaggccaaagctgatgtgacctaccagtgccaggcacytgcactgtacctctgccgttgccctggggcacagcctggagtcaggacagctgctcccacactgcggggagcatggaggaaaggaggaaggcactccctccccggtgtaaggagacctcctggaatttgcacaaaccctctcccttcatcccttggccagacttagtcatagtgccatacccaattgcaagggaagcctggaagtacgggctccattaatatgcccagctaaatattggggttccattcttttggagggagaaagtggatattaggaagctattagccatctggcactccagtgcgttttaatgtcgtacgcttttatggaacccgtatatgtttataaaggcctgggccaggaatgcagtggagcacaggcgagagtttgtgcctctattgactgccagcctgggccaccactgtaccccatgcagctcctttccccctccccataccctacaaygcttggtggcattagcctcattcctgagacccagaaaaagtaatttttccaagtcatacaaccatataaccagtaaatggtaaaccaagggtcaaacctagtatctccttaaaggcgacatcatccttagctacctcaaattggagaaactcagctccgtgttgcttgagtgctgggacacacaagaaaccacgatgaatccgggcagggctggagagggggcggatgggaaggtgtggaggatgtggtactgatggcccagtgggacaccaagctgctgacacgggatgtgccaggcctggggacggggtgatgaactgggagcatgggggtggctgaggccttcaggccaagcctggccagcaggttgccgcagccagctgggggccccgggcaaaggcatcgcatttgtaagcaacttggaccttctgagaaagcaggagaaaggccttgcttagctggtgaatgaggtggcccttccttccacaaaatgaaaaacaattctattttccccagactgtcccaaagcttattccagtccccactcccaccagcagtccatgccagcagagctcctccccgctctcctgctcttacctgcctctcttccaccttttctcttccttaatttaaggtgtaaaatttagagtctgtggtttgtgtccagacaggaccagcccagccatagagcagtcctcacccactgcccgccctgcacagggctgtgcatactctcctttctggaaaattaacggcccctccgttgttcacagaaagagcagggaaggaacgtcttgacgaaatagaaaagcctcatccttctctctcatcctgtgacatgtttagagcccaattatttcatgtggggaggacaaagcagggggccaccctggtttgacccccttctcctgccaggcactctgccaagaaatggacatgaccttcacaacagccgggtgtggtctcaggttgccctgtttcacataggaaggtgaagctggggaggcgctgtaccagcagggcagggacagagttgggagtctacagctgtccttgaatttgtcctcctagcgatgaggaggtttccttgatgaaagccactctatgactctggcgggtgagcatagtcacctgctcgcctgcagatgggtctctgggaagccgctgaagcctggagaagtccacagcccatgccttctggagacccagagctgagtggggaggacaggacgagatatgccacactcaggttgccaaggaatagctagagagcactgtatggrgagtgagggcccagcgctggagtccgcagctcatcagctgcagcagtggctggaggctgctctggtgaatcagcgtgcacatggtggcttaaagcaacacagatttattctcatgcagtgccagagggcagagtcagaagtggggctcctgggctaaaattgaggtgtcacrgggctcattccttctggaggcccttgaggaggatccattccttgccttttctggtttccagaggccacctgctctccttggctcccggccccttccaccaaagccagcagtggctggtccagcctttctcttgatgccccctccctggttctgacgtttctacctctctctttcacttttaaggaccctggtgattacgtggggctcacctggataattcaggatgagctycctgtctccaartgagcttaattcccctttggccgtggaagaacaccagtccaccggttccgtgggtcaggatctttgggagggatcgttctgcctatcacacctgctatgaatgacagaaattcagaggagtccaagttcacttgatgcacaagtgggcatttcaaggcttctcccttgtggttctgcaggcacctggaagtcccagagagcagtgagccagtgaccagccccggggccgagtctcagccctgccgccctcctgctggctctgggaattcacttttctgagcctcagtttatctgtgcataaaacgaggccagtggtctctgccttgtttacctcacatgactgtttattcagcagatgcccaaatgcctacagcatgccacgtgttcttccacttagccctatgtgtcgagtgcccaccatatgccaggcatggtattgcacataaggtataaaccaacaaacaagacagcccagtccccgcccttcagctgcctctatctggaccaccaggcctggggctgggcagtggctggggcaggccaggttggctggaagcatctggcaaggtatgcccagcctgccacgtactgttccttcacctgcccggacctcagcttcctcatctgtgcgatgaaaatctgcttaagattagaggggtgacatgaaatgaaacccggttgtaggacctggcagtgcagctgctacattagtgactgtaagtgcagaactcggaggacccaccagctgaccaggatgccctcccagaagcacaatggccagcaccctgagcccgtctatgggcaggacagcaaacagcaggacagggcggtggagggacacttctctgtgccacaggcccgccccctccccaccccctgccagcccctcctccatgggagtccagccttctcaggcgggggccatgctgtgatcatggccccgggcacgaaggcgagagcggatgttgattcaatttacaaatgtgatgaatcgcctgccgactgtgtttatttgtcagggctgctgtgaagctggtgtcagtgggggatgtctgtgcgatcgaagccagtatctgctttgacaagagttagaagtagggtttgttttttcccttagaaactcttgctgttcactttgaatgtggagtgcggaggcctggctggaagccttctcctcaggacaaagagctggacagcagtggaaattctagagcaagtttccacaggtgggaagctctgggcctagactgtttaaaaagcaggtggaggaggagaaaaatccccaaggccagcagcagcaacatttcaagaggcagtgaaattaactctccctgcagctgtcaaaagagaggctgcaaattggccaggttgatgccaggacagtgttttaaaagcacagctctgaccagtggccaaaagtccagtgcagagttcctagtttctaatgcaagggcctcatggaccggcctctgctgagttctctttcctcatttcaaagcccctttcagctggactcacactgctgtgttttccaaagcggtctgggctctcccatgtccccggtcttcacttgctcagtcctctccaccccaggtccccagcttccctcctgccctgtctagtaaacctggacattgtcctgtggcttgtctttcagaagttccctgtgttgtgcaggcagctggggctgctccccagtgggtggtggcttcktcctggaactctgtcacttggccttggggtgctttagggggctgggtcccccaccagccagtgagctcctcgtgagtgggcagggcccagcatgggggtgcctcccatcggctccctactgtgagcactgtgggttctgcgaattctgcctgcaccaggagctcctgcatccatgaggtgcctgtgaccacaccagggacagaggaggctgtcagcagcaccaccctccctacctggccagccttgccctgggatggattggccagagcctgcactcggcaggtgtgttgaccatgagcacagtcatttccgtgctgcctgacttcaggggtcagctgcttctgccagacaagcaggcacgctgggggagacagggaagaaacagcgcagcagtgaggcccgccggcccccaccagcaggctcctgtgcccccatgtgctaggcagagcaagcaagagcccccaagatgtccacaacccaaccccagaacctgcaaatatggtaccttacatggcaaaaggcaattagggttgcaggtgcaggtagttactaagcagctgaccttcaagcccagggtaatcacgaaggtcctttcagaggagaagagggaggcagaagaggagggcggagtgatgcgatgtgagaaggaccacaagaaggagccgggggcgaggggatgtgggaaatccctcagcaggaaaaggcaagcgaggggtagatgtttccctggagcttccaggaggaatgcggtcctgccagcatcctgattttaaccaggcgaggccgctttcatacttctagctctagaatttcaagacagtgaatttgtcttgcttcaaaccacagcaataggaaactaacatatccctttgtacctcccagacccgaggcatcagatcctacccttccaagcaccctagaagggctggctacaggaatgtcagagtgaggcagmcatagaaagtagcagaaaactctgttcatgggcacaagggaaggacaagcctaccagaggcagccaggccttggtgagcgaccctgggctgtgggcggggcaggctggatgtgcctgttgattgacacatccgagaatgggcaaggccagtaaagactgtgagagtgtggactgtgccactgcattgctgagaaacctcccacgcgtggaaaccgccaccctcctggcccgactgtccagtgcagaatccccgttggtgtgttgaaggcccactagggtttagggtcaggctgcgtttctggtctgttctccaggaacacgctaccctcgccgacctccaatttgagtcgtgcagtttcctcatcaacgtccaccgctgctaagttagttcctttgcctccttccaggccccgttcacatggtgcctttgccatgaagatttaagcatttgagtctcaatggaatcaactcacattycccgaatccaggatcactcctgatccataggagattagaatcaattctactggaaccagtgaaaaatgaatgagtgaggggacatgaaagcggcagaagtttccccgctcctcagctgttcctcagcatctgagaggagtggccattgcaagccacctccctgcaggggaggccagggccgccgcagccacagtgtcacagcagagccctctctgaggagaggcgtggcagtaataaggtctgctttgtgtggttcacatctcctgggcctgctctgccaggccgtgggatggactgcacagtccaggggaatttagtacagactctctggtggtgcccagactggccgaacatttcatttactgtgcttttggtggaaaataactaccctctgtggctctcactacagaaataaagtcattgttaatagccagggtttctttggaacacagtctcagaaagtgaagtctgttggctacaacgtagaaaactgccgtgaaagcaggcatccggaagggagaggccatttgtttgtgtcgctgtcccagtgcctggcaccggctggcactttctgtctccggaataggccatgcccactctccctttggatggtccgtttgctcaccctggaacattctttgaacttggaggcagcacccagcagagctggaggcagcggcatttcagctgtgacctgaaggatgagtaggcgcccctaggaaacaagcagtgggaagaaggaatgcgccatgagcatccgctttcggggagcagttactgtgggttccgaacatgactaatgaggagggatcagtctcctctctgctgagtcccttcacagaggccaaaatcattgaccctactgtctactcccctgagaacctttcttgagcccgccatttcttccccactgtccgcatccccgcagagacggcctgtcagcccctcactacctggtggcctgtctgtcccctcccacagcatggacttggcttgtcgaaagccatccctgccctggggctgcataggacccctccacctggatcccgttctgctgcattcactgcccagcccccggtgtctcattccagagtggtctccatgatggcatgtccatgatgctcacatcccctgagaatgtccctggtgctgagcatagtgtctagcgtggcaggtgctcagcatttgctgaatgtgtgaagtagcgagtgcctgggcccaggcctgtgccacgtcccggacaagcacagtgctaggcccagcagtcagacctgggagggttatctggccaaagatgcaccctgagggagaggcaggggctgagccaccctaggataccgtctggcgttattcaggagatgcatcttctaaatagggccttcccttgtgaaaagggagaattccacccctcccagcgtggccatgtggattttgccccctggtgtgtccctcttgctgcacatcagctgacctggatcctcagctacactcctggtaacatccaggtgaggccctgggcctctccacagcagggctggacgggagagcagcaggaggaagaaaaccgatgtataagttcctaggcaagccctggacatcaggcctcatttagagagcctgtctgtcagaggcagccagaaaaatacctttgatgcggtcaagagtgttccatgaggctgctcctcctcctcccagaggctggcaggcctcctcggtaaccttgccacccacccgtcatcacagcagcagcctcttcctggagaggcctggccctgaaggaaagtggactaactctgcggccaaggagacccgccagggtggttcagaggctcccacattctcttccttggggggctccgagcagcccatgaaaatggcccacaccagaaagggcccttccatggcccaggctcactccccgctcagtcctggtgccaccccacatgccccagaggtcatggcctaagttattcatgtttgcttgttcgtgtttcgggttctgatggtaagcatgacagatgtgactcctgtgcccccagagcttgcagtccagcagggaagaaaagccataaggatgtcacacttcagcgatgtgtgccaagtgggagaacaggtaaaggcaggtgcgtgtgcccagcacagggggcaggggaagcctcctggaggaggagatgtttcagctgagacctgcaggatgaggaagagctatccagtcacaagaagaggcaagtcacggatggagagcggtgcatccaggggtttggggctgtggctgtggggaactgggagaattccacaaagagagagaagagtcctggtgtggaggcctgtgggtgcagcgagccctttagactctgtcctggaagcaggggcgtcgaaggctttgggtggtgtgatcagatgtgcagtgtggaaggagcctgcagcctgggccagaagaggggacaacatggttagagatgggcgagctgtgagaagacagtgtagccaccgggccaggagctcctgctggcctgaactgccatgccagccctgtggacagacagacatgggccgactggatggactctggaaggagaatctcggtggcaagtgagaagcggggagcacagaggagggccgaggggctcctggcatctgggttgggtgcctggaaggacgagagaccaggggtgtggggaaatggcaggggacagccacgtgggtgtgccaaagatgtgcgtggacagagctaggactcagcagctcagaaacgccttgggctggagacaggcctgccttcagggggccagtcccactccatgggtctctgcgaggccacccagtgagagcagaccgaggcagtgcaggcaaggccctccctgggcacgtgagccttcagggggctggtgggggagcgtgttgttgagttcctgccatggcaagaagtacccctcagagttcctctttggtcccatccagttgctagctttgccttggacagatggctatgggaggacaggggcctttttgaagtgccgttgggggctgtggtgggctgtcaggtgggagccggaagaccctgccccgtggcagctgtgcactgggggtggtgcctctggttaccgtgctgcctcgacagggtgtcacagagtgaagcacgtcccccagctggcgtgaacagcggcagcaggagggctcttgcatgtstgtcacggtgatggtaagaaccgtagtccagcctttctaggctttgcagatgtattatcttgagctttgaagtttaccgagggtttctctgttcacttcctggtttgttccctgaactaacaccaccggtgcatagactattaaaacctaactgtcacctgtacaggtcctgttccttgttccaggtctcacaagcaagcaggacttgaacccagatcgctaggtccccaagtcctccttgtcatttccttttttaacaacaacaacgacaaacccacagagacagaaggagccgttcacatcaagcctttctgacctccctggaggtgatggggtaccatcgtatctcattgtttctggcaatgatggcaaacatcgagggtttataaagatcctattttttagcttacagaatgaagtatctccaattagaagcatcctcctgaaagagcactgtttcttcccatgactaattgcatgcatgctgagattttgtggagccttggtgtctgctcctgggaattccacagaatgtcccaaatgactctcgggaagccacgcccatctctcttcagttctttttggacttgggatgaatcgtgtgagttttcagtctccctcagttgccccgtgtggcggcagcatctgcattgctgcaggggagcagttgggcttcatgcaggcctgggctgggccctacctccctcccgaaccttgagcttgctcatggaagctctttctcctccaggtccccccagcggcttcccatgcacttgcccctggggagaattgcaggaaacacacacatcgagtgccgggcgcagggtcagaaccaggatcggtcccgctccggggtctgagatggagagctggttcttctttcagaactgcttccctttactggggtgtggtggctcacgcctgtaacccagcactttgggaggccaaggtgggtggatcacctgaggtcaggaattcgagaccagcttggccaacgtgatgaaaccccgtctctactaaaaatataaaaattagccaggtgtggcggtgggtgcctgtaattccagctactcaggaggctgaggagggagaatcacctgaacctgggaagtggaggctgcgctgcgctgaaatggtaccactgcgctccagcctgggcgacggagtgagactctgtctcaaaaaaaataaataaataaataaatgcttccctttgtgctacacccagctttccttggtggaaaatagcatttatgatagatagatgggtaggtagatatagatatatataacctgtccaaacagctggcaagctcaggccacatcctccactgctgattggggtggtgattcttgcactctctgccgtcctcggagcctcatcctttttgtaacggattctgtgggctttctagggaagctttttttttktttgttttttaatcttcagctttccctctcatgtcttggcaaagcagtgaggcctggagtctcttcatttcactctgacagctcttatcaatctccgccttaattaaagaaagcagatttggcagcrgtgtctcttgtctgctgtcctttgggacttgatcgctttacagcagcagcactgattggcctttcttgctgctttccccactgtccccaggtttattagtgaggatgtctcgtggatacaaaaatagatacctagatgaatagatattagacatccatccgtgcatccacgcacagcacgggcgaacgtgcgcgccatcacagtgacacaatggggcgcaggagggaaggctggacggcggcgaggatgcttgctgcagagtcgcagagcagcggagccccggaggacctgccaggttccttggctcagtgacttcagaaatttattaatcaaaggcaatgtgtgcacaacgcagtatgtaaaacacrtaaaaagcatctctgttctgctcgaagtgggtgaggaggtcagaggagctggtcagatgggggaggatttgagggtgctttcacccctattgcctccaactcccctatttaaaaaccagtgctctagtccaaggctccaagaggagaggtgattcacccaaggtcgcattcattaacagcgaaaacccagtcaacagaaacctgccaacgagtctgatgcccactccatggggggcactttcacctttgaaatcttcacctttggcatctgggcttccctgtccaggcgagtcagcaccggcatgaaataaatcctcaacaggtgggatagaaatcgcctatttaatgactgccacggggtggtggggaaaacattggactcagaacctgggagagctggctcccagcaacagccccgctactggggcaaatgacttgttttctgagctgcggtttacatcctgaaatgcgcctgatgatgacagtgcctgtatctctcgggtgtgagatccctctcgtgaacttggacatggcaaggagggatggaaataccaagagctttgcagcctgccaggcaggactccaagttcaggctactctgcctgtactcctggtagaccatggataagccacactctctggcttcaactccctcagctgtgagatggggcgacaacgtccccactagtgcactggtcctgaggactcagcgtcatggagggcggcttccctgccattcgccagacgccacgttccgcctgcctgctggcggtggaggggtcccccgtgccttgcagctgtgcccgccccccttcctcagaaagccagctctgtctctcagttgtgcatgtcacgtggtgaacacacacgtcattgtcctaggtcattaggaatgtcagactcactgctcccgacacagccctctatggtccgtggagccttccctggatctccatttgcagctatggagttgcgtcaggtttctgctgccagctggtgtaggcaccatcatgcaagaatacctaaccttgactgacgttcttgcctggccaagcctagcaggtggcactaaccacaccaccagcaagcagagtcccttgtgactcagctcccactgtgacaggctctggtgggcgctgggtacacagaacctcacctcagkcttacaacaactctatgcaccggagtttctcaccctgcttcgttccagaggcccacacagggctccatgacttgcccagtgtcacatggttaccaaagccacgtggctggtaggggttgggtagcgatttgcacacaggtcatgccacaggaaagcctgcgtttcctccaccgccaaggcacctcctcaccaggggctctcatgtttctgatccctcctgactttcagtagccatacccaggaataacaccagggtggccctgcctcccctcccccacactcaagttcattcccggcccctcctgctcctgaagcggaaggaagctgaaatcagtcagtccaatgacgggcacacctctcagctctcctcatgagaaagtccacactgcacattagcagcggcccttctttggtggccgcagctgcttctggaaatgcctctttcctgcctgttctgctgggaaggccacgtctgggaaggggcagcacagtgccctgcctgtgaaccacccgtcaaggcctgcgtttagggcaagcctccgcttcgagtaaggaaatgacttctttaatctgcggggcatttgccctgccaacctctgaagtcagccaggtgccgtggccggattcttcgtgaccagctccttccattgccagagcagaagaagctgggtcatcagccagagagggtgggcctgtgtgggaaaggcaggacacaggcagcagcctgcctgggaacactgctggcccagcaggtaggagggacattctctggagaaactgaagcagaattgctgccccttttagcagaatcttaaagctaaggaaggggaagtcggctgggggaagggggctataggttttatgaaggttctctgctccaggatcacaaggctaaaatcagggtgttttgtcagactgggttctcatcagggaatggagaaaaatctacttctaagcttgttcttattgttggcagaattcaggtccttgtggctgtaggaccgaggccccagcttcctgctgatgtccgctggagactgctgtcagctcccagaggccacccccattcctggacacgtggcccctccatctcaaacctgcagtggggtgttgaacccttctcatgcttctcatctctgacttccccttctgagatcagctggaaaaatttctctgcctttaaagagctcagcctgttagrttaggcccactcaaggaatctcccttttagcagagaatgccgtaatcatggaagccataacattcccaagttcccacaccctcatggggaggacgctatccaagggcgagggtctccgggggtcatcttggagctccccacaggaagggacacgtcatccaccttggaggtcaaggctgcttcctgcaggaggctcttctgggcaggctcatgaggcggaagagaagtcagccaggcttagagccccacaagcagagggaaggcctctgtgctcactctggcggacctttatttacctttccccagaatatgacacctgcccttggcaaagagctcgctgagttcaaggtggcaaagctgagtcctggggaggctggggaaatggcatggtcctcctgctgggccctctcccaactccgtgcccactggtctcccacccccaccagcctcccctgcttcgggccatacctgctcgtcccagaccaaccagcggctgggcttctggcaggagcggcaggtctcactagctgctccacgcgaacaccccgcgcattctgtctgcatggtgtacgtgccttgtcagatttcgagtattaaaagcagtctctgagctgggtggtcctcagatgttatcatgcaaatgtagctatttttactggaaggccaaggaagaaagaggccgttttgctcattgattagaaagtgcactcacagggtatcagacttgatctgatgagtctggcagggccgggagagccttcccaagggaagcttgtgagctcgaacgaggccctcagaggtggcccctgccctcaccctctcagagctggttactggcaggggacgcctgtgacaacatgaaaggtaggtgctcgctatgagcaccttgggaggggaagcaggaacctggagacacaaggttaatggacacttcacggagaggagaagggataattgagtaataggcactctgaaacgtagccaggacaatggggctactcaaggcaacgtgacggagtgggcggaagcactgtggaaagagcacggaggcagaggcctgggcagccttccgctctccctactgcaggccgagacactccgagcacgtccatccccctgggcctccattcccctctctaaattgaggagagtaacactttcactgcggcaagttgctttgcaaagcaaaggagcctcctctcacatgatacctgaccccccatccagtggggctcagtgaggggtggggtggatgactggatggagaggctggcacaggctgcggcggtgggggtgttcccacaggctgtggggcacccagcggggtggggagcttgggtaggagtccaggtctatgccagttccttatagggagcaaatgtaattaatttctcagttaaattgaggtgatttgtgtgtgtttatgcatgcctgtgtgtgactgagcgtgtgtgtgttagtgtgcgtgcttgcatgcatgtgagtgcgtgggaagagtgtgtgtataaattgtgggtctcttcctgtagcccctgttaggatcaaatatcaagaaacctcactgatggctgggagagtctcttgcccaccttctccaccccggaaacccaggtctcggcacaagcagatcctcctcagagtctgtcagacacacacgacacagcagaccacacaagtccaactaatgtgtgggcggctgtcttctgccccagatgtgtccttggaacctacaacaagaagcttagagtgtgaacttgtggagcctgcgtgccctgggttcaattcccagccctctctcctgtttgcccactgagtgcccacagggagctccttcctgtctcttagcagatggctcatttctgaaatggggcaagtgctcccgcttcccaaggtcgctgtgattgccaagtgcacgtgagcattcggcacaggctgtgtgcagggtaaatgtcagtcagcgcggccagcgatggagcttgctgccgtgcacttcatcactgttcaataaccctgacagttcagcctccctggagagcaggtgtcctgggcgggaccctctgttcgtggtcaccagcagccttgctcttcacagtgtgggcctgggatccagagaggcttccgggctccctggtgcagcagccgaggctggtgtttggcattggctaacacagccccttctagaggtgtgtgtctgtgtgtgtgtgtatttgcatgtgtgcatgtgtatatgcatgtgtatgtgtgtgcatgtgtattcgtatgtgtatgtctgtattgtatctgtgtatgcatgtgtgtgtatgcgtgtggtgtatgcgtgtggtgtgtgcatgtgtatgtgtgtgcatgtgtatttgcatgtgcttgctcgtttgtgtgtgcatgtgtgtatatgtattcatgtgtgtatgtgtgcatccttatttgtatctgtgtacgcatgtgtttatgtgtatgtgtgtagcgtttgtgtgcatgtgtatttgcgtgcatatgctcatttgcaggtgtatgctcatttgcatgtgtatgcatgtgtgtgtatgtgtagcgtgtatgcatgtgtaattgcgtgtgtatattcacttgtgtgtatgcatgtgtgtgcatgtgtagtgtgtgtgcatgtgtatgctcatttgtgtgtgtatgcatgtgtgtgcatgtgtagtgtgtgtgtgcatgtgtatgctcatttgtgtgtgtatgcatgtgtgtgtatgtgtttgtatacatgtgtgtgcacgtgcacgtcaggctccttcccttgcttgcgtgctagcaggccacagaccatcgtcctgtttctagatagctctgtaggtgcatttctgtttccagctaacttcagcttatgctaatggagtatttgtgttcacagtcattcatcttctctctctccttccatgtcactcttctccttgccacccctacccatgcatgtagagaggagagttctatggtaccaggacctgggaagtgcgtggtctgtggacacacatgtggctggattccagccccagcgctgtcactcactaggcgtgtgaccttggccagccattgacctctgtgagccacagtctcctggtttagaaagtgggaaagcctagctcatgtgtgtagcatcgctagagacagtaaggagcagatgtccattctttctgcatttttcgtcccttacctgtctctcaggatccattcttttcgctcttgtgttacaatatttgggatcatagccccgcaaactgtgtgagctggaagggccctccctcccagagtgcaggagttcgtgttgattctctcccacagcgcccatcccaaggctcttggtgagaaccagggttgtgagcatctccagatgggggtatccagacgttgctcctcctgggactgtgtgttagtagattgcactcgtgtgtttgcgtgcagatgagcattgaggcagagctctcccattatagcacgtgtgggagacccatgtcaggtggtggaacgggaacgggtcacaaggctgcagctaagacagagactactgctttggaggctgtgagcttgggcgaatatttgacatccctatcgtctgcttcctcctgtttgtctgcacagtgattgtgagaagtaaaggagacgatggctttaaaaagtggtgcacgcaccaaagcagtgatgggattggttcgtagagcgaagagagagcaaagactttataccctccggaagggcgtctccgtacatttacacattctcacacattagtctagtacacatatgtatgttacagtcagaaaagaaactctctaaatatagacgaagatttgtacaggaacaaggaaagagaagcttgccatgttgatctgcgggcattttttttcttcctccattctgcgtctccaaatgtaggaatttttaagcagagaacatatatggaaggaaagaagaatttcttttctaagttttgatcttacaaatatagaatagttgggtatctttagctgattttattcaaatgaatctgtcatttcattgggtgagccctccctcggattgcatgtatttgtataaatattgctcatctcttattcattggtttcatgctgagattcagacgttgggctctgggggacagagggcctgctggcatagtcctagggtgccgtctctggagccagacagacctgggcagcgttccttcaagttgctcgctggtgatcagcttcagggaaacaaaatgatgtgtcgatgaccttgtaggcctggcccttaatgaatgttacagcccagtgtcagacaccctggggaactcaagcaacaaatattaattgcatcgcccagccccatgccgggaaatctcaggatgttccttcaaaggagcatttcccgatttggtaatgacttttctcaatggagcttggtctttgaaccacttggtagaaaatgtgagcggttatcttcaattgacaacctttggtgtgcctttggccgcattgtctggcttattttgaggaaacatgtagtgtggtttcctagattagctcctggggaccagagatgccaaatagatcataaaagagaatgctaggaggaaagcagccacccttgcagagtagaggrtattctgtcctcacgccagttcaggacaagccaatacaaactgaggacctctgtgtaccaggtacagtgtgaccctcagcagacaggcgtcatgtgggcacactgggcaacatgctggggagaggtgtggagtgaggggaacacagccctgcagccagacccatcggggaagcttgctgtagttgggatgtgtgtgtgtgtgtcccctccaagtctcatgctaaaatggaattcccactgttggtggtggggcctggtgggaggtgtttggatcgtgggggtggattcctcacgtgtggcttagcacctttccctcagtgatgagtgagttcacgtaagatttggttgttggaaagagcgtggcacctctccctgccttgttcccacttttgctctcactgtgtgacacgcctgctcccactttgccttctgccatgagtaaaagctccttgacgtctccccagaagctgagcagatgccagtaccatgctccctgtacagcctgcagcactgtgagccgatgaagcctctttcctttgtaaaccaccctgccctaggtgttccttgatagcaatgcaagaacagcctggcaccgagctcctccctcttgctgctgtcctggctggctttgccaggacacctggcttctcagagcctccattcacttatcagtcacgtgcgggcacgcagtccttattggcaccaccccagcacatggcaggcctgggttgaaaggtgagactgcctgacctcctctttgtgcttgcatcccagctcccggggaagccaacgcggtctctgtggccatctcccttagccccgtctaaatgctgctaccctgctcccggagtccccatcagggggttcccagcttgccgtggtgtcttcagaagctgcaakaagcttcagaatcccttccaaagggattacggggatcagccatggctcagccttcctctgtcctgcatgcagggccactagcaatgacgtctagcatgtgccagacacatgcctcggccctgcggatactgagatggtgaagaaaccaaggtgcctgtcctcctcaggcacagggagccactaccctgagccgcgaggccctgctccaggccgagacctgctgtaggcgcttcccgggctctagctcaccattctgcaacagctgtggggcaagtgccktcccttccccattttagaaatgggcaaacaggtgtgagaggtgtcctgcaagggtttccacctgatggctatgttctgtgttagctcctgcattgggagctactgcagagtgactccaggttccggaagatggaccggcaagcagtctgtcccttctttgatcacacgtatattccctaaagacatgtatgttccattctctccgggcttctaactggttctccctccccatggtgtgtctccggcttctgtgccttgctctctgtactgatggctcccacagggacctgtaccaacctctctgcagaaacccaggctctcctgctgtacctttctgttcacagttcagtgtatctccagaatggagttattttccttcccttccaaccttgcttttcccccggcgtccccagtccacaggaacggcgtcaactccagcctttcacacgagccagagccccgggccaggctgacagcctcacactcctctgccctttcctgtccatcgccgagccctgcccatgtggcctggcaaggtctccgctatcccctcctgctgccccactccaccgcctctgccgtggttcccaccctcttcattcagttgtgcgtttatttggtgccactcacaggggtctctgttccccccaggcaccgaccctgcgggggaaggaggccacagccccagctggccagggctgagcatggcttgcccaggctcacccggccggctcctgcagcccccatctgctgagaagccctgccttgtcttgtctggcccacactgtctctcactctcctgttccgtccctcctcttttcacctgcagtgtagtcctctggaagcgcccctccgatcagtcacacctctccaaggaccacagcccagtggactccctgtttattgattccaggcccccagagtctggcttttagcctctccctccactcccctctcacagcctgcccctctgggcctagaaagactgggagaaccaacgaggctccaggttgggtcaccctgggctctctgtgccctcccctacttcagacctggccaggaagacctctccacgctcctcttccttgcccaccaggcagaatgggctctcacccccacctgggagaggacaggggccctggagctcccctgctgttgcacatcctcatcatggcctgktccacgggcgggttatatccgatgctcacctctccccaccagagcctggcatggcgctttgcacaggaaatattctgattcaggaacccatgggtgaggaagccctggaaatccttgggcgttgacactcagctccggccatcgtctcacggctgttgtctcggaggctcgtctgctcttcggaattgcctccctttttccttccgggcaagctggctgctcggcggtatcctccacggggcgtctgatcactggctgtgtcctgcagaagccctggcccaaagcaaacaaaccagagccatgaaatttcccccgggtggaagtgacttttttctcagaacttactatggaaattaaatttccatttttcttgggaacattaattgatcccaaagggattaagggcagagattctctgagtggagattcagatcctgaggtctgaggttgggcatgggacccatgcagcccccacctggccctggtgcccatccatccggcgcccgggaagcacttcctgggcccacagcccgtcattccttatcctgcacagccatgggatggacaggccttcatcctcacaggatgccagtgccgcctgcaccaggacctgtgcttctcctctcctccattcggcgggaaagagtgggacccagtgtggctgcaggtcccagaggagtggctagttccctgaaagacaggagccgtttctctgcccaccctgcgtgggctgccctgttgggctctagctctgccttgaggccaccccatgcctcagtaagaccttctcagacccctctgtaatcctgtagtcccgcagcccacgtcccacgtccagggcccgggtcatctgtgacccccactccagcaaccccacccctgagtgttctctgtggaatgagaggtccttttggcgctctgtgagggggaagaagggcttccctggtcacgtccacctccctgcaggggactcacgagagcacacagaaaaccctggaggccttgagtaaagaaatctgtgaatcccatcacacccaaccgggcccagcctccttacagcatggaaccttttacaaaggtaaagtcagctaggcacagtggctcacacctataatcctagcactttgggaggccgaggtgggtgaattgcctgagctcaggagtttgagaccagccttgccaacatggcaaaaccacatctctattaaaaaatacaaaaaattagctgggcgtagtggtacttgcctatagtcccagctactccagaggccgatgctcaagagtcgcttgaacctgggaggtggaggttgcagtgagccaagatcacaccactgcactccagcctgggtgaaagagcgagaatctgtcgccaaaagataaaataaaataataaaataacataaatataaatataaaggtaaagtccattaaatcccttaaaacgggtgttcccatggagcatcctttggaaagtcgccctgctcagacgtgggtttcctccaccgcccgacgtgctccactgcctctcctgtggccctggcagctccaaggccttagccacgtggtgactgatgttaatgacagtgctgtggtgctggatgtccctgcaggcccccgaagctctgcacaggaagcacgcttggcatcgtcacagtgacccggcgacttcctcacctcatccgttttgcagatgaggaaactgggctgccgaaattacgtgatctgtacacacaccgctcagggctagttccaagacccagaaaaccttgtggccaagacctgaccactttctttaatggtcaaattctttgagtctgctttctcccttgtaaaatggggaagacatcacctccctcccataagtttttggctctgagtgaaaatggggtgaactgatacacgtgagagccccatgtaaactgctgcctgctcctgtaatagaagacctgggtatttttatccggatcctcacgggcatgtctaacaaattctcagcagtcagtccagcacctttcaactctctctccaagaccttctgtgccaagggtgggtgagagggcctggagggagcaggtgtgggcttgaacaccatcatgtggccgcgagaccccagctgttcacgttttattatcctgaggatgcccatcaggcctctctttgtggcagcgcagttgcctctgcaggccccagggatgttcagagctcagcgtcagccccatacctggaaagactggcacctctgctgcagggcttcccaggaacactgtccgtcagcagacaaggctttttataggtctctgtttccacctgggagagacccccgtgcatccctcttcctgggcatggcagctcctggagcacaggcccaagtccagggataaacaggggcatctgctggtctgggtgggtcactgtgaccctgccagagtctctgatggttgcaggagacatctgaagtccttggcgtggcatttcaagctctttgtggcatgttttcaggctcctcaaccacccacaccctgggcaccttggtctcttctctttcctgtgaacccactctgcattcgggcaccaagcctctgcttgcttgagccccttagcctggatgtcaactctcggtccccacctgcttcccccacttaaaatcacactctttctccacatcagaccgctgggcacctggtccagctcaagcactgccttcctgtgacaatcaaagctcctcccacctcgcgcctctggggtgactgggcactgggaagggtactggtccgaactgaatgtgtccccccaaaattatgtgttgcagccgtaacccccagtgtggttgtatgtggaaatgagacctctgagaaggcaactaagcttaaatgggggatgaggatggggcctgagtcaatcaaattactgtccctgtaggaagaggcgccagagagctgcacacacctgaggaaaggccatcttgagctcacagcagcaggttagcggactgccagccaggggagggccctcagcagacatccaccctcctggcaccttggtcttggacttgtagcctccagaactgtgagaaatcaatgtctgttgtttaagccacagtggtgacacattgtgacagttgcctgaactgactgtggcaggcaggaacaaggctttgctcatgtttacactactgccaccctacccagccatggtcctggtgtctgaagactccatgtgtcagcggcaggcagcgtgtctgagaggacgcatgcactcagcaggcctctggcagatggcagcccctctgctgtccttcccatggaggcaaggcagccccccmccgccatcctacggctcttggctctcaggtcagactcctctccttgagggaggccatctctagcacctgcttgaggtctggcccctgggtgtgctcttttcaaccgcacaatagggtgtcaatacacaggcccggattgccagtgtcggtgtcctcacctgagctccccaggagcctggggcggggtctccttgccctatgtagctggtacctggcattgttctctcggagcacatgagcacctgggcaaccctttcattttacaaatgggaggccatgccttagaaggctgtggagatcatctcctcatatgtcactgaccccagtaacctgggagccactttggagtgggtcatgccgtcttccaggtctgcttcctgggtgctggtgtttggcctggagtagatgctaatacaggattgaggaagggactgaggaagtcacctctcctcccccacggcctggcccacagctggcccagctcagcgccaggtaatgggtttttaattgagctggatgaactggtctgcccagagcctcaaggctgtttgcagcaccccacggtccctaataaagccatcacgactgaaagggcaggggtcaaagccattgtgccgagaaagaactctcaaatctctcttctttattgctcagccacttaacgaattctcagagtaaggaacaatttaggcccagccaatagccgagcatggcactacgattcattttctctccgtcgagctccatggggagaactccagctgctacctttttgattcctatttaccaggctattatggcacacgaatctgttggtctctactcagaagccttaacaagctcacgggtcccgtgcgcagtggtggctggaccgtcatggagcctcaccatgggtgctggtttgtagtcgagaaagcactttaaaaacattgattacattttttaagctgtaagagtaatctctgcttattttaactattgaaataatgcaaagcagtatagaaagtgttaatcttctctgccacctccattcccatccttcggagaagcccggtctggaccctggggtaggaccttttccacatttctccaggctcacattgatgcatatggagatgtattaacatacaggaaatgggtttgttttacagaagcggggtcctgctattcttagattcctctgagacccgcatgctgacattttgacctgtgccacagcatactctccaagtaccaggctgcagcatccacgtggccccagcctgggagagcagcccctgggcctcgcccttctcagcactgtgcacattcagggacttcatattttgccatttgccatccaccgaatgaaacacattgttgctgctttcacttgcttttcgctggctgctccagaggctgggctttgctcatgtgtttctttgatcatgtggatttctctccttagatgccctgttcacgttctctgcctcttctatagaattgtgtggctttttcttatccatttgtaggagattgtgacctggagtaggaaaagactgcctactgcagatacatttcctggtgctgcagatacatttcctggtctgttatatttcttttgactttgttttcatggcttttgccacataaaatttgttcatttttctgcaatccagtatatcttcttaggaatgtctatatatataaaacatatatatacacacatactctcttattatttttaaaatttaaaacatctggaattcatttgtgcatatacaataagatagatccttgttttgttttactttgttatgccaggaccagttgattttaaaaaccatcaatttttccttgaattagcatgccacctttgtaatatatttagttcttttgtaaatgcggatctatttctgaattatctgttctactgtaaagactgctgtgctaatgccatgcccttttgtcgtaatggctttaagatatgttttaatacccgataaagcaagttctttctcacatttctttatggcttttgtagttatttgtccatttgaactttaagaacatattatccagtttaaagttagcattctatttggaaatacataaaaatgtgtatatgtggaatatttgttttttaatgaaatagttcttataaatttggccaggtgtggtggctcatgcctgtaatcccagcactttgggaggccaaggcaggtggatacttgaggtcaggagttcgagtccagcctgaccaacatggtggaaccccgtctctactaaaaatacaaaaaatagccaggcatggtggtgcatgcctgtagtcgcagctactctggaggctgaggcaggagaattgcttgaacccaagaggcagaggctgcagtaagccgagatggtgccaccgcactccagcctgggtggcaaagtaagactccatctcacaaaaataaaaaataaataaataagataattttttttctctctccattttaagagttttcttttctgaaatctgaaattaaaaaaatgtcttttggcatttatcagcatacttgtaacttcttttcccttttcagtgttgtaatggttttggacggtagttttctcttttttttttttttttttttttttgagacagagtcttactctgtcgcccaggctggagtgcagtggcacaatcttggctcactgcaacctctgcctcccggggtgattctcctgcctcagcctcccaagtagctgggactataggcgcacgccaccatgcccggctaattttttgtatttttagtagagatggggtttcactgtgttagccaggatggtcttgatctcctgacctcatgatccacccatctcggcttcccaaagtrttgggattacagatgtgagccactgcgcccggcctggmtggtagatttcttggtrtgagctctccttggattaatcatacttggtgctggtggatgattctttcgatgcactgctgggtttgatttgctaatgcttcatttagaatttttgccctgtgctcatcagtggaatttatctatagttgtctctgaaatactactgtcttccatatgccgcctctgtgcactgatgagattgtccctgtcccaggggcttccaaggaatgatgataaatgctagagcaggtggtccccaacctttttggcatcagggactggtttcttggaaggccatttttccatggacagtggtgggggatgctttcaggatgattcaagcctgttacatttatcgtgcactttatttctactattattacactgtaatatataatgaaataattatataactcaccataatgtagtatcagtgggagccttgagcctgttttcctgcagctagactagatggtcccatctggggatgatgggagacagtgacagatcataaggcattagattctcataaggagcacgcagcctagatccatcacatgtgcagttcayaatagggtttgtgcttctgtgagaatttaatgccactgctgatctgacaggaggtagagctcaggcaggaatacaaacgatgyggggtggctgcaaatacagatgaagcttcacccgccgctcacctcctgctctccagcctggttcctaacgggacatagaccggtaccagtctgtggccagggggttggggacccctgtactagagaatcaatcttgtggttaagatgtgtacaagggactaagaggtcacagaaaagagtgtgacaaattgtgtctgaagaggacaaggaaagttttccctaggtattgccatttgacctggttctcatagaatggggaagggctttgccaggcgacggaggagcaagactgttcactccacttggacagctcacattgtcaggaatttcataagccagttaacatcacattggtaactagaaatcagccaggcaggaagtatttacaccctagaaattggcaaatattaaaagtcaggttacccccacaatagccagttgttaaacatataccagcacaccactgactgtgttactatttttttctttctttttttttttgagacagagccttgctctattgcccagactagagggcagtggcgtgatctcagctcactgcaacctctgcctcctgggttcaagcaattctcctgccccagcctcctgagtagctgtgattgtaggcacacaccaccatgcctggctaatttttgtatttttagtagagatggagtttcaccatgttggccaggctggtctcaaactcctgacttcaagtgatcggcctgccttggcctcccaaagcactgggattacaggcatgagctaccatgccaggcctgtctttttctcttatcctcacagctcctaatcagactctccacccctgagggagggatcacatcatttcatcactgcacagggcccagcacctagagacagggcatgcatgcaggaagctgttaagaatactctttggagtcagaaagccccgaggtcagtcactaactagccaagggcaaatgacctgaagtctttgagcctctcttttctcatccatgaaatcaggatagtaagccctacactcatgtataaacagtgtatgcccaattacttagcatatactggtacacacrgtagcttaagaataaattgtggaactgaagtggattaattcagcacatttttgtgatcctcctatttgtctttggggatctcggtatggctttgtaagacatgagtaagcaagtctctccctgacccaagagtgcaggtcatgttgtatatggctctgtctgttcccatagcctggaggtattcccgaaagtctttacctaagttgcctctatttcaccatccatcccatagaggagtgagcagctcatggctgagtggtccccagcagtggaggaagcagaaatcattaggacccttgcaaaggaaaaaccttctaaagagaaggctgtgcggtgagcagcagccatgggcccaagcctcgcccttctcaccagccacgtggcgcctgctgccrggacgcatccacgggtaaggggttaatgaacgagaagccaggcctgtggggcaggagaccaggagggcacgctgcgrctgctcgattgagggccgtgaggacgatccatgggtctggctgcctggagcagcactgaatcgcagactcatcctgctcctttgccactagttcatcctctcggtagtctatcaacttctcagttttcaaggaaaaaggaactcctgagatgtaactgccataagtagcattctaagattctgtcctcaaaaagagacacagctgtgccctccactgctgcatggcatgtggaaatatatgagatttgcagcctgaacctgctatccccagccatgtccactgaactggtgtcttggcctctctaacctcattgacttaactccagatggggcgctgtgaacctgctccagcggcccctgcaaggcatggggctgatggggctgacctgcacagagcaccaggcccagcctgcagcaccctgggggtgctcagaaagcagtggctggtgtgtgtgtgtgtgtgtgtgtgtgtgtgtgtgtttagtttatgttcttccttactgaagataggacttaaatggctcacaaggattcatcaaaaatgcaagataatatacacttaaatgcatatcatctggagcaaaaggagaaaaagaagaagatggttattaaatggagacagaaatgaagctgagactgtgcctgcatgtgcagtgagggcgggccgtgagtttggttccaagcagctgatggaaggaggtgggaagtcactgttcctggcaggagttggcggacccaagacagtgtccttatccacgaagcacaggaagggtcgcttggcattgcagaggtcatgacagatgcccttccattttaagatgtgaatattatgtaaaaatgaaatgaccctctgtaggaggctccgtcttattctttgtagcaagtcccagacctgcagttgggtcccagagaacactcaggagccgtgggatgttctctgaggagcagtggggtgggaggggactctctgggctccacctctcctctgtcccctctgggtcggcccctgtggcccatctccatrctgagatgggggcagcccccttgcgtctctcccagccccacaagccagggactcaaagctctcccagtgctgcaacacacccagcattgctctaaatctgcacctggtgggctggcaaggaacgttctggggacagattgaccagcctttcctcctttccccaaagcctcaccagcatctggctggcccagctgctttcaccggaaggtacccactatccccttgcccttggctttcctctgaaccttgctctgaaaatccagttcacccaggccccgctttgcctgatcaccccctctcatctatcaagtctggccttccaggcctccacaccaccccttccagaagcttccccagtcaccaaggctgccctctggtgccctgcggttctcccacccactctgtgcttcccaaccatagcatctgccaaacacagccgttcttgccagtttctccagtggttaagccagttttatccaggctcgggaatccacccgccyggtccccagcctggctccgtcactcactgcccgtgtccctcatgcaggttccttaacctcgctgggcctcggcttctacgtcaggtctcaaggtgactgtgaagagtcagtgagctcctaagagtcaggtgatgagcacaagagccacccgtgtttgcacacgcagcctccttgccctctgtgtgtgtgttcccctgctggtgatccccggagccactgctcaccccaccttcccaccacgagtccgtaggtagcacagtccctcctgtcaggaaatatctgtggattgactgttgaatgttagtgagtgcttgccgggcgctgtggctcacgcctgtaatcagcactttgggaggttaagctgggcggatcatttgaggtcaggagttctagaccagcctggccaacatggtgaaaccctgtctctgctaaaaatacaaaaattaggcagccaggtgtggtggcgcaagtctgtaatcccagccacttgggaagctgaggtgggagaatcgcttgaacccgggaggcagaagttgcagtgagctgagatcacaccactgcactccagcctgggtgacagagcgagacggtctcaaaaaaaaaaaaaagttatgaatgctgagtagttgtggtgatttagaaatggaaggaatgtgaatttcagatcagctttgtgacctcgagcaagttatttgctacccctgcccccattctcatctccagtaagagaggatgacacgcaccttctgccacagggaaggcgggcagggagctgggagtgatgggagcttctccggactgaaggctgtcttgcattttttctcttccttttgcagtcccttcccctcaattgactgatacagatgttctaaggcagtctaaaacagactgtccactgcaggactttacaggcaaccctgggattgaagctgacccacaacaggacctgggggaagctgctaagagtcgggcccaggtgctggcagctttgccgtacacatactggtggcagcaaggagcatgcgggtttcctgtgacatcaatggccctgctggcatcaactcggtgcccrgccatgtctgtcctcaaggagctagcagcatcgttttccagaccctgctctgcaagcacgttgggtgatttataggaactccttgggtgcaggattctgaaaccacaccttctgtctgtctttggcaccttctgggagttttttaggatagcaacccttggagctcacagctactgtttttcttcctttcctttcctttttcctttcctttcctttctttttttgaggctaactagcagagtttaggagggaaagctttgaaaacagacctggattcaggttctagccctgctacttattggctgtacaactggaaaagttagtatttcagagtctcagcttcctatctacctggaaggagagctgtgagatctgaatttagggaagtaaaactgggcccagaggagcctctgaactctggattcactgtcctgtcctttaatgtcctcctcaggggccccggggtccttttcctgggcctgctcttgcctgagggacttctyaccctccctcctgctagacagtctgctctcccaagctgagcaatttctcccccatttcctgacagcttgaggggttctgagcagcgacggtgactgtttttggcttctcatcgccgtgtctccacggggaaggccattggcatggaaacaggcccagctcgaggcttcatctctgttctgccgcctctcccagcagacataattctccctgtttgacatcacagcctgcccctggccgcccaccgcctgcctcgcggagcacagggctgctgggtggactgaacagctgtggcggctgccggaggaacgtgattcttcttgccgggcttcgagctcagaggcgggagctcagaggcagtgagggaagatgcagggagagaaaaggggacttttgagtcagctggactgagctggattctggtgtcaccttttccaggaactttctggggcaccctcaccgacccctgggctgggctgtgaggtctgtcttctgtgagccacattcctgtctgcagccctctgcccccacgctgtcacctctgccccggcaccgtcacctcacccccggtgccgtcacctctgccctggcgctgtcaccatgtggtttttgtctgctacctgcctgtctttcccatgattctgtgggctccttagggcctgtgacatctgattcattctgtgtccccaggcagcccattctgcagccttgcacacattagaccccaggaagcctgccttgctgacctgggcaccagctttccgaggcccctcaactagtgctgagcagagctgggcccagaggcagctcttcrggcctcatggtgagctgtttgcctctccccacccggtgctgctgccaaggtgctgggaacggtgttcagggaggcctggtgctcccctcctctctaggcctggcccttctcggctcatagaccagcaccaagtctcattcctgcggcatctgccatcgttctagaggacggttccagaaggtgccttctctccggagcatgatgggagaagggggctggccgtgggcctgggaggcactgcagcgtgttgcttgtgggacaggaggagtctgagctggtgctccccctcccttcttgcactgtccccacaccagccccacagcaggtgccttgtcatgacattttaagaggaggaaactgaggtgcaagaggggacgtgacttactctaggtcacacagatgtgagacctcatcagagtgggcctagtttgcctcctctttatgttctacctgctggggcacgccctgcttgtggggacacagggagaccggcagcacagtccttgagcagctggcacccggcctctgcatctcagaccccttccctggtagagctcaggagagctgagaagacagcctgaggaagggtggagaagtgggccggtcacacccatttggaggaagctgtcagggccaggcgwggagcttgcagctctagaaccttctagcagctgtctgcaaagcaccgttctggcccagcctcacacactcggtgtttttaaccttcccgaaacccatgtaaagtagcttatgttttcccccattccatagttgaggaaactgaggttcaccttagctatagcccatgcccctggaaggcaaagctcttccaagggttcaaattctaggccctgattccaacacctttactcttggtttgtgtcttttgkgggtgcagaaaatacactaatttatataggagtctctggttaaaaatatctatttaactcattaacatttttctttaatgatgagttttctgtaaaggttttttatttttaagtgatatatacatgtgacttaaaaagccaattcgttccacaaggcacataacgaagaccagcagtccttactcctgcctgccccatcacccagcgccagtcctcagaggcgcttctgcaaatgctaaactgtttccttaggtatttaccttgaaaatatgactgaattaatgccaaatagagtacgctggtgtagtgtgatctttcggtgttagacatcgtctgtgggctgctcrcctctacctgtctactacagttctatcacagttcttggttaaatccccacagagttcttctgttcatttttactgtgacaatgcgattgtttttcacagctaagccaagcatgtattatgattatacttcccttccttaaacagttttttttgctttttctagaattataattgtattttctgcagtgtttatttttctgtgacgctaatttttcttgaactttccatcagaaccacaaaattcctctcawtaccaccaaacccatcagctacatcgtgtgtgcatgcgtggttccaggagatatctctccagcgttctcatgtcctgcttccatgtggcctgaygtcctccaggtctgctgcagggctgtggtcctggcacattcctcccactgtccccagcaagcctctggactctcatctatgccagatcctgcttctgcttctcctgcctttctctttatcagtttacttcttcagtttgctggagctcatcctctagtgcttttccaggaaagagtgcataggaaaaaaatgtttttgaaatattgcatgtccaaaaaaatatatcttaaatctccctcaaatttaattgatcactcagcagaatttaggatttagattctttatcagtcaggtgaatttaggatttagattctcttccctttggaattgtgaaggtgttgctctcatttcttagcttccaaaaatatatagctttaaaaaacaagctccctccaccctattgagaagtcccctgccatccagattccgagctcctgatcctttgcaggtgacctgcttgcttctcttgggaagcctttgatatcttctcttcagtctccaatgttctggttctgtaatttcacataatgcctcctgctgttgttcttcgaaactcatttgttctaggccctcagtgggccatttcagtgaaaacaaacacaggcatcaaaacaaggactctgaaaaatgatttttaaactaattctacctccctgttcctgggttttctcttccagaatgcctgtttactggatcttggacctccttggctagtcctttaattttcttttctttgctgtttcctatctcttagaatgcttatactgcttcctggaaaatatccacaatttcatatccaatctctgtattaaatttttttatttaatttttaatttccaagagctcttccttgttctcagttcctttttatagaaccttgttcttttgtaatggctggactgccttttcttatctctgtgagaatattaattgccactttctgtgaaggtttctttgttctgtgaattgtttctgccttcctctttgtcttccccttcatttatctttgtctcttttactttaaaggtggtcctcaagtggctgtgccctttggcctttgttcctatgaggccctaaagtagatgggaagtgctggtctctgtgcttgggcaggatggctgactggtgggcttcacggacaggaagcatggtgggccccacccagagttcattagggactcccccacctatcctgagtctgtcctctggcctggtctgtcctctggcctggccagaggagatcctggagtatgccatggatctcactgccagcattcagggagccacatccaagaaggaggctgcccctcyccataattcatgtcaggactttgccttcatccctccttcatggaatcttgagtccagaggcttcctggcccaagtcctaccaagaatagaacttctgcaccgtccaccgaggtcctgttcatccctggccatttgaaggaggagagctttacgcagtggtgtgctggtagaagtttaacagccagctctcaggggatgggggagccctggtctgtagcatttgctggtttctgagatgtaaacactcctgtagtggccagtttcaaggtcccaacacgatgtcagccaactcgtgaaatccctgaaactttgtcagctccggctggaccctggctcgcaggatccgtcatggtcgttcagctgccactctgcacccattgctcatccctgcccatgccccgtggctgctcctgcttcgtgaaccctcacctccccacctccagcagtggccttgtctccttggcgtcgcctcccagggtttagcttctgctgccctgttaggtcagttacccctcacccatcctctttgcttcttccaaaaatttgttgccctctttccacagctgtcattgcctcctcttcctggtggcttcatatcatatgtattctggcactgtctgtctctctgtgggtttcaggagggaacagggtgaatgtgtgtgccaggtctgcctgtctgagcagaatctccccccacctgtatgtttccagttacccagtgatttagcatcagrcagatgtgcagagatgccagatgtgcctctagcacctctgctttcagcgcacacaggagtcagggaagagggtctggggtggcgggaggaaggggggtcactcagtatcctgccgctcaggaatgtgccttgccaacctcaggggctggcatgtggggtatctggtggctcagcagggtggtggccgccgtttatatggcaggcacagtcacagctactggggttgaggtgggggttggctcttgtggctgggagaggatggtgccggcagggctgtgctggctgtcatctggggactccttaagagagaatgggggcttctgcagggagagcaggaagatcagggctgggctgtcaggaggccaggctctggaggaccccagatgccagcaggcaaaattagacttgcatcctgaggccacagaaaggccctgctgtgggacagagactgaagtcggaggcgattgyccaggccccctgcttcagtgagatttacacccggctgtcgtatccacactcagtgatttcatagcctgcctcctgtctggcgcaggaagttgcccggtggctcttgggaactttcctgctattcctcagttcgcagtctcctccctctccagcactgtcagcctctaggcatgcctagaagaggaygcttcactcccattccccgtgctcacttagtcagtgttgctgatgcactcagggcagactgctgcatctgcctttggacaggactrtactgtgaagtcagtttcagaaatggcttctgtgcaattcaaggtgactttttctctcttgtttggataaatgctaagtgggacaagttaagtggattatctggatctggcatttgtttcctagtccttagaagggttatcaaaatagatgtttttgataatgaaatattacaatcagtagactctggtgttaatccatgttggaacctttgtcagatgcaagtcagagaacacaaaggggtttggagtcaggcacatccactcctaggcaaagagcattgaaaacatacatccacacaaaacttgtacrtgcctgtttgtggcagcatttgtcataaaagcaaaacgtgaaaatagccagctcaagtgtttttgtttacctatccatcagctgatggataaaatgtggtatatccatacagtggaatactactcagccagaaaaaggaacaaagtactaatatatgtgaaaacataggtgaatattttaaaatattatgctaagtgaaagaagccagacacaaaaggccccatattatgcaaatctgtttatatgatacatccagaattggtaaatctgtagagatagaaagtagattagtggttgtcagagggggtggggagggtagggaatgactgccagtgggtatggagttgctttttaggggtacatgggaatattctggcattaaatagtgctgaagggagatagaaatattctgaaatgtaataatgctgatggttgtgatatattttaaaaaccctgaattgtatactttatttttttgaaatggagtcttgcgctgtcgctcaggcttgagtgcagtggcaccatctcggctcactgcaaccttcacctcctggattcaagcgattctcctgcctcagccccttgagtagctgggattacaggtgtgcaccaccacgcccggctaattttttgtactttttagtagggacagggtttctccatgttggtcaggctggtctcgaactcctgacctcaggcagtcctcctgcctcggcctcccaaagtgctgggattataggcgtgagccactgtgtccagcctgaattgtatacttcaaatgggtaaattgcatggtacatgaagtatgtctcaaaaaagtaatagttaataatgggtcaggccgcacccacttgcactcctctgtgatcctcaggcttggtgactttaacgaggattttcccacctcctgccctcctcttaggtcaacaagatacacacctgtagggatgcgtgttccatttgtgcctgcccccacacccgaatgcccttcctgtctgtggagaagttctcatgttatgagtccagcccatctaaggcacagccagagctcatccctacctccagaacccacccagccggtgcctgtgctttgttcattcaatagagcttcatttttcatatttttttatttatctgatttatattgagctcctcctstgggctctacactggttttccttgaaggctattaacaacctctgtgctcatagtcaaagaaagaatttctcgggtgttaagcagagaggagctgtaacacagaacccctgcttggtaccgttcgcccaccttttgtggaggacccgcttcaatctccgcacactttcgtccgcagtgcctccgccggtggttgtgttgaggacrtctcctgtcggctcctgtgctgttcattgcgttttmcttgcagatttttgttggtgattaagcaagagcacatttatgaagcgccccgtgtagggtcctctgttttattaatggaagggaatcagtaaagcaagttcatgttcctccccactcttagttttaccagaactgccacctctgctggccagggaaagggctgccagctgtccgctttgccccttggagttcagaggctcttctgaacgcatgggtcatgaggaatgtgattctggggttgggtctctgatccctgtaactggctggtgtgacctgcaccgctgtggccttggcaacaatggtgtctcttcaaaggactcctgtcccgctggctatgctttctggcccctactcaccccacagacagccccagctctctgcgctggaaatccctggcttcccaagttttctgtcccttccctgggaagcctcagtccttctgagtgggtggaggctgtgcagggcattattaggtgacaggcttcctcctgcctctgagggcccttggttggctgaaggtgtctcgagggcatcggcaggtggctctcyggaggccgctaagtgctcgggccttcctggcctgtggccgatcaaagcactggctcttttccaaagtcaagctgaaagacaactctccttaacacccccgccccttctataagcttctcccccgtgcgtgtgcacaccagaggagtgaggaagcctctctctccccatcatgagaagcaggatcctaaaggaaagggtrcagctttgatgcaaagggcctggtgtgaatcctgcagctgctgcttgagaatcagggttcttaactgccagcaacagaaatggactctggtcaacttcagcagaacagcaggtgcctgggaaggctatcaggcagttcaaggagccactcagagtcaggatgggggttcaggaggctcggctactgccggacccagctgaggtcacacctggatgcctcccggttcaggtacacccttggggagctgctctgggacctgaggctacttctgctccactcttaatcctgttgctgctgctacatattgttttcacgggtccttggtgtcactgccgctgagccccgagtggaaacatccaggtggccaagatcatgtgcctgcgttttagtccaccaaggacagtgacagaggggacagggaagctctccccacagccagtaaaccagccgggacccacataccaccactgctgcgcacaggagggaaatcracccctcccgccgggcccccacccatgggaaggggcggagactgtgtgaccacacaaagaaactggcaaagatctgctgctccctttgattgcaggtgaccatttgatctccgggagccctggctccctcgcttggaacaggagccacagctgccgcgtgggatgatggtaagggttaagccctcggaatttatgtttagtgcctggcatgatacttggcaggtaggaagctctcaattaacgccccgttctcgagctacactttgcagcccttgactgttccactgagagctcggggcttccttctccagcgtgctccgcgcacacccctgcctctgaaggcatcattatgtgattatatggatacattgtgattacaggttagccttaaccaggcttttatacattgagacacttacaggcttgcattttagttcagtctggagtgggctttctggtactttaaagtgtatcatgagccctccttcttcgttctgtgtattttcgtctatacttaatagctgttctctgaggccgcattctctgggtctgtggttgatctttttaatacatgtcaggaattaccagccctcccactcatgctacgggctccttttataactcctcttgtggactctgcattttgaaaggttttatatgtcaaaatatatactactcagaaatcattaattcactgctcctggacagtaggggagcctggccagccccgactcccagaggaacgcaccaagcacagtgccaagcccacactggatactcaataaacattttcttggcaaatgagagaacaaagaacctggggccccaggatgttcaatgtcttagcctgagtgcacagctgacaaatggcagggctgccaggtctgcaggtccccacctgccgagtgtggggtcttcccacttccgaccctggtgagggccctgcaccgggaggaggttggattgggtggactctggatgcctgtgcatggcctggagttttcagacttccaggcaggaggcagcccaggcacacctcacgccacgctagattccacaaagccactgaaactaccaaaaggacacactggggtacgcctactccacatccagggggtctccgcagggtttggtgtggatccaacagtggaaggaggccaggagagagctatagtctgaccttcacctgcaaccccaatgggatgcatgatgaagagacacctccctcggattctatcatgcccctggaccccagcatgaggacccctctccaggggagggggcttagtgagttcatgcatgaaacatgctgtgagtgttgccacttgaggacctggccctgagctccagcytgctgctcccaaccatggtggctggtggggagctttccttggttgaattttatactcctcccatacaggggtcctcatgggattcagtaatgtgtctgaagcactgcatggaagaggctgtggggagagagctgccttggtggtgggtggtggctgcggcggtggtgcttggtggtggtggtgggtagtggtggcggtgcttggtggtggtggtggtggtgcttggtggcggtggtgggtggtggtggtgggtggtggtggttgtgtgtggtggtggtgcttggtggcggtggtgggtggtggcggtggtgcttggtggcggtggtgggtggtggtggttgtgtgtggtggtggtgcttggtggcggtggtgggtggtggcggtggtgcttggtggcggtggtgggtggtggtggttgtgtgtggtggcggtggtgggtggtagtggttgtgtgtgtgnnnnnnnnnnnnnnnnnnnnnnnnnnnnnnnnnnnnnnnnnnnnnnnnnnnnnnnnnnnnnnnnnnnnnnnnnnnnnnnnnnnnnnnnnnnnnnnnnnnnnnnnnnnnnnnnnnnnnnnnnnnnnnnnnnnnnnnnnnnnnnnnnnnnnnnnnnnnnnnnnnnnnnnnnnnnnnnnnnnnnnnnnnnnnnnnnnnnnnnnnnnnnnnnnnnnnnnnnnnnnnnnnnnnnnnnnnnnnnnnnnnnnnnnnnnnnnnnnnnnnnnnnnnnnnnnnnnnnnnnnnnnnnnnnnnnnnnnnnnnnnnnnnnnnnnnnnnnnnnnnnnnnnnnnnnnnnnnnnnnnnnnnnnnnnnnnnnnnnnnnnnnnnnnnnnnnnnnnnnnnnnngggtgtgtgtgtggtggtggtgtttggtggtggtggtgagtggtggtggtggtgcgtcgtggtggtggcggcggtgcttgatgaaggtggcgtgtggtggcggcgatggatagtggtggtggtgctgtgagagcagtggttgttgtgttgtttgcagacttgagggattcactggagaaaggtgattggggaccatctttcttcatctgtggtaaactccgttgaaagttcaaatgacacatttagacgtcatttatttcagactactgccaaagtgactgaaataaaaatcccagccacagcccggtcctcytggggaagtggtaaagtggagcagcagattctgagaaaagaaactagacagcgtgatgcatctatctcaagaaatagccctgccttccagtgactccggggaacagccacatatcgcctttgagaaaaatgggtttgaagttctctggaaaaccttctgccagtaaactgggaaggaagtgaacatttgttgatgggctgatatgtgcaagtgataggcagaacatgagacatgaggtgttggyatccagctgtgtttggggtctgtgtgtgcacaccctccaactgtgggcttatggtctgactgcctgcacagagagcggtgctgggcctgaggcttccctgcagttgcactgtctggagggtgggctcccgcatgaggtggctgtgtcccctggcactgtgtgtggttcatcagaggcaggagcacctgtatcccttctcctaggcagtggcagagtcaaatttctgcccacggggctggagggcagggcaggctgcaggactcgccgctctagagtttccaacggacgttgccttcctgagaggctgtgagcctgatgagagcctgtgacacacacacactcaacagcacacagacatacaccttcacatacacattcacacatggatgcacacacaatgacatacacaacgcgcacacagcacactcacacgacggcacacagacacaccttcacatacacattcacgcatggatgcacacacaatgacatacacaacaagcacgcagcacagtcacacgacggcacacagacaccttcacatacacacacgttcatctayggatgcacacacaacatacactgacatacataacacgcacacaatgcactcacacaacagcacacatcttcacatacacattcacacatggaggcacacaacacacaccgacatacacaacatgcacacagagcactcatacaacagcacacacacacgcaccttcagatacggatgcacacgtgacacatacacttcacattccacaccccgctaatgcctacactgcaaagcttcaattctcaaatcagagcctagaggcactgacagtcactttttccaaacagaatgttccacatagaaagcattcccatcatcgtcagcaatgaatactagttgatctcttgcccgtaaaagagagtattactcaactttgcactactggactaacataagcaccttacaggatttgaaagcttgcgatcactatgatatttcatcctcacagcgatcctgtgaacggtttagtagcaacctcatttcaaagttgaaggaactgagtcagagggccaagggatgcctgagtcctcactgggtggtgctgggagccagggtgggaagcccactcctctgactgcacttctcctccactgccccagggacccctcccatagccaggatctcagatcattgagggacccttttctcccaaacacagctcctctccttgtctcccctccacccctagtgaaaagccagtccccgtggggccagcaaagcggaggtgtgagagcaggaacccatggcctcattttcttgctggtctctcctgcgccatgatcaggtgggcagtcttcactccaagtacatttgtgcagggccagattctccaccctgcttgctccccgcctggcacagagggtgtgctcaggtgacccatgccrttctgtactgggttgcgtgggacaacagggagtggagaggagggaagaggaatgggctagaggaagaagcccagagctagaaaatcaagctccagccaattcctgggagacacagcaccttgagtgagctctgctaagagcacctgggtggggaagattttctggagccccaggagaggtccrggaaccatgtccacaggcctcagagactccctggcggattctgcaggcccagtcctggattaggaggytaccgagaggcrcagattgttgacaggcagaccactgcttcagggtttgcatgctccgcaaatcccatttattagctaattggcgcttgagaggtttcaggataaagaacagattggaagaaaggaggtaacacagcataactgacgcagaggagttcgtgcggattcctggcaggtcccgtctgcgactgtgcagttgaaacccagaactgtaaaagccacagtgcctcctggctggaacaggaatcccggttgataaccgtaccccaccccccactttcgcatcccagcaccccattataggttacagctcctggcattttcactgcctctgcttcactcacataacagtggacacagccaagggaaggggggcggggcaggagctccagccaccatgcctccttgggggccaggtgtccctctccataggcatgggctcccygggccccagattcctgccacacccacrcaccactcactggtaagccctgatgcctgcggctttgctcctggtgagcaccctggctcaggaggtgtccgggctgggatgctggggtgtgtggcccaatgtgagcaggaggcatgaactatgtcactttcaggaggatgcatctaagcagggaggccaccagccaagtctccccaggaagaggaaggcattgtgtggtctgtccccaccctcattcctctggcacctcacacttgtccctgtggagatacccatcctatcaacggacagctgctggtgggagggaagatacaggagggagggaagataccagagggagggaagatactggagggagggaagatactggagggagggaaggtgccggagggagggaaggtaccggagggagggaagatgccggagggagggaaggtgccagagcgggggaagatgccggagggagggaaggtacaggtaccggatggagggaaggtgccggagggagggaaggtaccggagggagggaaggtaccggagggcgggaagatacctgagggagggagataccggagggagggaaggtacaggtaccggacggagggaaggtgctggagggagggaaggtaaagataccggacggagggaaggtgccggagggagggaagataccagagagagggaagatactggagggagggaagagtgtggtttcagacagctctcctgggctccagtccctgccctgccatggaccagctctgggacctcaagccagcgactgaatgtcttggagtcccgtctccatacagatgaaaaacctgccttctggggcagtggtagtggccgcctcgggaacagctgtcagttccttcccgggaggggcacttgctctttctgggagctgcacatctcactgcccctcagctttgggacaggcgacccagaaagcagctggtctttccgaattgtcttcctgcctctgcacggacccaccagaaaccctgctcttggcccctcagtgtggacacgtgtgtcctcttccaacagctcagtctcactgggtctctggggcacatgctcccaggatggcagctctggtcacccacttccctggccctgttggctgagttcttgggcctgactgcttctcaggccttggccagccacagaatgctgtcctggcataggtggctaccacatgtgtagtcagcatggcacaggtgacaggtctcacagcaccacacagcacagcgggctggggacctcagccaaaggcgccccagcggcaggagcgcagtctggcccgtccagtacaatgccctctccrtcttttggcacctggccagctgctagcaagcgtaggtgttttgtggcatctgtttgctgtgccttccatgcgtctgtggaatctgactgcctctggagctagtcctgccctttgtccatctccgtgtctgtctcagctgctgccctctgggccccgcatcacttccctcycgtgattagtttccttgcctgtctttccccatcggcctgagaagcccttgaggacagcagttctgttgtatttgcctcagtggccccatgctcggcacagtgtggggctctgaaaagggggacgagccccagsccgtgggactgcagggcctttcccaaggctgcccagccccgctccttcccctgccaggccggggtaggacattcttcctgttactgctctaagagctcatgggagctcttccgtgctccttgcccacggactgagtgtggacagttggagacagggcacggaattttcatggggggtgatgtggaattggggatacagggtctgatggaaccctgtgagactggatagcaaatgcagtctgaggaagccagaccctcgtgggagccagcagtggactgatggcttcagtgggtgattcagrgagggtaagggctggcccctccatggatgtggttttggggatgccatgtgtctacagggttatcctcatctgcacaagaagcagtgtggtcagtggaaaaatggcctccaaaagataggcatgtcctcatctctggatcgtgtgcatgttacctgatagtgcaaaaaaggttggggtggatctttgcagatgtgatcaaggaattcaggatgggtggattatcccggattacatgggtgggctatgtattagtccattctctcactgctattagaaaaaaaaaatgataggttttcttgctatcatgagaacagtaccaaaagggaagatctacccgcaggatcctattacctcccaccaggccccacctccagcattagggattacaaactcaacatgagatttgagcggggacacagatccaaaccatcccaggctctaaacaccatcatcacatgcatttttctaagagggagatgggggattttacccatggaagagtaggaggccacgattggagtgatgtggttacaaaccaaggaattccagtggccccgaaaagcttgagaaaacagggaacagaatctccgccagaaaaagtacagccccgccgacaccttgactcggcccggtggttctgatttcagacttctggcctccagaactgtaagagaatacatttctgttgttttaagcccccaagtttgtggtaatttgttatagcaggaactgatgcaagagtatttctcagatctggttatgtgttcccagataaactcagggaagtgttggctaggaccctgagcttcagaagagaaccactggcataccagctcttccccaggggaccgtatttacgctcttgacagagctgacctctttcaaagcacagatcctgagaaagccacaccttgggccacaccctgtccagacctccccagtgcccctgtctttgaaaaaaccaaacaagcaagcagtctctggagcagtcacagccattgctcaggtccccgtcttctcatcctgggttacacatcaacccccttctgatttcaatgtccccagtatctccagaatcttctctttagggtgctaaagtagtatttctaaatcacagctctgtttaaaagtctctattgccgtgcaagattggtatacaaaaatcaattgtgtttatatacaccagcagtgaacaatccaaacatgatattaagaaacttccatctacaatagcagcagaaaagaataaaatactaaagagtacatttaacataaaaagagcatagcatgtacactgaaaattacaaaacattgttaaaagaaattaaagacattttaaaaaacccaaataaatagacaccctgtgttcatggattggaagacttaattttgttaagatggcaacactcctcaaattgatccacagattcaacacaatctctgtcaaaatcccagctggcttcttggtagaaagtgacaagctgctgatcctaaaattcatatggaaattcaaggaactcagaatagcaaaaataatcttgaaaaagaagaacgaagttggacaactcacacttcccaatttcaaaagttactacaaagctgcaataatcaagacaatgtggtgctggcataaggatggacgtacagatcaacagactgaaatcgagtgtctagaaaccaacccttgcatttacggccaagcgattttcaacaaggctgccaaacagttcaatagagaaagaatcagattttcaacaaatggtgcttgaataaccagagatccttatgcaaaagaatgaagttgatcaaatatctaactatgacagctaaaactataaaactcttaggagaaaacacagaattcttccatggcctcaatttggcaatggtttcctaggtagggcacaagaagtgcaagcagaaaataaataaataaatatagccaggtgctgtggctcatggctgtaatcccagcactgtgggaggtttaggtaggccaatcacctgaggtcaggagtttgagatcagcctggccaacatggtgaaaccctgtctctactaaaaagtcaaaaattcccagggcatgatggcgggtgcctgtaatcccagctctttgggaggctgaggcaggagaattgcttgaacccgggaggcggaagtcgcagtgagccaagatcacgccactgcactccagcctgggcgacagaccaagactccatctcaaaaaaataaataaattggacttcatcaaaattaaaaacatgtgtgtttctaagaacaccaccaagaaagtgaaaagacaacacaccggatggattaaaatatttgcaaaccatatatctgataagggactggtatccagaatatacgaagacctctttcgactcaacagtaaaaaagacaaataacccaatttaaaaacgggcaaggacttgaatagaaattttttcaaagagcaatataaatggccaagcagccacgaaaagatgccaagcattattcattagtcatttgggaaatgcaaatcaaaaccacaatgagatactgcttttcaccagctaggatggctagaatcaaaaagacggatagtaacaagtgttgctgaggatgtggagaaactggaaccctcccactgctggtgggaatgtaatagtgcagccactttggaagacagtctagcagttcctcacaaagttaaacataaagttaccgtatgacccagaacttctacttctggatatatacccaggagaatatatgttcacacaaaaacttgtacacaaaccttcatagcaccgttgttcataataaccaaagagtgaaaataacacaaatgctcatcagctgctgaatggataaacaaaatgtggcatagccataacatggaatattattcagctctgaaaaggaatgaagtgctgacacatgctataacatggatgaaccatgaaaacattatgctaagtgaaaaacgccaggcacagaaggccacatagtgtatgattccatttatttgaaatgtccagaattgacaaattcgtagacacatgcattcaaggagtggttgctggctggtggggatggggaggcgtctgatgcatcattggatcagggtctctgggcgggaaccaactacctaccaggtaaagtgaggtcagctcctccccctttgctggtgagcccagtatcactgagtgacctgcctaggccctcagatagggcagagcagggctctgcttaaatggactgagttatatgaatatgtttgtgaacagcgccgaagggaagcctcttaagcaaaatcacctcctcctcctcatccttctcctcctcctcctcctcttcctcctcctcttcctcctccttctcctcttcctcctccctcctcctcttcctcctcctcttcctcctccttctcctcttcctcctcctcttcttcctcttcctcctccttctcctcttcctcctcctcttcctcctcctcatcctcctcttcctccaccaaacccatttcatgctcttaccaagggtgcgagattcttaaagacagcaatttgagtttggccgccttctcctgtgttgtgtttgttcagtgaacgttcaccgtgggctaatgaccctgtgcattcacgcactgggatccagttccctccgtgtgccattttgaggatccatctccaggtggtaattggcttgtgcgcagctgattttctgtcccagaggtccrcctcccacccctcacgctcactggcccaggagagcatcatgacatcagattgtttcccaacactttaattgcgtactctgggtttcaggttagtttgcggattatctttcagataattgaaaaggatgctttcagatgccaaatgatgactgtaagtactcatcaaagtgtccgcttactgatgacttcacttctccccgccgcccccaccccctccctgcccagctttgattacagatcctatcagctgcattgcctagcaattaagccatgtgtggctcaggggaaaagctgtgtttgaatcacacaaacacaggctgcaagtggtggaagggtccctggggatcatctggtccgactcatctcacaggcagtgttctgagatctctgtgtccaggagaagtgtggcatcttcccgaaggscccatggggaattaactgcaaacacgggatggctgcctggctctcctgacttctcggcagtgcgcttcctctcaccgtaattgtctgataaatggggttgtgggcacratgcaaaccttgcagagaagaacaggctctgtgctggagccaggacacctgggcccccgggccttccccagcagggcccatgggggacctgggctggcagtgaaatcagtttttgtgcctgcccgttgtctttggtctcccttcaagaccctgataagttattttttcttggggagttgagaggcctaagcaagctaagggatgagaaataactgggacgtagtaagtgcttaatgaatgctggttcttgtctttttattccctgcgttctcctcaccccaggtttaggaaaggagctggatctgtgttggtccatggacctgatgtcaggtgactcaggatggcacagcctctgccacgtgaatggccttaaaagtccaatgacttctgggccatccactgctacttgtgcagaatggtaggcgactcccacaggctggcttgtatggttggattgctgtctttactgagcactcgtcctcgccagcccctctgaggatggcagggaccagcatagcctcaggcaccaagaactcccaggcagaagcactgggtccccagcagtgctcctggagagggagtgccaggaacgggagccaagaggatggccaggtcatggccctgccctgggggagcacacagttgctgggcagggttcacacctggctttccctaagtgtgtccctgaagtgggcccagcgtctgttgtggaaatgccagcacctcagctcaactgaggctcccaggagtccctgyctaacgaaaccgctcccctttggtaagcgagaatgcctccatttggccttggagtcccctttttctggcacacctgtctatggacagcgacatctggaaacggcctgagatggggtggtaatttgagatgtctgcaggcgagtacctgaggttcagctagaggacaagtgcgggcagcttctgaggaggagaggaggccctgtttgaccccacggcacatcgttaggggaccaccaaggtcacagagccaggcaggattcttggtgctgggaccacagtgggagccaggcctctgctctcaggagctcctggggcaggtggcacggggcaggcgtgagccgcatgggtggggtctgcccagcgacgctcagagccatgaagaacagcagagcagggtgggggacaggagtagtggggcaggaagggggtcagcaggggaggcctctcccaagagacctgcaggggtgacggggaggagcctgtggctgaagccccaagcatgcagaggccgtgtcgggaggtgctgtggccagtggggtggagctgggagctcaagtcgtagggatgatgggagaggaggacatgtggccctgcagtcctgggagagactttccattttatttcaaatatcactccctccttcattccgactcaggttagtgagtgaactgccctttttccactgtctggagctgctcaagtyggatgtggatctgggwctccatgtggatctgggctgacttgtgtaccacccacggtgtaccgtaccacctctctaaacagccacagcctctgamcccaggccacccctagcgacttcagccctcagggaagctgtgtctccttcagctgaggctcctgagctctgcactagggtgcagagatgactaagtctctatccagtcttcggcactctcagtccatggtggcacaaacaggtgactgtcagcaacagtccaggccccaggtcagcgcaaggcacagtgggctcccaggggccaggcggcaggtggcgggcaggagcctgtgaaggctggagaaggtttccttgaagaaatgctgctggggtggagccctgtgggctgaacaggagtcccctgatgagtgacagacctgcagtctcctgcaaagactggcatcaagtagygcagggcacacccatgagctggagtgggcacagccggggtgggcactttgcgtggatggaacacacagggaaaggagtctggttgggacagaggggtcctggaagagaaggctgcagaggaggggacagccgagtcccctggtttagtcctgacagcgactccaagaagaaatgtaggctccgagagatgaagcaccttgcccagtgcatgcagcttagtaagtggcagaggctggatgtgagcacagcattcctccctggcagctgggccgccttggacccctggctgggtgcgcatctcagtgcaacgccagacccagcggatcactctgtccaggtggcaagctagtcctgtgggccccaagatgccaggagctgctctgtggaactgtccctgccacctgccagctccgtcccttgacagaagatggcccgtggagaccctgtattcctcttgcttccctgtgaatgatgttttttycaactgctgttggttctcgtccctgcacgagtaggatgtaaagtctgactagatagcagcactattgctccaggtggggtgcaggctgagcccatccmtcgccggccgtgggtccagctctgcaatgcactgtgggggtcccaggcctgcagccccggagctcctgcttccttccttgtgcagtgcagacacccaggactggtcttcaggtgctgggttggagttttcagacacagggtagcagggcttctaggctggtggccctggctccccagcctggccctggcctaccccatcagccccacatccaggcgtctgccaccaagttgctgcttcgttcagtgggaacagtggggcatttgtctcccaagtgcatctgtgtatgtaagcgccccacagcacaccatgccaggcccacacgcagccaggcccacgcacacacgcgcacacgcgtgtggcacacacagactgctctttggcctctgctcacactgttctctctgcctctaggcctttcctgcctgctgccatctggataattctttccaccctcagcatgccacttaggcatgtcctccagaagctctcctgagatggagaggtccccctactcccctggccaccccccatctcaggacctcaagggagactaaacctgctgtctgagtgtctgtctccccagcagacaggaatgggggactgtgctctctacccctagagcctctgtaccagcacaggcctggagtctagcacagggcaaatgttgacggggacagaaaaaaagaataggyggcaggcggcgggcaagagcctgttttatttgggggaaatcagggagggctccctgtgggaggtgacgtgtgctgaaagctggggtatggacaagtagctcctgggagcctgaccacgcagtgatggtggaatccttgtcgaggggctccttccacacccccaccccacgcgcgctgcagaggggtgatggcagtgctgagtcctgggttgcggagccgcatcccatgcagagtgacctgtgcactgtccctgtccctttgtgttaggcaactggggttctaatgtgccagcaaccacccagctgggcgaggacagagccagggctgcccctgagctgggcttgtgaccaccatgctgccctgccttgactgtagcgccaatccatacaacatccaggctagaaggggcaccagagcccagcgcctgggcttacgggcaaagcagtgcaggggagacgggcgcctgtgtgagtgtgtgtgtgtgtctgtgcaggggagatgggcgcctgtgtgagtgagtgcaggagagacgagtgcctgtgtgagtgtgtgtgtgagtctgtgggcaggggagatgggtgcctgtgtgagtctgtgcacgggagacgggtacccgtgagtctgtgcacaggagacacacctgtgtgagtgtgtgtgtgagtctgtgcagtggagacgggtacctgtgtgagtgtgtgcaggggagatgagcgcctgtgtgagtgtgagygtgtgtgtgtctgtgcaggggagacgggcgcctgtgtgagagtctgtgcaggggagacgggcgcctgtgtgtgtgagtctgcgtgttagagtgcgagtgtgtctgggctgccacagttgcccgaagctggccagctggcagcatgacagggaccgtccctgaggatctgcgaccctgttctcaccagcgtggcttgtgcactcccctgggagccccgtgccttccttcattgctgtcaaggaatacctgaggctgggtggcttataaagaaaggagggtgaattggctcgtggttctgcaggctgtccaggaagcatggcagtatcttcttggcttctggggaggcctcagggagctttgactcatggcagaaggtagagcgggcacaatagagaaggaggaggaagttgccacactctcctaaacaatcagacctctcgagaaatcactcactatcgcaaggacagcaccaagggcactggtgctaaccatttatgagaaatccacccctacatcgagtcaccttacaccaggccccacctccaatgctggggattggatttcaccatgagatttggtggagacaaacatccaaccataaccactctccacctggacagacggacatttggggcccatcatcctgtgccgtggggctgtcctgtgcattgtcagacgtgcagcggcgtccatgctctctacccactgaatgccggtagcacccactccaccagatgtgacaaccagcaatgtctccaggctccgccaagtgtctccccaggggcaggaccacccctggtgagaaccccaaccccttggattgcagtcagtgcccrgagcctgcctctcagggcagagatggaggcctgccttcccctgtgagcamcggctstggtctccgaaccccataccccacgcttgtccgtgcccctaccatggcacctcttgctgaagaacaaagcgctccccggtctctttcattctcagcgcacagtttctgaaactctaggtggtgggctcggaacttctgaatgtgattagtggagctgagctctctgcgtcagcggcagcagagcacttgagttcctgttcaaacagggctaaacttatctttcggaaaataggctgtttttgaggcctaatcataggcattaaagccattaattagtaataagattcaatttcccagtgtccttgcccgtgtgtgtgtcctgatgtagagattgtgctgcgagcatgttccgcagatgcatggacagacacctgctgttcccgctcagcagcgacgcggcgtcatgttccccagcccggccaggccccaaataaccccattactgagaaggatgatccacaccaaatgtccttcccctgggtcgggagggacgcaccgggaygggagcccgagaaggctgtgggtagggcccgccttcatcagagcaccgccttcaaatgctgcactgaggccggcctacagaagggatgtaccagtcctggagttgaggtctctgctcagtaagaccgccatttggtcctccctcgatcacatgattctctcggttttcctaaccacctccctcctacctggccttcccctgggacccacacaggcttccggcgtcacaggtgtacttacccttcatcccagcacagggcactcgggagcaaagagccaggaacatgtggacggccggaagagggaggtctgggtgtccccccagcactgttgaccacacaggttgggtgccaggttacatgagcagatgcccaaaaatgctgggcccataggaagctctcagagaggcactcgcccctccctgtgttaaagtgtggctcaggaggtctgagatgtagatatcctggggggggatgaggccacatctaaacaggcatgtgaagctgggtcaggcgatgctgctgtgataaccacacacagccacacaccgaggggcagcgtgcacacccttcgaccacatccctgtggctcccagcaggcctgaggagtgggcagggaagaccatggaatcctcagtttccatctcacaacccaaccacgcagctcccctcaaggcagcaccagagcttggtgcgggcccgggaccctagacacctggctgtgtgcttccgaggcaggcgtgggtctcccgcccgcygggcaggccgtgggctgcagcagatgagtgtgagccagtgccaaagtgaatggagcactttcccacacaagagctccagactgacatttctggtgcattttggataatttatgatgtttagatgagcgtgcatgctgattttagctgtaccgtgttcttagcctcccataatttgtttgcatcttcatggatagaatgtttctcagaaagaattcagtgttttgtttttggctttttcaaaacaaaatgctccccacgtgggcttttcttttaaaactttggtctgacctgcagaaggttggcaacagggcccctgtgctggccctcaatatcttgttttgtttctgaaagccccccaccacacctcttgtgaaggcagctggcccagggtgttgtgtgatttgtgggtcacagtgagttgactttgtgtcaagggagggctgtggaccttgtgctcagcctgcgcccacgaaggcaggcgtgatggtaactcgactctgcgtggccgtcaggagggaggtgggagaacaaagcgtgtgcccagggccagcatctcacacgggggcgggggtgggtaccgttcttcatgggctgtcgtggagtggccacggacctccatgccagggtctgctggcactgcctgagcagctgccatgccccaggaccatgggccgcccgatggctggctgtgcctggagggtgctggcaccaggaagggccaggctgggatcctccgcagctcccgctctccctccccagcagccgccatccttgccctgcctgatagttaacagttttgacaggccaggctatttttagaaacctgttcccactccttttccctgtgggaaaaaggaaagcaagttaaattttaaaattaatccaccacccttcccctcctccaacatacactgacacacacattagccacccaggacctgaagctcagcagagtcctgggccacaggaggggctgccctgccaggcgccaagaggggcatgtgggtttttgatctgggaggcggtcctgtgggacttagggtgttgtcatcattgtccccagcagaaaccagtgcagtggggaagtggcttctgggctgaagcctggttggaattcgggttcctagttctgagtccatgccctttgtagtaccatggttggcagtggtggaggacgccacagggtcagatgcccgcggtggggttcctagtctcacttcccacaaccccgtgccttgcaaagctctttcatgcccccacccgatttggtcctgacagtagccctggaagacaggcccaatcaagattttcacccaggacacatctggaggcctggcgatgaaatcaaaattgctcaaagccacacccctgggagccgtcttcctgtggggtctggtgagcacccagtggtctctagacagaaacacacccaggtgctcattggcaggtagcaccgaccccggacagggacgttgaaaaacagtggtgttagcttgaacaataaatttaaagtgaaagttaatagtcgccagtttttaactattaacctaataaccatgtagaaagaaattctgtgtatatcagcgtccttagcttggttcatttacatttaagctttcggtgaggcctttttccatattaggctttgaaagcgtctgcagggtcggggcagaagggaggacagagccaggcaggcccggttcccaccttcccttggctctgcccctgcccggcagggagattttagggaaggtgtcatctctttgaaccccaggtcctcatccttaaagggtggcgacagcaacccctgctcccaaggctgcagtgaggatgaaagagtcatgactgtacagtgggtccagccacatctgccccccacccctccccgctcaggctacaagagtcataaagcagctcagttgcctctgaacgagatttttcctcctcaaattcaaatcaagcagtgactggccattcccgcaggctgtgactgtgctgggtggccacactcactcacgcccgtcagctcgctgtgttttcataagaaaggcaaggacttactgggtgctggtagtaatagaagtgattgttggtgtgccatgactgactcagtctctgaatttttttaacagctttgttgtagtcttactgacacacaataaatgaaacatatttaacatgtatcatttggtgtgttctgaagcatacacacccgtgaaaccgtcaccaccaccaagattggacggagtgcgttcatctctcccaagctccctcctgctcctttctgaccctccctgacaccttcccctccgatcactgacccgttttctgtcactgtaggtgaggttgcactttctagagttttaaataaatggattcccacactgtttttttaactggctttgttcatgcagtgtgattcaggtatgtttttgcatgtcccggtagctcttttgttctgctgagtagtattccactgtatgcatataccataacagttctgatccactcacttgatagacacttggcttgcttccagtttgtggcttattacaaatgtaaagcagctaagaccatttgtgtaaaagactttgtgtggacgtgtgctttcatttatttggagtaactgcctaggagtagaattgctaggtcaggtggtagttgtatttttttttttttaagaagcttccaaactgttctacaaagtggttgtgccattttacatgcccactggcagtgcacgagagttccagttcctccgcctccccaccgcacttgatgtggtcggtcattttcaccctaggccctctaacggattagtgaattcgcgtctcgctgtggttttgatttgcatctccctactgactcacggtgttaagtaccttatatgcttacctgccatctatgttgtcttccttaggagggcgtctatcaactcttttgcctattattttactgggtttatttgtttgtttgtttgagacagagtctcgctctgtcacccaggctggagtgcggtggcgcgatcttggctcactgcaacctctgcctcccaggttcaagtgattctcccacctcagcctccagagtagctggaattacaggcgcccgccaccacacccagctaattttttgtatttttaatagagacggggtttcaccatgttggccaggctggtctcgaactcctgacctcaggtgatccgctgcctcagcctcygaaagtgctgggattacaggtgtgaaccactgcacctggccttgagttattttcttattagtaacatttgagagtgcttcatatattgtgtatataagtccttcataaaattgatgatttgcaagtacatattccctatctgtaacttgtcttttcattctcttaatagtgtcttttgagatcaggaatgtttaagtctagttgatcaaggttttcctttttttttcttctttttttttagatggagtcttgctctgttgcccaggctggagtgcagtggtataatctcagctcactgcaacctccacctcacgggttcaagcgattcatgtgcctcagcctcccgagtagctggtactgcaggtgcccgccaccacacccagctaattgtgtgtgtgtgtgtgtgtgtgtgtgtgtgtgtgtgtgtktttagtagagatgaggtttcaccatgttggccaggctagtcttgaactcctggcctcacrcgatccactcgcttcagccacccaaagtgctgggattacaggtgtgagccaccctgccaggccaaggttttcttttaaggcatgtgcttttggtgtcgtatctaagaaatcttggcctaactcaaaatcacaaagagtttctcccacatgttctttcaggagttttatagtattagattctacatttgggcctctgattcattttgagttaattttttacagaatacaacgtagggactgaagttcattttagcgagtgtgtattcagttgttccagcctcatttgttgaaaagacagtcttttcttgactgaattgcctttgcatatttgtcaaacatcatttgtccgtatatgtgcagatctatttctggactatttattctgttttaattatctgcttgtctgtcttgaaactaataccacgcagtcttaattattgctgttgtgcgaaaactcctaaagtcaggtaatattttggccattctaggtcttttgtatttccatatgaatcttctcatcagtttgccacttyctattttttttaaggcctgctggaattttaattggaatgatgttgaatacgtagatcaatctggggagaactgacatctttgtattgagttttcctaaccaggatcaaggtatatctcttcatttttttgagccgtctataatttctgtaaatattttgtggatttccacataccagtctcacacgccttctgtcagattcagccctaagtatttcatattctttatgctattgtaaatagtattttttaagttttgatttccaattgcttattgttactatatggaaatgcagttgatttatatatatatatatatatatatatatatatatatatgtcagtcttttatttatttatttatttatttatttgacatggagtctctctccgttgcccaggctggagtgcaatggcgcgatctctgctcactgcaacctcagcctcctgggttcaggccattctgctgcctcagccccctgagtggccgggattacaggtgcccgccaccatacccagctgatttttgaatttttagtagagatggggtttcaccatgttggccaggctggtctcgaactcctgacctgaggtgatccacctgccttggcctcccaaagttctgggattataggcgtgagccactgcgctgggcctatatgttgatcttatagcctaaaaccttactaagcctacttattctagtggctgtttttaaagattccactggatttcctacaaagtcaatcatgtcatctgaggataaagacaattttaattcttttccaaactaatgcattttattttttctttgcctagtacttccagtgcagtgttgaatagaaatgctgagaataagaaattttctgatctgaaggggaaagcatggggtcttttacccttaagtatgatgtctgtggattttcagagatggccttgatcaagtggaggcacctctctcctgtcctggcttgctgagagtttttacattttcaatcaggaatgaatgttgtgtagtgtcacacactttttctgcaaccattaagatgatcatatggtttctctttttttatttgttaatatggtgaattacgttgattgattttcaaatgctaaaccaaccttgcattcctaagatgatcttcagttggtaatgatattatgttttcatatatgttggattcagtatcctaaaaaaccttgtaagaatgttttaatctatgtttataagggatatttgtagttcttttgtaacattcctgtcttggtttggcatcaggataatgctggactcagaagatgagttggaaaatattccctctgattttctggaagagtttgtgtctttcttcaatgtttggtagaatctgctagtaaaataatcgggacctgaagtttctttgtggatgttgactatgaattcaacttcttttgtaggyatattaaagaatattctgattagctgtttcttctttagtgaactttggtagtatgtgtctttcaatgaaattatccattttatctatgttgtcaaatgaaatgaagcttttcagaatatttccttattttcttttcaatatttagagaacctacagtgatgtcatctcttttatcgtgatattgataatttctgtcttccttcctttcctgatcagtttggctagagatttatagattctgttgagcttctctaagaaccagcttttggtttcattgattttttttctattgattttctgtttgttatttcattgatttccattttgctgttcatccttttcttttctttctttgcatttagtttgttcttctattcctgatttataaagtggaagacgaaatcataaatttgagtttttttctaataggtgatttgtgctatgaatttccttgtaagcattgctttagtgatggctcgcagattttgatatgttatactttcatttttattcagtttgaaataattcttaatttctcacttaatttcttctttgacctgagggttatttggaagtgtgttgttcagtttctaaagatttgggaattttccatgtatttttctgttagtgattgctaatttaatttcattgttgtcagggaacatccattgtatgacttgaatccttttaaacttctagtcaagaatatggtctatattgataaatactcaatgttcacttgatataatttatattctactattttcaagcaggatgttctgtaaatattgattagaacaagttgtctgacaatgtcatttcagtcttttatgccctggctgattttctatttgctggtatcgatcattgaaacaagatattcagttgcccacctaccatagcagatttgtctgttaccaatcagctccattagattttacttaacgaattttggagctctgttattacgtatgtaatttaggattcttatgtattttttgaggaattgacccctttatacttatgaaatggcatttataactttataatatcaattgctatkatgttaatatagccaatataaccttctttacatttgtattaacatgatatacctttttccccccttttctgggagcggggcccctgtggccaggctagagtgcagtggcacgatctctgctcactgcaacctccacttcctgggttcaactgattctcctactttagcctcctgaatagctgggactacaggtgcatgccaccacgcctggctaatttttatatttttagtagagtcagggtttcaccatgttggccaggctagtctcaaactcctgacctcaagtgatctgcctgcctcggcctcccaaagtactgggatttcaggcatgagccaccacacctggcccctttttccatactttaaattttaacctatttatttttttacacttaaagtacattttttgtaagtgcttgcttttctttatcctgaaaatctttgccttttattgggtgcgtctgcatttagttcatttacatttaatgtgattattaatatacttaggtttaagtatatcatcttctgtttgttttctgccttccccaactgttctttgttctatttttctcttttcctgacttgttttggattcactgagtacttttatgattccattatttttatacactatttctagagcagttttaggttcacagcaaaatcgagtagaaagtacagagttcccatatacccctccctcccaccgcacacacaggcacacacacaaacacacacagcctttcaaactctcaacatcccacactagagtggtacatttgttataatcaatgaacctacattaacacatcaatatcaaccgaagttcagttttcactaaggttcactcttggcattgtacattctatgcgtttgaataaatgtctaatgacatgtatccactattagagtatcatacagaataggtgtattgccctaaatgtcctctattctctgcctgtttatccttctttgtaccctaacccctattgtttggccttttctagaatgtcatatagttggaattatacagtgtgtagctttttcatattggcttcatttacgtagtaatacacatttatgtttccttcatattttttcatggcttgatagctcatttctttttggtgctactatttcattgtctataagtacagtttatccattcacctactgaaggttgcttggttgctaccaagttttggcaattatgaataaaacttctctaaacatccacatgtaggtttttgtgtagacataaattttcaactcatttgggtarataccgagaagtgtgactgctagattatactagtaagagtatttcagttttgtcataaatcaacaaactctcttccaaagtggctgtaccattttgctttcccatcagcaatgactgagttcctgttgctgcacagccttgtcagcatttggtattgtcagtgttttagattctaataagcatatagtggtatctcatcattattttaatttacaatttcttattgacgtatgatgtttagcatctttttatatgtttatttgcctttttttccctcttttttgttgaaatgtctgttcacctctttggcccatttttaaatcagattgtttgttttcttatcattgggattttggagttcttcgtatattttggataacagtcttttgccaaataaatctttgaatatatttgctacggcttgtcttctcattctcttggtggtgtctttaacagagcagaagctttaaattgtaatgaagtccagcttaccagttctttctttcactgattctacctttggtgttgtatgtaaaatggcattgccatacccaaggttatctagatttcctcctgtgttatcttctaggagctttatagttttgcattttgcatttagktctgcaatccattttgagctaattctttgtgaagggcataaagtctatgtctagattaatttctttgtatgtggatgtccagttgttccagcaccatttgtttaaaaggctatattttctctgttttagtgcctttcttcctttgtcagagtttatgatacagacatgagtgtatttctgaactctctgttctgttcccgtgatctgtttgtttctgttctggtccattgatctatttctttcaccaataccacattgtcttcattactgtagctttatagcaaggcttaacatagggtagtgtcagtgctatgactttgttcttctccttcaatattgtgttagttattctggatcttttacctctccatataaactttagaatcagtttttcaatgtccacggttggattatggttggtattgcattaaatctatagataatcaacttaagaagaactgacatcttgacaatattgagtctttctacccatgaacatagaatagttcttcatttatttagttcttatttgattttctctcatcagagttttgtagttttcctcgtgtagctcttgtacatgttttgttagatttatagcacagtatttcattttggggatgctagtgatattatgtttttactttcaaatttgacttgktcattgctggtatataggaaagcgattgacttttgtatattaaccttgtgtcctgcatccttctaattattgctcttcactccaggagggttttttttgtcaattcttttagattttctaatagacaaccatgtcatctatgaacaaagatagttgatctccttcattggcttattagctataactcttttattatcttagtggttgcatttgaggtttagaatatacatctttgacttatagtctgtcatgaagtgacattatacatcttcgtgtatactgtaagaaccttattataatgtagttgcaatcctccctatgggctttaatactattgtcgtcatacgttttatttatacatacattataagccccacaggactttattattattgtaaagagatttcaagaagaaaatcttatgtatttactcatgtagttaccatttcctgtgccttcatttctttttattaatccatgtttccatatggtgctattttctttatgcttaaaagactttgtttaaacagttctgataatgcgagtctgctgctgctgaatgccttctgcttttgtatttctgaaaaattctttgtttcaccttagtttttgaaagagttggttttttgctgggttcagaattctaggttaacagttctctgccctgcccaccccgcacttaaagatgttgtcccctgtcacttctcttacattgtttgtgatatgaaattggctgtcattcttatcttcattcctctgtatacaacatgtctctcttttctgtctaattttgatattcttgtcactggttttgagcagtacttattaggttggtgcaaaagtagttgcagtttttgccattacttttaatggcaaattaaaagtaatggcaaaaacattttacaatatagtgtgccttggtgtagtttacattatgtgtcttgtgctttggatttgtgtagcttcttggatctttaagtttatagtttttatggatttggggaaaattttgaccattattttttaaattatttttcctgtctccctccactctcttctccttcagaggtctccagttacagctgtgttcagcaacttgaaattgtctcagagcttaccagtgttttcttttaataaaatttttttgtctgtgtgtttcattttggatagtttgtatagctgtgtcttcaaattcactatttttaattctgcaaggtctaatctgttaactccatcctttttgtttttatctgagatgttatatatttcattgacataagttcagtctggatcatttttgtatcttctatgtcattaaatttttgaacaaatagaatacagttatgataactgttttaatgtcctcactgctaattctaacatttatgtcagttctgggcctgttttgattggttgtttttactcctcattgtgagtcatatttttctgtttctttgcatgcctggtaatctttcattgggtgccagacattataaattttgtcttgttgggtgctggctataaatatctttgagatgctaagatacagttaaattactcagaaacagttatatccttttgggttttgcttttaagattttttttaggcaggaacagagcagtgtttagtctaggactaattattccccactactaatgcaagagctaaatgtgctacctaatgccttaygaattctgatgggtgtgtgtgtgtgtgtttgactgatgggaacaggcactattcctcgctctgtgtgagcatcakgcacattttcctgtaacttctcaagtgtttcttgcccttagccttgggtactttcagtgtcttgctgaatccgtaagggaaccccccaccgatctctataggtttttttttctctctctctcccttccttccccgtcagctgcagctctcttgtctcctttccagtattctgtcctgtaaactctagctgcattcaccttcctagactctcagttccagctcctcaactcacagtctttaggggtgcccctgaggtccccactccctgtgctgtcacaatgagctgggatgattctagggctcacttcatttgtgtcttttctctctctgttctttgttccctaatggccagtgtcttggaaaccattgtttcatgtattttgtctgttttattgttttatgttgtttgttccaggcggagggtaaatctatccttgttactccgtcttgactggaagcagaagcctcattcattctgaatgttttgataagattttgtttcaccaacatacaygttatgtaagaagtctcatggccaggatgaatacacgatctagaattctttattgtcaaggaggaaatctttccttcattcatttgctcattcaggaaatgttgacctcgcctctacaaggcctcgcctctacaatgccctacaaagcattaggttgcacatttagcccttgcattaggagataacacagtgagtaaacaggcacgctctgttccctctggggcttatttggagccagacctaaggagttttaacaactctcatgggtaaactttagaaaaatgaagctctctatccttcattcagcaaacatttactaagcacccagcatctgtcagaccctgctcagccctgtccctaaggagcatgtggtctaaccaaggtaggtggtgcagaagtacttcctgctaaatgctgaaatggaaatccataggaaaggggactgtgtttaattttgaccatgcggtagagaaaacacttcctggagaaggtggcagttgaactgactcttgaaagatgatcagagcaggaggccatggaaggtgaaggaccttggtggtgtgtgtgaagagtggaagggcctagtgtggctggaacctcagtgtttggggctagttcaagaatgactctgcaggggttacaggcaagctgggaactggcacacaggagctacagagggtgcaaggcacagcccccaygtcatcaattggtggtttaggcgaaagtaaccatgttgtcattttatagtaagtcacaggcgcaatggactttggcttttattgcctcagaatcatttttgttttccctgaggaacttcttatgcagtcgtttcccaggtaagatttatcattccttttgttagctggggagcctgtcctacaccaagctcttgaagccagcacacatgtgcctttctgtgtgtgtgtgcgcacacacacacagacacacacgtgcacacaggcagatgacgggaccaaagctccagaggctccgagccatgtggcggagtccaggttcagaacacagctgcgaatgaggcctgggtggtcagctgtgccttcctaattaggcagtcgctattgcgatgaagctcccgtttgccgaatgggttgagatgcatcacctgtgtaaacaagcgacgctaacccctgggtgatgagcatgtgtcttcaccctggtgccaccccatccttcccaattcgttgtgacctctctttgggtcacggaggacaaaccgatcaatactatgttgtgacgagtgagatgacstcacatagcagctgacgtcccctgtttgggcctgttggctttgcctggagtggctgagttcatctgtgcgctgagtcatctgactgggaggctgcagcctggcgtccctgtgcaggaggcctgcaggatggaaggaaccctgtcggggagcccagagactgaggctgggtcccaagcccccatgactagcacgtggtcctggcagagtccagcctygtcctcttgtcctcaggaaggaggttggtcagggttggtggctattgctcaagacctctgaargtgcctggtgagaggaggaagacagctcagagccagaagcaacagaagctgggaggctggcccaggggctgccttgcttgtcagatgcatggcccagagacactctctggagtggacctgccttgggtgtgcccgaaggcggagttgactctcatctgtggaaatggacgagggcatttccaggcacacggcactttgaggcccaggtactgggcaggaaggacagatggccacagagagccaagcacttcatcttgaccatggccaggcaggcctccgaaggctccagaatttgggcttcaccttgtagggcaacacgaaaagagggaagtggccagctagggggatgtcggggtggccccagcctgccagactcacagcctgggctctgggctcacacctggtgaggccaggccatatctatgggggaaaccaggctggcctcagatgtcctcgggactcagccctgggctgccgccgtgcccccagtyagcccacacccttcccctggagatgtggcctcggccccttgacttcccagcgccccagaaaagcggtcagtgatttctagctgagaacaacacgctctgggcccagcccaggccaaaggccttttcttaagcatttctgggaaaagcaaatttatcagcctgtgcaaagggaaaatgtttacaggaatggaagacacaaagggaatgaataatcagggctcggctcggtctccagagaccaatattctcatctagtttgcttttattagagaagcaagcaaagagaactcaccctgtgactgggagtcagcccctcagagcttccggactggcaggcgggaaggggctgaggtcctcccacctgttgtggacatggccctgtgagcccctgggtggatgtgagtctgtgcagaggcccagggttccccagagtcccgcccagtcagggctaggtgccccacagacccggacagccccaaggatgcttcctgggcccactctggcccttagacattcttggggaccagagcccctttggaccccttagtggcagcctgtgccccactatctggttaagcattgcatgaggcgacatgataccatccgggcgttctgctcaggttcttgttcctgggacttgaagactttgctgttgatgctgtgtgttctctgtccccctccgggcactcccaaaagtgtgtgacatcgacagggattagggctgggccagaagagcaaggttggttcctagctctgccccttacctgtccactggagagattctgctcccttgccaagtcttcctatcctcatcaggaaatgacaatttcaataattaatgataataagactcagctcagccttgccaggagaagccctcgttcctccgggaaatgttgtsgagcasctgctcctggccatgtgctgcttctggtcctggggaggccgaggaaacatcgcactgtgctaaggcaggtgagccagggagggaggacgcggcacagctgctgtcgctggcggtcagcgggaagggggtctctccaggcagtgatgcttgtgagtggacagtgaaggtcatggggatgagtttgtgttgggggaggagataaagctgccccagggtgtgcacacatgcactcacacacagacacacacttgcacgcacccgtgcagacacacgcacacccagcccttcctgaggctggccagcccaccgcgcccccagtcccagcctccatcctccggtttctcctgagccccttccagagccttccacctgtccctactcggtgtcaccacccacagtctcttctcacagggcagcccgagtggcctgtgatccrtaaatccatctatgaccctctgctcagcccatgccgacttctgtctcactcagggcaggcgtgggagcttcgtggggcctcctccttcttgccgccccagtggccttcgcccgcgtccatgtggcctggggagcttgtctctctcccactgcgctctcagcagcctgcagctccagccttccccaggctcctggtccagctcagcaccgtgctcctctctcccctcgcagccggcctggctttccttcgtagggtcgaccgctgtcccacgtgggagatgatgtttggatgtyttctgacttctccactgaacatgcgtgccgtgaaaacaggcactttgtcttcctatgttatttatttttagacattttaattttctttctagaagggtgcctggcacataggaagagctgaattgagagtcgctggatgaatgaatgcatggttgattggttggtcggtttcaggcaaaggttccgcacacacagaggactacagaggtggctgatgggtggttttgctgccggctggagtgagcgggtggtgagggactttgaggcaggtggcagatgcctgggagccagggtgggggctgtggggaaggtgcaggctggcgtggggcatgggagtgatggtgtggtgagcaggaagcagctgtcactgtccagctcagcctagcgacccagctgtcccaacgacctctgaggtccgtccaccggggaggactcaccccatcatcgcctccatttcccttcggggcagtcgcctgttcaggctgctgattcccccacccagtgccgtctgctgcactgcctgctcccagggaggctttcaggacaaactccaggaatgtagccggggcctctggcagccgttgggaactttgtcttcatttgtgttcattttagtgatcccactggtgctaaatactctctagcattcactttggattttcgttgaaacctgttagagccatcggcacgaggagggacagaggcagagacctgggcgcgccaggcgtcctgctgggtgactaaccccacacagccctacctgctgggtaggtgcagccacgtgactcccgaggcagccagtgctccttcagaggcgtggtcctgccacgggacccacagccactgcgaggtggcccagggcacaaactgtgggcctyctggaggggtgcctcactggggctttaggctggaaaggaacacagtgacctcagcctccarcctcacctgcttcatgaagctgctctgcagggattcactttgcattcactttgcaaatgtcggcagcattggtttcttctgaggcctcactccttggcctgtagacggctgccttcttcctgtgtcttccctctgtgtgtgtctgttttaatctcctcttataatgacaccagtccgagaggattgggcccatcttgggcctcattttactttgtatgtctaaggtattgtactgggctttagggcttcaacatgggaatttttggagtcacaattcagcccctaacactaggtgtcgtatatgttagtagacatttaatagagctgcacaaagattagaataaaagtgagctatgagctctgcgtttagataacccctgggctcagctgtggccctgggaattttatgtgtagccgactccaggcaaggcagtgggggtggccatgtgcaccccgaaggcagacgcctggggagctcacaggcagagtgtgggacttctcaggatcccaggagcgtgggctgggatggtggccatggcgatggctagagtgaaggagtttggggactgtcagatgagtccctgatgaggccccagcccccatctcctcatctgtaaaatgggataatactctcccctcactgggttcccatgaggtgatgtgaaatgacctctttgtagcaccaggcaccagtggggcactcagtctgggcctctccctctgccctgcacgggcctgtagggccacaggcacagacctgtgcatcagtgggttcacctggagcatattcatgcgtgtaagcacatgtgcacacgtgtgggccgtttggcttaatgatcaccttccatgtggatcccaggtgatgtgagaagcaggttatctgtaggcctcagaggttggcgggctagatagatagccctcagcagcatgtggtagccagtgccccatccatcctccacaccaggccgcagcataattaagtctccattaaaggggctgtcactgtgagctcagatatctcccttctcaacaaacctagccacccagatccatgctgggcggagacttctccctgttccctctctcggcaagccaggagggctgtgggcactgagtcaggctcctgtgttgtgtcctagagacacacctgaccctaaaggccgagggtgcctggcctggccaggagagctgcaggagcaggtttgggtcagcccagcctggcggctctggggtctgcgctgtctgcacacacaggcttcaatcactgacgcgcagattctacttccacttgtcacaaatatccgtgtggtcctcagcgcctaccactcgtgtggggtctgctgccactcccctctgtgaaagtcacttcagatgatcagcagtggtcctcctggctgcactgtcctacgcttccatgacctggccagagctcagctttctctcctgcatgttttttatttcaaaacctaccccaaggcccctatttcagaagagctggccagggttgcaggcttcagaggcatggatgagtagtgcctagacactctgggttcacatggacccctggcttcaactggcatacactgtgtttctacacatgggatccggcgtcctgggcagggcttcatgattggctagaaatgagtgacaggaggcgccaggactgatgccaggtttcttctgagagtgctgggcggcaccgttctctgagatgggactttgcagaaggagcaaatgtggcagatagatgatgcgttaagtttcaaaagagatgagtttggggccctagagttttctgggagccagtctagcaccaggactggaggtggctgggaaggaggagttccctgccctgcaggtgcacaaaggatctgagctccccctttcagctcccaagcaggcagaggcatgctcaagggctgaccacacagcaagttcagtgtctccagcatgttggcgtccctgggggtacactttctagaccagttcctctacccaaccctcttctccacttgtccagggactcctgcgggagggtcccagaagcccagacgcatcaggagaggcgtggtgactcttccctacgcccgccaggcccgggcagggccagcctttgttcaaggtctctggtggtgggactgtcctcagctgccttcctgcactactgtcttctggaattttcctcctgcctgctggggtccaggttgttgaacttgttttccccaccacgctaagggctcagtccatctctgtgaggcctctccttttccatttttaagtcattgaatttcttactgtttctcattagtgatgtcccccagctctgtggcctcaggaaaagagcatctgccatggtttcctccctcctagagcaccagacgctggctgagctgtccactgggagctctcagttgaggcactgtttgcgcagtttcacgatgtcacagagctggagaatgatggggccccgtggggacccaggcccatctcgccaaagcagctccctgtggaacctttgtgaacccgtgcctggagaacttcactaagatgacactcccattgtgaatccctaaagcctcagacaccaaagccttccccgctctgcaaaggagcaaaacatggaaagaaatgtgagtctcaaaatgcggggagccacggtgaggaccggcttccgggagccagggcttcttcaggtcgaggtcccagcccagcatacaaggtcgggaggtggcagcagaacctctctccggggcgtctgggctccattgtcaccactgccctctgagccaggctgccaggagtaacgggctggcagcgctgtgggtgccttaggaaatgaagggtcctgaagagacctgcagtgcagatgggagaccagcactcgggattgggctttcgctggtgtctgcccagggtggccagggtcttccaggccagcgcagtcagtgtggcccacagggcctggcccaccactggcgggtggcaaaacctgcctgccccgtgcccccagttccctgccttccctggggagttgcaggagctagggtcacaagtgtcatattcactgctgtggctccagggtccagcacccggcaggcaccagatcctagatgctgagtaaatgaccacttcctttatgtatttcttcttytttttaagcatgttttaaacaatttgtacaaatcagtataaaagtaattcatgctctacctaaartttagtgaatattagttcttccactcattttctctgacctatgagatctaggttactgcttattttaagcctttggatcattactattcaatcttatttttattcttcactttatttttgtttgtattctgtgtttgcatttgcttctttctaaaagtatctggaagtgcagcagtcctcccttatcctcggttttgctttccttggtttcagtgaccctcgttcaaccatagattgaaaatgtgaaatggaaaattccagaaataaacaattcgtaggttttaaattgtgcagtgctcagagtagcatggtgacatcttgcccgtcatgccctgcatctccctttgtccagtgaatccacgctgtgcacattccccaccctgagccacctaggaggtgtctgccgtcagatcagctgctgtgttgtagtgctggcattcagtcactcttattttactcaattgttcttttgtgttattagttaatattgtaagtctctcactatgcctaatacataagttaaactttatcataggtatgtatgtcgaggaaaaaacatagtgtatatagggttcagtactatctgaggtttcagccgtccactgggggtcttggaacctgcccccgaggataacagggttactgtagtagtttttctaacaaagcactacagactgtgtggcttagacaacaaaaagttatttctgacagttgtggagtctcgaaattcatagaaattcaaggtcaagatgtcggcagcactggtttcttctgaggcctcgctccttggcctgtagacgactgccttcttcctgtgtcttccctctgtgtgtgtctgttttaatctcctcttataatgacaccagtccgagaggattgggcccatcttgggcctcattttactttgtatgtctttgaaggccctgtctctaaatacattcccccccgaggtattgtactgggctttagggcttcaacatgggaatttttggagtcacgattcagcccctaacactaggtgtcacgtatgttagtagacatttaatagagctgtacaaagattagaataaaagtgagctatgagctctgtgtttagataacccctgttgatgaattaaaatgaaaacggaagtcatgctcattgtagaaaactaacaattggaggtgaacacaaagaagaaatggactattaccagaaatcccaccatccagagatggtgaccactaacagataggtatgcagctttctagatgattttccaggtacatattttattcaaaattagacatcactgaaaatatggccagggtcttccaggccagcgcagtcggtgtggcccgcagggcctggcccaccactggtgggtggcaaaacctgcctgccccgtgcccccagttccctgactgcccagggaactgcaggagctagggtcacagctgtcatattcactgctgtggctccagggtccagcacctgggaggcaccagatcctcaatgctgagtaaatgactgcctcctttatgtatttcttctatgcttttacttaatatgtaaaactatgcttttacttaatatgttccatgccaaatctacatgtaaattatgatttttaatggctacatagtattcctttatgcaaatgttccagaaagtatttagcccatccccccatatttttggactatagggagtttttagtttctcagtgttacaatactgcccatattataaatctggccatattaataatgttgtattataaatctgcccatattaacaatgtgaatagaccctgagtcaaagggtctgtatatttttcaaggctgtttgctacttgtgaggttgccctccataaatattacagcttttagactctaatcagccatgtatgaaaatatccatttcccttgactcttgccagcaatagcttttattttccttaaaaatctatgccagtctactaggccaaaaagaattgtgctacagtctctcagcctgcattctttgattactggagaggcctggcgccttgccacgtgctcatcagtggctggygtttcttctttgatgaagtgcttgtcctgcttgttatttccacttctctgtgcagaatctgggcctggccagaggggctacttggtgcagctcaagcccaagcctctacctctgcaccttggttcatctgttccctccatctggaatcttctctccctcccccttccacccccacatgcacctgccagcatgttcctcctggatccgtctcacccagcattggaggcctttcactccctcccactttgtctgggacggagccctcgtgaggacgggatgctgccctcgtgaggatgggatgctctgtgggacagccatcctgttggtgtcakaagaaacggatcctccttctctggtagcagtttgcattttctacccgtgttgatgaacttagctcacttcagaaaacacaggcagagtgggaaaagcaaggctttggaggcgcacagacttggctcacatctgtgctgtaccctgtctagctgtgtgatgtgggctagtccctacgcctctcagaggatgccttatttgttatataagaaatagtaattcctgcctcgccaggtctccactaaatcagatgatgtgtaaagcacctggagccatgtggtagctgacacgtggccttgtcatcatcagggtcctcgttggcgtcctcagcaggcatagcagggggcacagtccagggggcatggtccagcaactgccagccgggccctgtgccagggccgcactccaggggctcacagtcatgtggtgggcacagacatgcaggtgaggacgcaagagagcatatgataagtgctgtagscacaggtctgcgggacgcacaagacagcaattccctcaggagaacagggatgattcccaaaggatgtgacattccgttggcttgggccttgaagaaagtgttcttaggaggagccaggcggggagctcttgtgggcagagggctgagcctgagaccgatctgttgtctccctccagtgagtgacctcaggagcggggaccttaatgatagaaactgtgtgttgagcaccttgcatggaagggctgctgagtccccacgtgatgccggttaggtcgttatcaatgaggaggagcacctggggccgcgtgtgcactcccaggtcctgatctgaacacaggtctgattccagagcccctggtgcagaagtcagtacatatttattgaaggacttagacagagccacaacttgcatttggggaatcagttgtgacattttagaggcaacctggggagagaggctcccagagcacagccactgtgccaactgttgaggtaggaggatcatgatgggcacagggaggccaggcccagcctgggggcattactgcagcatgaggggccacaggggtgtggagccaactgtggatggccagaccccagtacgggagcagagacactccctggcctgccccctccttttacagatgggctgagcctgagcaggtggcagacacgcccaaggacacgcatcccgtcagggctggcagagctggtgagggagcctgaggctgtcagaactcctctttctttccatctctgcgccctagtgtttggggccaaggggatttgacaggttccctgaggccttggaataaagaaagcaaaacatttcactgttggattactttgcactttagctgttgcatctatggaaattacacagtgatgatgtttgtgctggtagccctttgagagataaagcttcagggccacacctgcgcccttcaaggcagccccagcagcgtgaggtcagatgggggagaagcctacctacgtgtgccrccagctcaccgccctggcacagacccyggctggggatgaagtgtgccctgtgccaggctgggtgatccaaattcagttgtgggaaagagctctcctgggttatacctcggaggcagactggcacaggcttggcatttcaagagcacacatctgtgtgtccactcctatggttgttcctgcctctgcccccagaccctcacctccgtaccccacacagggtcctctggcagccttctgggaatcccagcccctgtccttcatcaagggcctcyggagcctgccaccacttcacctgcccagccccttgatgggggttctgacctgaaaccaagaaaagccctcccttccttgcctatttctaaactgttcttcccttaactctaatcctcttgccctcatctctcctcccacccacggccaccctgtcctttaagatattggctactaaccttctggagcctcagagcattttgatgattggatgaaagctttggactatttgtctaggaaaacgcaaacccacacatgtccacacaatagtgctgtccctcgagggcgtcmgtgaccctgtagctgggggagctttaggaatcccattcagtggggtcttcttgacctcagcctggcttttcctcccttctcctaccagaacttgggcagttacccaggtcctgtggtgaggtccgcctctgagcgatgggatggagaacaaacgaaccaactggagagagtgtgtytggggggaccaggcagcagccccacccttgggtgcatctgtgggtgctcgttccagcctgagcaggtgttcagtggatcctcatgcaggaacccaagcgttggcttggagagactggcaagaaggtgacggagtgtctcctttagaatgaattgtcttaygtggcctgaagacctactgtgccctgggatgatggagacgatggtaggagagaaggcagagtgtctagataagtattgcasagagacaggagtgcggttctgggacgagaaccgagtacttgctgccacgtttcagtgtcttcttcactccttgtatgcttctttccccaacacatctgcagactggatgcaccggaccgtggtggggagtgggcagctcaggggtaggggtcacctcctctagccggtcgcctcactgatccagatccagctgtcttcctacacatgccctacgtacacaccaggacagggacgcctccaacttggggtttccggtcattaagtgtggagcctggtgtgtccttgtgaacacaggcatgctctgaaaagtgaactgaggccacagtaagacaggccacagggggcagaaccacctcagctgaacccgtgtctcactcagtgctgggaaagccattctgccggcactagaggggaatgaattattgtgcctgcattttaagcatgtcctggatgatggttgatggcctttccatggcttcataggtgatccctctgggacacagctttgcagccctgccctgctccctggtctttctttctggactgcttcaggttcttcagcaaagatgttgtggcatctcctatcacaaaatgccaccatctcctgtgatccacgtcctcctgcagccaccccatttcactgcccctgctacagccacacggactccaaggtgccacctctgctcattcctcctctccttctcccctagctctctcgagcacacccaccccaggctgcagctcccaccactccatccagacagtggatgtgtcactgtggcctccatgccaacacagtccccacacctgtgccctcaccgtacttgccatcactgatagctccctcctcccaaggcccttcttcacttggcttctgagacaccgttctccctggggtcacaaccccccatcggcagacctaccgtgtatctaatgagcacttccaccttcacaaggccaagatcaaatgctcgatactgctaacctcccgagtcctagtcctcctcggtgtccccagttgtcaacgggcagttcttctggctgctgaggcccaacacctgaccccttccacactatgcctgctccatcactggcctgctggaacatggcctgacctgaccacttcttagcttgtacagcttcgacctggtctgagccactcctcgtctcccctgacccacgtggcagcctccagctccctttatcctgtccccgcttaccagcacctgaatgatcgacgtgtgtgtgcacgcgtgcgtgcatgtgtgtgcatgtgcctgtgtgcacatgtgtgcacgtgtgtgtgtgtgtgtgtgtttatgtgcatgtgtgcttgtttgttttctggtttcttctaccagaaggaagagactggaagccatgggcgttgttttgtttgtagaacctggcacagtgcctagcacgtggtgactgctcagtgaatatttgctatgagtgaaggagggagggagggaggggactaacatgtccccacgggagaggggctgtagcttccatcagattttcaaagttccccatgactcaataaggaattagttttctagataaatccatgggtctttttcattcattccaaaggcgaggccttcctgtagtcatagtgaaagatcatgagctttatattcgccagagccacgttttaatccccacactcctctgtggttttaaccaaatggcttaccctctcagcgccttgttctttttcctctataaagcctggcttccagagttattaggaagacaaaaatgagtcgcttggaaaatgcctattgctgtatctagcacctggttagtgctaaattaaggccctctgggggaattattcctgttcaatcacagaatgaagaaggcttcagccagtccatagcagagacccgtaccccacttccaggaagccagggtgagcactggccctgccccggctgcagctgcagcctcattctcagacccggtgcagggcatgtgcagtggctgccctggactgcgctgctccacctcccatcaccaggcaactgagactgggaacttggtcctcatgttcctttctgggtgcgtggtgggcaactcagaggcagaatgagaggctgaaggtcccgcagctgagacctgagacagctgcttggggctctcccttcccaggtgccctccgcaccttggccatctgtttcctgggcacatgtatactctaggggagaagagggcagtggagaggattaaattacagtcgtgcaccacatgccatttcagtcagtggtggaccgcatgtgtgacggtgatcccgtgagattataattccttatttttaccataccttttctgtgtctagatgtttgggtaatacacaaatacttaccattgtgttgccgttgtctacagcgttcagtacagtcacacgctgtacaggtttatagcctagwagcaatgggctccaccacacggcctcggtgtgtagaggcttgacctccaggctcgtgtgagtgccctctgtgatgttcacactaggacaaatcgcctaatgacgcatttctcagaacctatccgcagtgttaagctgtgcgtgactgtatttaagagaacagactgttttaaagcaccgtgatttgcatactagttcttaatatgctaattacacatcattctttgggttctcagaagcagcacttcaggacacttttgcagtgggccgctctgcttgcgttagaggtactccaggggtcttcctcagcccaaatgcaggctgctgaaagctggccttctcccactcctccaatgagcatgtggcaggccctcactcgggctgcagggctgggtggctcagagggctgtcctgggtcccaggaaggagcagagcatccttgggcctgggagcccagacagggccgggttatagagggacacctatagatccaggcacggctttgcctgtacaagtgtaaaagaaacaatctgtttctctctgtcaagaatcttcttctgaactgagcaccagagcataaacaagggggagtcaggggagacaagcagaagaagcagatgcacacgtgcaggcagccaggcgtggtgtgggagggcttggagttgagaaatacgcagggtgtggcgtcaggcctagagagtggtcctgccccgtgacaggacagcagaacggggcgggcctgggttcagggcttgggccactgtccagtgggccgtccctgaggggggtgacccagcacctggagccaggaagtggaggatggggcaaggtcatcaagtttgctgtgttgacagcacgccacgagcatgacacctggcggagctgtgctgaggggttgggtcccaggtctgtggtcagaatgcggggtcatagtaccaggcagggtgtggggttgggaggaggaggtgggcaagccagcaccagggctgggagcagggaactggcgcacaccgcatcatcactttcccgcccagaactctaaggggcccgggaagtctacattttaactcggccttcttggtcgctacaaaggtaaatttgccaggaggattaaacaagcttcatgtccggctgtgagcttgattggtaacttctgaagattcagacgtcgatctaatgtggcaggtgggtccacacctgtgctcttgccctgcaccctataaatggtgtgtctgggcccagttggtctctgtttctcccccagcctttaccaacaggtcccccagcacaggcacctcatcccctgcccaggacgtggttcagggacctgacattgcctccctgtgaagtaagtagacaacagaaaggcattcatttccaagttgccttcaaaaaccctgttcttaccttggaagcagtgctgttggcccagggaggcctgtactgcaccttggtggattgcaagaggctaagcaaccaagtcaggaagtgcagagactgtaggagattcaccaaggcagaaagacccaagctacccaccccatctgatatggtttggctctgtgtccccacccaaatctcattttgtagctccggtaattcccatgtgttgtgggaggggcctggtgggagatggttgacttatggggtaaggtctttcccgtgctgttctcatcatagtgagtgggtctcacaagatctaatggttttaaaaatgggggtttctctgtacaagtgctctctttttgcctgtcgccatccacgtaagaagtgacttgctcctccttgccttacacttctgagacaggctggggtgatcagatgtcacctgagggctggtggaaggcgaggagccctgtcagatacggagggtgatcagacgtggagtctggataaaccgacttcgtaggattctcacaaaaggacagtgcagaaatgaatgaggaaatgtacaagttaaggcctcattgagaaagagctcagggagtctgagagtttggtcaaggagagaaccttcgctactttgccaagttgctggatgccctttggatgatgttctgagcgtgcggtcactttctgtccgcctgagacaggccaccctgggagggaggggccaagcagagcgcatcttggccccagttcccactccccagggtgggccctctccaagctgtctgtctgctttccttcagcaatggggggaaagcccccattgctttccttccctgttctttgctgtctgaatctggtattccaaggatggagagcgaagggtccacgtccaccctccttcccctactcacagagccacacagacctggcctcgctgcagcccccaagccactggagtaggtcatatacactacgctccacacccacatacactcacacactcacaacacacagcacactgtgcacaaacgcacacatgcatgtgcatgcttcatgctgagatgagcacggggggtcagacatgacgggcgtgtgctggtgcaggggcctgggcttggagagacagggctgggagttgagtccatccagcccccagggacggcttcatggacagctgggtgggcactggtctgggagtctgtcttggagacagtgatggtgctggctgccggcaggctgcgctgccctgggccctccccacatctggcctccagggctaccttgcctccacacctggcaggactgactgggggagggcaggagcgggtgccagccctcctgggagcactgggtggcagctggatctagagtttgtgtccccccaggggagcccggcccccgtgtctgcagttcgtgtttcccagaggaggctgcctttcagaatgctccttggctttgtttagaacagcgctcatctgtctcagcctcgtctgaaaaatcgccaggctcgttcctctgcagaggaaccgctgtagccctagatcaagaagccgagtctgtcctctccatatctttccgggcctttgaattcccagcagtcctggcatttcagcaccgcccacgtggcacagcccaggacaccagccttgacctttcagcctggccaaggtgcctcctcctctgcctctcaccttcctcatggcaatagtactcatctcagagggcagaggcaaggattccaggggaccatgtatgtaaagagcctagtgcagtgccaggaagatgataaacactcagtgagcggcaggtattcctccccgccccttccggctttgccttccctttcccaggggactgagttcagaagcacccctgctaggttcagactccagctctgccattccctatgcagcctgggcaagttgctaacttctctgaccctcggtttcctcatctgtgaaatggggacagtcatagcttctaactcagagggctgtgggtggagctgaagcagcacccggcccactcaccagttgccatcaacacctctaccactgcrcatgctgaggcggaccagaaagagaacagaggcacctctcactcatgcagtgtcttgggttcagtgccagggaggccagggctgcccctgcccttccacagtctccacctggctccacagrtgcttggctagggtccgctggaggatggggaggcaacacaggctttggcgtcagaaacccgcctcagcctcaccacctgggacttggagcgattcccataacttacttggctgatttgtagcataacccggtttcgctacctgtccagcmttttctctgccactacctccacacactgaagctaggaaagcttcctcagcctgccccaaccgccttcaccttctgacacaaggttttcttgcccctgccttcgtggcacaggtcctcctgccctggggcaacccctccttcagggagcctggctcagtaaacattttatcagctgaacccacgaggtgcttccctcgtaccycgtttgcctccctgtgtctgcatccccatcccctgcccccggcctccccacagcaggcagaagggcaccaggcctcatttctgcattggcctcaccttctagccaggggtattcctggtctaactagtatgagagctaggatgttgacagagtcaatatgtgagccaagttcagctttagtttctttcctttgcaagatagacaggataaagccttcatcaccaagtaagaaatgtaaagcacgcgacgtgggcatgctcagtgtgagtcccattccacacagggcggtctcctccacaggcacatgtccccaccccacataagcctggcatttgctccagccccagccagcaagtccagcgatgggcacctccagccatcccggccctgaggggtgacactggcttcccaggcccgagcgcttggcctccccgctgtcacgggattcccttccaagtggaagaagacaaagattaatttgtttttaattcatcttctaattgctttcttctctaaagaaggcctccacgaggcccaggcccaatccctggggccatggttgtttaaaataaaaaatgaggccactcggcagggacacatttttaatcactggaaaaatcctcctggcatcagggcatgcagcctcctggcatgtgactccctggaggaagcccagcagaaagcgtccttgccgtgggttcagggattcccccttggacagggaggcgagcccgccagcagtgccgactgcttgcctactaagcgtgagaactgtgggcagtgcaggtgatgtagaaggtcctctctgcactcagcccaccaggcccyaagagaccaggcctcaagaatgagacaggcctggccagtggcgtcagaagtgaatgatgcctgggctggggggactccctctagatggcactgacaggcactgccagagcagccactgggcccactgcacagcccacttccagggcccctgcgacatgccatcctaatacccacgccccctggctcctccggcgacacgctgtccccatacccaaaccctggctcctcctgtgatctgctgtcctcatccccaaaccctggctcctcctgcgacctgctgtcctcatccccaaaccctggctcctcctgcgacctgctgtcctcatccccaaaccctggctcctcctgcgaccygctgtcctcatcccccaacgctggctcctcctgcgacctgctgtcctcatccccaatccctggctcctcctgcgacctgctgtcctcatccccaaaccctggctcctcctgcaacctgctgtccttataccccatccctggctcctcctgcgacatgctgtcctcatccccaaccctggctcctcctgcaccctgctgtcctcatccctaaaccctggctcctcctgcgacctgctgtcctcatcctcaaaccctggctcctcctgcgacatgctgtcctcatccccaaaccctggctcctcctgtgacctgctgtcctcatccccaaaccctggctcctcctgcgacctgctgtcctcatccccaaaccctggctcctcctgcgacatgctgtcctcatccccaaaccctggcttctcctgcgacctgctgtccttataccccaaccctggctcctcctgcgacctgctgtcctcatccccaaaccctggctcctcctgcgacctgctgtcctcatccccaatccctggctcctcctgcgacmtgctgtcctcatccccaatccctggctcctcctgcgacatgctgtcctcatccccaaaccctggctcctcctgcgacctgctgtccttataccccaaccctggctcctcctgcgacctgctgtcctcatccccaaagcctggctcctcctgcgacacactgtcctcatccccaatccctggctcctcctgcgacctgctgtcctcatccccaaaccctggcttctcctgcgacacgctgtccttataccccatcccgggctcctcctgcgacctgctgtcctcatccccaaaccctggctcctcctgcgacctgctgtcctcatccccaaaccctggctcctcctgtgacctgctgtcctcatccccaaaccctggctccttctgcgacctgctgtcctcatccccaaaccctggctcctcctgtgatctgctgtccttataccccaaccctggctcctcctgcgacctgctgtccctatacccccaccctggctcctcctgcgacatgctgtcctcatccccaatccctggctcctcctgccacctgctgtcctcatccccaaaccctggctcctactgcgacctgctgtcctcatccccaaaccctggctcctcctgtgacctgctgtcctcatccctaatccctggctcctcctgcgacctgctgtcctcatccccaaaccctggctcctcctgtgacctgctgtcctcatccctaatccctggctcctcctgtgacctgctgtcctcatccccaaaccctggctcctcctgcgacctgctgtcctcatccctaatccctggctcctcctgtgacctgctgtcctcatccccaaaccctggctcctcctgcgacctgcggtcctcatccccaaaccctggctcctcctgcgacctgcggtcctcatccccaaaccctggctcctcctgcgacacactgtcctcatccccaaaccctggctcttcctgcgacctgctgtcctcatccccaaaccctggctcctcctgcgacctgctgtccttataccccaaccctggctcctcctgcgacctgctgtcctcatccccaaaccctggctccccctgcgacctgctgtcctcatccccaaaccctggctcctcctgcgacatgctgtcatcatccccaaaccctagctcctcctgcgacctgctgtccttataccccaaccctggctcctcctgcgacctgctgtccttataccccaaccctggctcctcctgcgacctgctgtccttataccccatccctggctcctcctgcgacctgctgtcctcatccccaaaccctggctcctcctgcgacctgctgtccttataccccaaccctggctcctcctgggacctgctgtcctcatcccgaaaccctggctcctcctgcgacatgctgttctcatccccaaaccctggctcttcctgcgacctgctgtcctcatccccaaccctggctcctcctgcgacctgctgtccttataccccaaatcctggctcttcctgcgacctgctgtcctcatccccaatccctggctcctcctgcgacacgctgtcctcatccccaaaccctggctggcttctccacaggtctgtcctgcatgctcctaggttcactgattcactcagcacaagttatccgaggacctggagggtgccaggtgccacaccagcactgagccagcagtgggagctggggcagacgaggctcggagctcatggctcccccaattacaacgacctctcaggtgacctcaaggctggccgagggccatctcatcacccctgtcctgttggccccaggcagccaagaccgatggctttggcccrtccttcccagggcccctggcagtgacagctccgtgtgccgyacagctcctggggtttccctggtagccacaccctgtgttcctagtacgttttgcccgtttgacagatgaggaagtggaagctcagaaagtcactcagtaagtggtggggccaaggctaagtctctgatgagttgaatgtggttttgcaccagcaggagacctgttttcagccaggggaggaagatgtgctgttcagcttgtgwcacggggtgggggcgtctctggaaaacagaggctggcacgcagcaccttcaggtcagcacggtgggaaggagaggaggaagcagatggacagagaaagaagctgggcaggcccagtgaggatttcagccgacccatgggagttgggatggcttcttgttgttaccccgagtttgggtgaggtgaggggcccagccttgataccctgtgtggatcagtcaccgcatgtaggtcaccccaggaagggtctgtgatctcggtcacggcagcacccctgaatggaggcagtcttggaaggcagcacccagctgtctgcaagcagcacccagagtgcctgtggactgtggctctggccttgattgctgaggggcaccttttcagaccagctgcactcctgggagcagatgtgggagccccaggtgatacaaactgactagttcttggtgatgtctgctgttaattgtgcagctgagaccaggcagtcaaaggggaaagagctttgggggtcactcattagatgcccttatttcccagggaaggaaagcagggtctggagagggccaggctccttgggaggtcaggagcagagcatggagcagcagcaggctgggggggccttggctgtttcaatctaatggtggctgccacatggcttcacctttccctgcagagccagcctgagctaagaacacactggatggtctctctttttgcacttgtccgttcaagattgagacgtgccaagatgaagtcagtttgattcagcaaatatttatggaatacctgctctgtgccaaggagcaggattgggatgcacaaacaaccrtgatgggggtgcttcagctgaggagacagacatgcagacacctcgctgtcccatggccacaacacaggcgaggagaggggggtggcattgcccagcagcatcatgtgttgaggtggcagcgctactcatagaagtcctttcatcctcgcggtcacccttagtccatgttacaaatgaggattcygggacttgtagaatgggtggctggccagagggccacagctagtaatggcagacataaggcttaatgggactcatctgactcaggcaaacaaggagagtatgatcaaggcctcaggggagcatagagaaatctggaaggagtacagaaggcttgcagcaatgacttactgcatccagaccttgaaggatagatgagcattcakcagccactgggagtatttcccctgagggaagagcagaacaaatcagtaaaacggtaaaacgcatgaacggctattgggaaatctgatgggaagtgaataaagggagggaggaaggaaagggggatagatggawagatgagggatggatagatgggtggatggatggatgggtagttgttgatggatgaatggatggatggatggtagatgggtggatgggtggatggtggatggatggatggacggtagatgggtggatggatgggtagatgttggatggatggatggtagatgggtgaatggatggatgggtagatgttggatggatggatggtagatgggtgaatggatgcatgggtagatgttggatggatggatggatggtggatgggtggatggtggatggtggatgatggatggatggtagatgggtgaatggatgggtagatgttggatggatggatggatggatagatgggtgggtgggtggatggatgggtagatagatgttggatggatggatggtagatgggtggatggatgggtagaagttggatggatggatggatgggtagattttggattgatggatggatggtagatgggtggatgcatgggtagatgctggatggatggatgctagatgggtggatggatggatggttggatgggtagatgttggatgggtggatggatggatggatggtagatgggtagatggtggatggatggtggatagatggtagtggatggatggtatatagatagatggatggatggatatatagatggatggatggtagatgaacaggtggtagtggatggatgtatgaatggatgaatggtagatggatggatggtagagagatggatgagtgaatggaggaatggtggattttggatggatggatagatggatggtagatggacagtagatggatgtgtgaatggtggatgggtggatgctggattgatggtgggtacatggtggatagatggatggtggatggatggatggatgggtagatgttggatggatggtagatgggtggatacatgggtagatgttggatagatggatggtagatgggtggatggatggatgggtagatgttagatggatggatggatggacggtagatgggtggatggttcaattgtggatggtggatggatggtagatgggtggatggatttttagataatggatgaatgtataaggtggtagatgggtggatggatggggggttttaaaattccccccggaggcgggggatatcagtaccgaacgggcnnnnnnnnnnnnnnnnnnnnnnnnnnnnnnnnnnnnnnnnnnnnnnnnnnnnnnnnnnnnnnnnnnnnnnnnnnnnnnnnnnnnnnnnnnnnnnnnnnnnnnnnnnnnnnnnnnnnnnnnnnnnnnnnnnnnnnnnnnnnnnnnnnnnnnnnnnnnnnnnnnnnnnnnnnnnnnnnnnnnnnnnnnnnnnnnnnnnnnnnnnnnnnnnnnnnnnnnnnnnnnnnnnnnnnnnnnnnnnnnnnnnnnnnnnnnnnnnnnnnnnnnnnnnnnnnnnnnnnnnnnnnnnnnnnnnnnnnnnnnnnnnnnnnnnnnnnnnnnnnnnnnnnnnnnnnnnnnnnnnnnnnnnnnnnnnnnnnnnnnnnnnnnnnnnnnnnnnnnnnnnnnnnnnnnnnnnnnnnnnnnnnnnnnnnnnnnnnnnnnnnnnnnnnnnnnnnnnnnnnnnnnnnnnnnnnnnnnnnnnnnnnnnnnnnnnnnnnnnnnnnnnnnnnnnnnnnngatggatggcggatagatggtagtggatggatggtatatagatggatcgatatatagatggatggatggtagatgaacaggtggtagtggatggatgtagagtggatgaatggtggatggatggatggatggtagagagatggatgggtgaatggatgagtggtggattttggatggatggatagatggatggtagacggacaaagatggatgtgtgaatggtggatgggtggatgctggatggatggtgggtagatggtggatagatggatggtggatggatggtggattgatggatggatggatggatgggtagatggtgagtggatggatgaatagtggatagataggtggatgataaatgaatggtggatgggagacccagccaataaaatcaaaggggcagcagcctgagggcatctcttgtctgctggaggatggatggatggatggatggatgctggatggatggatggtagatgggtagatgctggatggataggtggatgacatgtagtctagagtttttgagtttgtggaggcagaagaggttgtgtccaggtctttgttctagggttggggcatgggagtccagatacctaggcagatagagctatatccgtcaccctaactaagaacctcaccaagctgaggtcaatgactttagaagtgaaacaggggagtcccaccctgttgctagtggccacaagctagtattggaagcaagagggcagtgggaagaatcagaaatgagcaaggctagggcatggccctgggaccagcagcagggatatgcaggggtgatctggtgtctgaaagggccaggcttacttatatgccatggcgggggtcaatcccaggtgctgtgggcctggcccctgggcatccccagcctctggacccctgaaaagatgcattctgtctagttctggctgctgatcattgcacagccaagaaatccactgtgatttccagactaacacctgacagagttgggccagaggtttcagacctgtggctgggtgggctgactatgttgacctcccataacctttctcccaggcagggctgtgctaattttaaatggcgtattgattggccagccagccattccctaggatgaccccatagccctgctggcttgccctggcacagcccatgaggaagtctcctccccttgtgcttggctgtctgcagcccttggggtgggccagagactccatcacactgcctggcagagggtggaggctcttggctctagtgctggagtcacacttggtttccctgtgctcagcagggtgaagacccacctgctgatgtcacctgctgctgctccaggaaacaaatggactcctggagatggaagcagttgagagtgttagtgagctctgcaggtagaatcccagcataggctgggacctgttgaacaggtgcagtttgaatggtcccacgggactcatcccaggcaggcccagggtgttcctgccccctccgtgctggaaagctcatttagagaagccgcatggtctttggagagaggccagaggtctatccccaggagcaggggccacaagccagctttgggggtcccagcaagtcctctcttctctagttcaggctgcctggagagcccctcagcctgtgcccagcacagctccatgggtcttttcatgctggggtgcaatgcaggggtgctgcctggccctaaggtgctcctctgcacactgaggagacccagcaataaatacaaaggggcggcagcctgagggcgcctcttgtctgctggaggtggctagggtggaagaggacaaaaaggcacggtagacctgagcctgctgaggcctggggaggcgtggtttgcctccagggtctggtaaaccagtattcattctcagggtggctgccataatggagagcaggaatcctgtgcacatctgggaccccggattraattaatacttgcagcttttggggtgctcaagccccatcagagaagcctggggagcaggggaggttgggcaacccctggtggatgcttcaggactgaggtgaggtctatgccacactgggacagccagggctcctgtggaccctcctgtatccagcccccaccactcccagctgagatgggatggggtgggggacactcctcacccggtcttggattgtgtgggccacagtctcccctgcaggctgtgagctcctggtcgtctctgtgttgccagcccaagcctaggacagagggagtgtctgggcccatctcccttgaccaggtcctcaggaacctccaggctgcctgtggccccgcttctaaaagctccttgcccagagtctcagcagggaggtgctctccactgggcagccctgcccctccagtccagcacaggggcagcagctaaccgccacccgctcatccagctgcccggctctggcggttcaagcagatgggccactagaaggtccttttgcacctcatgtccttcccgtttgtgctctaagactttatagttctatgtgaagctttggctgtcaccacatcaagagtctgtttaacctcgtaagcactgacccagcaccaggcaggggtcagccctgggctgtgtgaggacagtctgggggtacagggtgagaggggttcccggcatgcttcatgacaagcatggcaccttttcatggtaggaagaagttctggacatggcgcccagagatgagaacatgaaatagtgagcctgtttgaaaccattcagcccattgctctcatgtgacaatggggacgctgaggctcagatcggttaaatgatttacctgaggtcacactgtaagccattgaagggccaaggccatcttatcgtctgtccattcatatggcagaggtcccccaggagctcaggagagacagtccctcagcagcagattcccgtgtgggccatgcaggccatggcgggttgctgggggctggatgtgcttcaggaagtcttcctggagcaggtgctgcaggagcccagctttggaaaggccacagggagtcagcaggagggagggacagatggagcaggggaagtcgcagggcactggggtgagagaccacaggggacgtgatcagacagccttgaacttggccttgaatactttggaggagcaattgaagtcgtcatttctacatccacaatcactttatgtcttctctctggaaaatgtcttcctcctgctgtctccctgctgcacacaccaggagtccagaaacctggttttcaagcctggacctactgccagagttcaaggtctagaaatcctggtggagaccccatacaggccccatacacacaggccctgctgggcactagggcctggggggaggaagtgccagcctgttagtggaggcggccccctgcccccaaggtaaatgcccttctaggtggcacacatgggcacaaggtgcagaatgccgagggcagcaacagaggtccctgggagggaaggcttccagggaggagaggctgcgctagacacgccaatggcagatgcccaggcagagccaacaagcagcctatgcaaggcccggcacagaaaaccagctgcagcccctcagtactcctgcatgccccccatgccagctctgacacctgcaaatctccacacacccgctctgacccctgcacaccctcacacccactctgacccctgtatgccccccctacctgctctgacacctgctgtgtgtaccccctgcatcttctctgatccctgcacacctccccacctgctctgacccctgcacagcccccacacctgctctgacccctgtacgcccccctacctgctctgactcctgctgtgtgtaccccctgcatcttctctgatccctgcacacctcccacctgctctgaccccaggacaccctcacacccactctgacccctgtatgccccccctacctgctctgacacctgctgtgtataccccctgcatcttctctgatccctgtacacctcccacctgctctgaccccgggacacccccacacccactctgacccctgtacgcccccccaacctgctgtgacacctgctgtgtataccccctgcatcttctctgatccctgcacacctccccacctgctctgaccccgggacacccccacacccactctgacccctgtacgcccccccaacctgctstgacacytgctgtgtrtamcccctgcatcttctctgatccctgcacacctcccacctgctctgaccccgggacaccctcacacccactctgacccctgtatgccccccctacctgctctgacacctgctgtgtgtaacccctgcatcttctctgatccctgyacacctccccacctgctctgaccccgggacacccccacacccactctgacccctgtacgcccccctacctgctctgacacctgctgtgtataccccctgcatcttctctgatccctgcacacctcccacctgctctgaccccgggacaccccccacacccactctgacccctgtatgcccccccaacctgctgtgacacctgctgtgtataccccctgcatcttctctgatccctgcacacctccccacctgctctgaccccgggacacccccacacccactctgacccctgtacgccccccctacctgctctgactcctgctgtgtgtaccccctgcatcttctctgatcctgcacacctccccacctgctctgacccctgcacagcccccacacctgctctgacccctggacacctccacacccactctgacacctgcacacccctcacatctgctctgaccctcctgtactccttcccttccaggcctcagcttcctcctctaggaaagggtctcatgattcctccaaaccccctgggtgctgaccgtgcccacgtgtatgatctgattggcagatgagaaagtctgagactgggttggcattgtgtgatgaggacaaggactcaacacagagccacacagagcggtgggggcggggggcctgcctgggtggcgagagtctttgctttatttagacaggcttgagagaagatgaaaaatgagagattgaaaaggtagagacattgcttggggacagaggagtcattttaaattctctgctcttctcagaaagctgtctttgcataatgcttccagccagcaggcatattttccatttttttccccgtttctttttcttctggtttatcttcagttgtctaaagtgcttgtccaaaaagagaaggttgaaggggaagcacttaatatagtcattgtctccatgagccaaggcgttcctggtgcaaaacacagcttgcctgtgttgagagagaagggactagaggcccagtgcctgtctgccatggatgcccaatgtggccgtgggcacagcagcgcatgggggccctggtgcttcctcctgaaagggagggcttggttaaatgagctctggtggcctgtaaatgtcacagctaaatgctgtaacaaacagccccaaattccagggacctaacacatcagcctcattwtgtttatatctcatggtgttcttggtgcaggcagctttttggcgctcacctggggacccaggctccacagtgttctggctctgaccacctcgtgtcttcgtcccctgtatgtccctgcctaccctgaggctctacccacctggggccccacccctaggggctcccctaccccgtggacctgttggtcccatagcccgcctatcttgcagctcctccctcctccagccctcagtttcttcagtttctcctctcagcctggagatgggggactataggatggatgtgtttacggtccaggtttgtcctttccctctaagtccccttggtctggacttgatcttgtgtttccaactcactcccttggagaggggctgcagtctgtgcccaggaggaaacgcgatggcttcccagacagcctctgcaaccagaaccttctcgaggtcgagtattccatgagagagcagggaactgcctcacggagggggcagatgtgcagggccttgagacacagagctgaggtgccaccggcggcgattgcaggagcccagcacagagggcaaggggcactgtggatggcagcagatgccaccctgatcamagagccgtggagtgaaggtgcacactggccttggtgccagggagacctgggttgaagtgctgactctgtctctttaaaccaaaacaggcttgtccatcaagtgagcaggacgatgcctctcggaatgtcactgagaatgttcagtgaagcartgccagcgtgctcgccatgggcacgtggaggcgggctgctgcccaccgactcagtttacccatgtgctatagatttgtacatttgagctcagagaggtgaagtcttggccaaaaggcacatagtagcaaggcggcgagcccagtccctggtcccccaactgcccgctccatccagaggccctggcttcccctttgcctccctgtcctgctctgtttgtccccaagggaggctccagccagggcagcaaatcccagagcctgctgggcctgaaggaggactggtttccttcagcagcccatgtcctgcccctgctaggacgacctggcctgtgttcaggctcagctctctgtgcacagcccaccccgactcacccgctgtcctaccaatcgctttgagcgtgctgaaggcggagctgagctggagccgctgcaagtgcatggcctggattaacccacaactcctttctcagctctcctgggtgtgggagccaggcaccagtgattcacacccctctgttcattgggcatttctctctggccaggatcagagctcagccctctccttcactccacgcaccacctttcccttttttagacaaggaagcagaagctctggcttccgaaggggctcacccaggcccctgagtcagcacctaagctccaaccatcatctcacatccaagccataaagccttcgacctgaggatcctggcctggtatccgtggagggtgtccatgggctgggagaccctggcctcagtgtgttgtgttggtgacggtgtttcaccccgtcctcaaggcagccacggccaccatccccagcaggtcctggccatgcagggtgtaatcaggaggcctacctggaagggaagtccttctcctctccggagctcacctcctgcacatccccggggtctcccctccacaggggccctggcatccctggatggagggtgggtgagctcaggaagcagagagcctccgatgagagaactccaagctgtacaggtctcctctccaacttcattttgccctaattttaatttaattccctttaatctttaatgaaaagttgtaaaagtaaattatttacccaagagagcccaacagctcctcaggagctgttctcgacttgagggtaattacacatgcggggccagcaccaccgccctcccaggatgccagggaagaggcgtcctggtttatgaactaattagctccctcagtaactgttaaaaacgcatgccatttggtggattgagagcgaagctccagcttcatgaagtgcgtgccctgacagtcgctgatggggggaaagagcctgtgttctgtgtccatggggtcagcgggagtgtagccagctggagtgtgcagagctgggcctgcctcggctcctaggagagcagtgctctgggacacggagacggagcaagtccttcttccgtctctgtcacccagcctctgtctccctgtctgagctttccttgggctccagcaccctgagagaaggccccttcccagcagtcagggtctggaagcggggaaggggtggtggaaaggagcaggggtggggaggggtggggactgtgtgatttgacacatacctcccaggctgtgcactgcctctttgactagacactctgtcacagcaccgtcacccccatttcctggccattatccacgcttctcgcttcttttccaaactctctctggatatacaataaagagtygaaataaaatgcagaaggtctggaccaagggaaaccatattggcatagttggtcaagacttggaagagcagttgtgcaggagaggctgtgagtgcgtgttcatgcgtacctgtgagtgaacgtgtgtggcggtggcagtgagtgcacgttcgcgtgtacctgtgagtgcacttgtgtggcagtggctgtgagtgtacggtcactgaaggccaacatggtgctttaggtggattcatgtttagttctgagcttcctaacagccaaagtgaaaaggtcagttacttggctgtcatcaataaagagggaaaacatgctggactggggggcattgagtagctagcaaccaaccacattagcagtagagaaagttcaccagttatgttagataattggaaatgagagggttttatatgggatgtgcctgcctgccccccaccccacaggacagctggcccggtgttggtgaagggcaggaaaccttggctttgcagtcctctctcatctcgggtcttggctattttatttctccatagaacttattttgcttcatctaaagagggagaaaactccttgattaattctgaagccaaaccttacctgaatcaaatttggctctaaaatttaggaccgcccaagatttatgtcaactagaaaaatgtgtgtcttctgaaatttaaaagttaaatatattatagctgaggcaggctggatagagccttaaaaacttgactcactttgttccttggtcttcaagtcatgtatttccrctgcattgtttttgtctttacatttttaaatcccaaattagatatttgcaactgaagtctacttagtcccctgtttctcgccagcgcaaaaggttggagagtagagttgtggggccaggtcggggaggcgtcgctgggagtttgagctctggaggaaaaataaaccttcagcagccagccttgaggggacatgccctgaaggacaagtgaacagattgttggacgagccagttggacaagaaatccacagatcattccgctgtcactgtaatttacacaggactctgggccctgcagacattttacctgtttccttcaaccacctaagaagcccacggtagcctcaccccaccaccttccacattttctcctcccctgctcctctcagcccactctgagtgaggcagacatggcttgtgcattgggcctgcaaccctggacacatgcacggcagaaactcatgctcagcaccaccctagacagaggaarcccgcctctctagggtgcagtcaggcaggtctcttgaaaagtccactgtggtttgaaatctctgctgtacactgaacctgagcccacaggtggcggctgttcttctcccacagatgcagcatttcagtgaatgtttcctgggtgccaggagtgtctgccagctgcctacccccacccagcctgcagatcagagttgaaagcaaccgtgcatgctgggcccatctgacctgctggtcctcatgtcctgaaggtctggtctccatctggccccatctcctggctccctaactcctgagtccatcctgcctctgcccgtggccgtgttctgggtccatagcttgcccaaagtttgggtcctgaccctctctggtggcccctgacttgcctggtccctgattgcatgttgtgttgtgctgtgcttgagggaagagacttccagcttcagccctggcctgctgtctggccccaggctccaaaatgtgagaaactcctgaaatatggaggtcaagggcttggagttctggagggttctcatggcttatggacgttgcaagcaaagaggactgcacagaagggccattccaaacagctgtcccaggctggtggggcgaagctgggctgtctgcacagggagcagtgagcgccggcagcatggccggttgggggtagatcgggagaacgcacgtgagaaccgcagcaagatgctacttcacctccaccaggatgggtgaaccagagccaggcaaccacagtgccatagaaggcgtggagcagtcaggcctctcccgcaccgccgctgggaatgggggtgcagccgccttggaaaacagtctggtgcttcctgaaaccattagacagagttgccatttgacccagcaagtctgctgtcaggtgtacacccatgagaaatrataacctgtgtccacacaaaatcttctccataaatgtgcacagcagcaccactcatcacagccaaaggtggaaacagcccatgtgtcccttggtggatgctatatgaacaaaatgtgccccatccagacatggagtattgtcccgccatgagaragaacgcagcactgacccatgctgcagcacgggtgagccttagagacatcatgctctgcgaaggaagccaggcgccggagctcactgccctccgcttctgtttatatgtgagtcagagtagggaaatgtatggtgcgggaaaggagattactgggttgcccagggctgggggtggagtgggtctggggggcagggcagtgatggctaaaagggtacagggtttcttttgaaggtgatggagatgttcgaaaacgggctgtggtcgcacatatctgaatatactacgaaccactgaattgtacactttaaatgggtgaattgtgtggtatgtgacttttatcttgataaagctactggaaaacaacaacaacaaaaacaacaaaaccagaccaagtccagagcccaggaatccagtgggggctcagcacctactgctgttcacctgggaccagctcctgagccactcgccacctcaagagcgtcatctgtcaaatggaacaagggtcagccctcctactggggctgctccaaggactgaattaggggatacctacagagcgctgagccctgggcctggaagacagcgagtgctcaagaagtcaggcattgttgacaaccagaggagcaccaaggaggagtgccacgcccaggggagggggcatcacgcccggggggagcttcacacccagggggagcatcaygcccaatggggagtgtcacgcccaagggggagtgccctgctggggcaggctggaggagggggaggccgtgggtgcaggtagggcaggcctcttcccccacatcctccaccctcctcttggggctcattggggtcacagaaacctctggctggagtcccaagctgtggaatcaaatgggaatggcagctgcccagggctgggcctctgcatctccctggattcacccctcctggtgctgctcctgacacagccagaccacagtggaagcagtgtttggcagagcccagactggaaggcctgcaccagcaccacatctgccttccaggagcctgagtcctgcacgggtcacgacagccggaggtggagaggccgaaggacgggtctgccccaggatggctccagttggggccccgtccccatggagcacctgagctcaccgcccgtgtgggccttatcctgtagaacatcaccactggaactgcctcccctgcctaccactctccaggacasggctcccggacctgcttccgcagggcccgcatggggcccaggcagctcctgtcacctctctrcacctcagtgtgcttctgcaaataaagctgcacctgctctctgacctcttaggaggatgtgggcgctgagtgagacacactttaccacctgtgagcctcgaccagcctgcctccccctgcccagcatgcgcacattgcctcgttctcagccccacggtggccccctggccccatgcacaggckggccaatggcttcctttctctgtgccctgccaagcccctccctggcgggcacagcctttacttatagcccgtgtttctaccagagcctggacgtgctatagcagggacttcaggaggaattctgggccagacacaattatgtccgtaactctggctggtattaaatgtgaaacagaagcagggccagggacaggagggaagagggggccggtgccgatgtgacgccttgaggaaggaggctgattggctcccaggagattccttacaacatgaggttctcctgcataagtcatctgtgggcccagagcggagcatggtagctsggcctagagtcctcattcaggacgcacttctgggacgtggccctggtccctcatgtgccaaatggtgcactaggggtttaaatggggcagggcacagccagtcggtggtggggccagcgttcaaacctgggtacctgaccccaaagcccagtattcactcactcactcatccatctatgtgtccagcagatatgaaatggaacttgtgtctgccatttgcctgcctgtgctgggtattggggacaccacggtgaatgagacggccaagtgccagtgttcctagagcttcctgacgaggaggaacaygggtagttaacaatgaaacaaatcgataaacaaggtcgcttcagatcagatgccagggccatgagaaaatacatgaatgtggccgagtggctggcaggggcaggaagccctctactgtgtggkcagggacaacctttctggcagagccaagtcctgaccgtcaggatggagctggtagggaggccaggatggcaggtgcagaggctctgggacaggaaggatgtgctggagggacaggatggccagggagcagtggcrgggaggacacagcccgggagacgggctctgggaggaaactcgtagggccgaggagaccagagttggggtgagaatttcatcaagactttcttttattctgagcataaacagaagccacgggccaggcaggcgaggagcatggaagtgacactacctaccagcgtctcacactagagctgtggtcgtgcagaaaggagagggagccgccagccagggcggggcgggtggaggctgagcagaggcccaactgcatgggcaccggacgtgtcccaggctggggctgggtgtccgggaggagaggacccagcttgagctgctgccggtggtggagccactctactggggaaggcatggggaagaggggcaggaggagaaagtggagggtgagaccccgtggtgcccggtcgagatgtcagggttgcccagaggagcacgggcctgaggctcagggcctctccagtgcttgttagataaatgaatgatgtgatcttagcctggggcgcattgggtttcagaagctgggggcgggcaggagccgacattcctagaacaccttgttctgtctggcacctctcatagaggatctgacactcactccacatccctgagaggaaggtgcgaccattccaaatgaggaaaccgaggctcagagagctgtgcaccctacccagtgccgtctgccccaggaccagctctgcgcccaggctgggtctcccctagtggcctgggaagtggtggccctgaggctgactggggccccttgggggctctgtgtgtgtcctcagacccctacctgtgttgggctcaccagctgctctcacaagtgaccacaaggttagtggcttaaacagcacataaccccgccgtgtggttctggggtccagagtctgatcggtgttgcgggctaccttcctccctgggctggcattctccagctcctggggtgcctgcaccctgtgcgccttcccccgtcttcatagccagcagcgaagtgtgcccctctcctgcctcccttcttgccttgtaaggactctcctgacgccattgggcctactccgatggcccagggtcttctccctttctccaggacctccgtttcatcacatctgctaagctccttctgccatgggagaggacatacaggctcccgggactgggacatgggcaagtggagggggcacattattttgtcaaccacatgaccccttctgttgcgaaggaagtcctggggattcaggaggctttgctaggcatgtttcgacctttagtcattctgtctctcagctcatgacccccctaccacgggctgccgtgggcacaggagccccttcccctccctaggctgctgcttccctgggatagggcattcgaggtccaggcaaaaaggcctaaggggacccaacatccccagaggccctgggtctgcctccctcgtggtcagagtgggctgaaactgcctgcctggcacctggcttgggagaagctggaaggacctgcccctgctgcgtccwtcctctcaattgcatccggcacagagcttcrtcagtgttyacagccagcccgcgggagaggaagggccctggagaagmtgtcgaaatgcaaagcatccccgtcctagttctcctccgctgctcctgcagatcctcccctcctcagggaaggttgggagccatggtggttaggatcaagcggcccctaacaaaaccccacttgacktggtctccttctaccccacctaaagactggggcgtcagagaggtggagattcacagagaagtaactcaaacccaagacagtccgttctccagccaatcaggagcctgggcctgtgctgctaacagctcctcgacaagcagctgtgcaaatcccgccccatcccgcctgggagagggaaggaggagccagtcctgccaagaggcggctcatttggtggaccaggaaatggagggtggcaggaagcccgacgggggccagccccagagaacagtgggagaaaactggaccctacacacccagacaccagactcagggttttccgtggggggggggggagggctgatgacccccgcctgaaggctgtgggaaggtgctctgcggggtggtgaggagcggccgagggaggggacacatgcgctggcatccctgcccacctcctggggaccagccggccgggctgctgcggtcacagaactgggtcccggttctagggctcaccttgtgattgagcagcgggtcccccaggaggcacccactcttcccagctgaagctgacaggcaggctgcgtggcccctgggctgcccgctctgtccctcagggcctgcctggggagcgccgatagaagccgaatgctgggggagccaggagtagagccagcccctgcgcgggccacagacggggtgagctcccagcagcacccgcgctttcacgtgtggttccttcctgtcccccagcggcagtttagaaactgctccaaagcagcttgtctttgagaaatttttcccattatttatcccaggtccgtcctggttggagtcggggaagccatcttgtaatggacggtggccctggcttctcttctctcctcttatatgctccttgcagccctgctcagcagggtggctgtggagagtggggccctgcagaaatgagcccatttcctctgatcccccaggactggacaccgcttgttcgggcccagagtcagagaagcgaattggcaacaatggatgtggccggtgttgckgctgacggggtcacgaatcctacccgggcmcagccctgccatgcggtcacatgttctcattgcaaggcagctgcgagcatcgccgccatcatcatcacggtcattagacccgtttccaccacatttcctcagctgtaccctgggggtcccaggggagaccaggrcatccttttgaattcaggaagcttaatgctctcggacaaaaacagacctctgctctgccccgtcataggaagstttgcttttcctctgtgtcatggggaagagtcagcgtcaggggatttggtgcctgtatgcctggatctgagctgccggagctgtaggggctgccccagctgtggagcaaggaaggaaacggctgcttgctgagcacagaaatgcattaatttggtcggcagtcattgtggatgccaggcctcggggtaatgtgacccaccgtcccagtttgcctggcactgagggtttcctgcaatgcaggctaaaagccaaactagccctgggcaaactgggatagttggtcaccctgggagcagggacagagcagagagcaagacaggtgctgcctgccattccagagcactgccctccttctgcaatgctggccacacaggagagcctgtggcaggagtgctcgctctggctgggtcctctctgctcttcacccctgcccccagtctgggaggtcaagatcatcatcccagtttcatagatgagatggagggggcaccagttgtcaaacggcctttcccagggtgaagggaagtcagaggcaaagttgggactgcagcctggcctcctgctccgacagggtgtggctctgcccacaacccctgccaacccctaccaccctggcctcacacctaagtgccacacattccttcccctcttcttagaaagtagcaaagaaaggttccaccagcagygttcacagggacagctggctccaagccttcatcagctttctcttcccaaggggttgtacagagctggggctaggaagggttaaacaggcaggccagcgtggctctgcccaggagcccacagaccagtcctctgctgccccagcagcccacacagttctctgcaaaaaaacaaaacaaaacaaaaaaaaaaaacagggcagggtggtactgagccaactacccttcactgatttgcacataatcgtatctttcccttaatggaaccagcaaccaggctgccccatctgctctctccatctccccaccttttattcaagaggctcagaccgcgcctggttcggttcactgttcaagaaacatttactgaggcctggcttgggtggcacagaggtagaggagggagaagggctggtgatggattggagcctccctgtgctgggttgcacagcacagacrggtaaccaaggctggagacgaaagccgctgccccaacagcactgggcctcaagacaaagtccctcaaatgctcatgggtactgggacgtgctgtgactgagctcctcacagcaagaatatgaacttgtcacaactgttagcattagaattggctccatgttacagaagaggaaacggaggcccaggaggtgtagtgacataccctggggtcccatagatagaagcgctcaagctcaggtccttctggtcctaccttctggactcagcaggacagaccagctgggagaacaaagagcccgtcttgatgctgtctgctgcacatcaggcactgctggaagtactcaggggcactatacatagcccagtgagcagggcctcaggacccccaggtttatcccagcctggtcagactcagtgcaggtggccctgcacatccagaagtgtaggatgcagcaaaagctgggatttgagggcaaatcatagccttgaaaaacactagaatagagaaaggtgtcctttcytccaggaagccttccctgatgccatccccacagtggcacagagtgaagggctacttccctgggccctatagtgggcacctgttgagtgctgtrtcatgcagaggcttggcatgccccagctcttggctgagcgttccttctcccactggattgtgagcttgctcaacagtgggtcatgctcatcacactggctgcaagggccagcagccagctaataaatcttggaatgaatgaatgggaccaaatggtttctgcagcccctttcagctccagccctgaggatggggaatgggcacaggcctccagccttcctggagggcagtctgacctatcagcctctcttagaaatgtttatttctcttgtgccacccatttcatctgcctcactgttccaggaacataaactcagaattcagacasagctcaatataaaaaggtgtgcatcagtcacttacactggaaaacagtggacacgagccacattcaggtggctccctaatagcacaggccatgtcctcatctccttatcataagccacgcactgacttctctcaaatgagaaaataaggacgcactggacatgaatgtttcagaattgcgtacccttaaacctctctggcacacgggctatggagagcactgatgtcccaggagtccttcttcttgtgccttggccacgagatcctctgctgcctgccaggcccccacagcctccctgtgaacccaggaccctggatggcagaggagacaggcctagaggctctgagccaggactcgctgggaattgggtgtggggactttcaatatcctgtcccctctgcccccatcctcttcaggggtcgaaagastggcttggggtcttagaaggtgctttcctcctcacctgcgtgtgagggcagtggaacccaggcaggacagcaggaggcccaaccacacctgaagttgcctgctctggcctgaccgtgtgagccaggcaggccagtccttagaggaccttcctctccaggctgcagtgaggacaccccacagggccctccttgcagccacagaacagaggtcaagggcagagggctgtgggtcagggtgtttccaggatcctccgctgcagggtgctggcaccaggcccggcccaggatgcccgtgactgtgttaaggggcagaaggggtgggagtgctcttgtggcccacctgctctccctatgcgtgtcaccatcatgtcatccttattccacctgcctgccttgatagcccacagcacaggatcagccacggcagaccatggggctcaggctggctcccagggccacgcagtttgtacttggatgacatgaagtcaaattgcaggctgcgggacctcccacttccaggacctccacaacagggccacagcaggtggcctttgcccagcaggaagggccccccaccccacatcttagcctgctagggctgccacagcgaacgaccacaaactgggtacttgaacaacagatgtgtgttctcagttctggaggcaggaaggctgagaccaaggtgctgcaggaccatgggaggttctgggggcttattcttccctccttcagttcctaggggctccagccacccagggctccttggctcctgcccgtatcctctagtctcagcctctgtctctgtctgtgcttcctcctcttctgccccatataaggacattgtcactcactacagggctcactctaatccagaatgagctcctatcgggacctttcacttaattacatcttcaaagactccccttccccaatacggtcacattctcacgtatcttttggggatcaccatgaaacctgccaccctgatcatcagctcgcttccctgagagagggcacactctctccgcccccaccccaccctgacctcagcctccttccttgctgctgcccagttaggaggcgtcctccttgtctgcaagctcttggggcatgtaagcaaggaagggaagaggagrtgaatccatgctccttcgcccaggaccagctccctgcctggcagggtccaygggtcccagaaccgtgccacttccctgagcacctgttctgtgctgagctgtgtgtcaggcaccctggacaggctgacagaatgaagaaaacacagtgcagccactttatagggagtgctggagcccactgtgcattcctcctggggaacgagatcaagacaccacctcctggggtgtgtggtcttgcagccactggaggagagggacctcgggcctgcctgtgccccaaagctcacctgacccctgacctgsggcactttagggcctgtagggccccttccacgccctcgcctctacggtgtcagactctcacctggacaggagtccctgactcactagagagctcctccccttcyaggtgggctgtggcaggaggccctcccagaggcccctccattggggtgcagaccccttgagtcatagctctagccaccacacccgtctttgccaggttcctcttccggagaccaggaactggtcacacatctgtgtccccagtgtccagcctggcagggagtgggtggcagccttgaagagtgaaggagggaagaaatgaatgaatcagcgagtgggtggggtaggccggctgggccgtgcaggccagcccagcccccgacagtctcgtgtcccttacagatgtgctggtggacggacagccatgtgaccgcgaggctgtggcggcctgccaggtgggcgaccccgtgcgcctggaggtgcggctgaccaaccggagcccgcgcagcrtagggcccttcgccctcactgtggtccccttccaggaccaccagaacggcgtgcacaactacgacctgcacgacaccgtctccttcgtgggctccagcaccttctacctcgacgcggtgcgtggtggtgtgcaaggcggtctgggagcctctggccatgtggtcatcatccccccttccctgggtggtgggctttggggtcagcatatgtccagcagacgatagcagcaggggttctgtggtcacgtgtgcacactgagtctgagtctgccccattcactgcaggaacttagacaagctcacctgtctctcagtcctggacagtgaggccctcagggttggtgaagcaggaaaatgtgcagggaatgggagctgtgcccaggacagggggctgctccatgattggaccctgctgtggcatcactgtgatgtcactgtcacccatcccgtgcctgccgctccttccacggaaaggctccagccctacgccctcagcccccacctcccacctcctacctctcaagctgcctctcagcacctcactgtcaggccccagcacaggctaacattccattcccctctgccccaacctctccctcactccctcccacactcctgaccctcccacactcctgaccccctgagcccccaaacaattcaggaatgggaatattggcagctcctttccaagatgaaaactggctcggagaggcgcagtgacctgctggagggggcactggagccaggcctgggcggccctcgcttcccccataacacctatgtccaggcagattcccaggattcctggtggctttgggtggcccctgctgctgaccagactgatgtgtctttctcctccctgctcaggtgcagccgtccggccagtcggcctgcctcggggccctcctcttcctctacacgggagacttcttcctccacatccggttccacgaggacagcaccagcaaggagctgccaccctcttggttctgcctgcccagtgtgcacgtgtgtgccctggaggcgcaggcctgagcccgcctacttccgtccctctttctgcagggccagaggtgaccctgcctggcctcccacaccccctgcaatgagcaaggccttcactgcagccccatctcctyctcctccyccagacccctcccagccctctcctcctgttcctcctgtagcatctttgctgggctacgcagaagccccggacatggcagccccaccccatgccacgccccttcctacactgttccctggaccatacacaggctgaagcagaggaaatcccaaagcgggtgcccatccagcccaggtcccaggatccctgcacccatttctgtgacctggggccccagccgtgctgtgctgctcatcccagcagagggacctccctcgtccagcgacttccctttggccatagaaagaaatggtgagcatgagactgggcacagcctgagggcgtgggcagcttcccaccctccctgggccttggaatcccccaaggctggttttcttcctggagacccccatgggcaacttggcaggagagatggtgccgtaggaggtcgtggatggttgatgccaagagaggccctccacccgtggtgggcaaatgtccaggcctgggctggcagcccagggctgtttctgggtgctccctggccccagggtggcgtctggttaccatggctgtgtgtgtccatgtctgcaagcagttcttcaataaatggcctgcctccccctccctgcctccctgcatctgctagcccagtgcagtccggggcccccacccagcccgtcagcccccacctcaggtggctggcttcccagcagaagccggacccaggaagggacgggttctgagttagagatctcacataagcaaacgctgagacaggaatctggtcaccagcagcttgtctgggaggtggaaggaggcctgcaggggagggagatcaccagtgaaggagtgtgactgggcccgagctgccgccacagtgggcagctggccctgcgttcctcagggaggaccggagagagaaagcacacggctcacatctcccttgagggccagagctggggtgtgtctacactacccacaagagtcctgttctgggggcaggcttctggctgtgttgacccttagctccccaggtcccagggaggataaacagcccttggtccccagcagataccaggctcgtcaggtgcccgttgggcactgaaactcccatggagtattgggggacagagagcggggcttcctaaaggccagttggccaaacaggcagagccaggaagtggctgccctggcctcccatggggcagagtcatgttggcatcaggaggcctgcggggctgagggaacttcctgaggacctgaagtcccaggcccaaacctccctcgctgggagcaaggtcaccctgtggcctccggcctaaggaacaaattttttgttccatctgtggcctcctgttgtcgctcagtgaatgatgggagcacactgtgatgtggtgtgggctgggggcatgtgggggcgggtgtccagtggccctcagttcctggagctcattcagcatctgctcgaggctccccagggaaggcagccccagaaggtctggctgcagtagggggtggagaccccagggcggtctcttcagcccttccgttcaggatgcctcagcgtagttgagggcctggccacctgggctgtttctgaatggaacaaacagcatccatgtgtgtcaacctcaacagagcccaaaaatacgccattgaatgaaacaacacattgcaggatgatgggctcagcccaacctcacttgtgtagacaatgtccccccaaattataaattttctatgcctcagaacgtgtctataacaacatgtttaaaaggtagaaaggatacacatcccctgtagaagagtgacctgaactggagttgcatttgacatctgatgtcagcatgagggtgctggtcaccggggacttgagtacgtactttcctttcaaaagcacaatagatcaagatacaggtacacacatagctacagatatagatccagccacagatccagattagatatagatgcatatagaagcctagaaaagccaatatggaaaactctggcagtgtttgattctgagtggcaagcatattggtgactgtaattatttcttgcagttttctatattttttagtttcccaaactgcaaaaaatacccacaacagttaccagagaaaatgctggatgccacaagaaggaagaacctcaaggggcaggaggcaaagttgtcttcttggaggagggggtgttagaaataacccaggcctcctggaaaatgacccaaatacagcctggctctgccagccccaggcccttccccacccccagggcaccctttctgtcccagtagagaaggtgacctggagtcaggccttgtgtgtgctccaagcgtttggagctttaccgtgggatgtggggagccaggggtgttgtttgctggcatttctgtggctgggtctttctggctgtggagctgtgtttgtgggcagtggctgagatggaggacctggggcaggtgtctcagtgacagcgcagtatcctccagcctcttccagggccccacgctactggctacctggcaatacagtccagcagttgctgcttctctaggcccctggtgcattcagaaacctcctgaaggccagcggagggtaagccaggaacagatcatgtccattgcacttcactagctgagcgagttggttctgcccttctgatccttggtccctcagggccaggacaggcccggtgaccccataatcatgcagccgtcatgctccgtcatctgaaattcacaaggaaggcaaggattcaaaggaagatgtctgagatgctgaactccagctcagccacttgtcaactccttgaccttggacaagttacttaaattaagccttgattttttttcatctgaataaatagagataaaaatacttatttcatggacactttcatatcagtttatttgatttaacctcctagatttttttttagcacatgatagcaacttcttaataaatactgggtcccttctcctagccttcccattgctgttctttttaattccatccacatgtcctgtgcctgaaatatcctgtgccatgtgcctgaaattccattcttctcctggaacccttaacaggccacattgctatgctccgttagtcccctgcatggcttaatgtattaggtaacatgaagcatgtaaggaagaactttctaacacaggtgctgaaatgggacaggaaatgctgatggagtgagctctttgtcaatagaagtattcaagcaaagtccggacctgtagatggtttcaaaacatgtaagcatcatttggggcttctgagcctaccagccaagaaattgtcaatgatgacttgttaagaggtatttctgatcccagtaagcagggaagagagagagatgtatgtgaccacatggctcttggggcctcaagcaatgtcttaagacacaataaattttgatcaaaaaaggctttcaacatgaagggctagagatctagactaagggtctaggctaagcctcttactgaaaacacatttgtaagtgcatccatgacccggcaggagagtcagaaatattcaccccagtacctgtgtgtaggcaaagtcctgggaggtgagctgtgcactgatgccaacttccactttgaggggttttgccaaagctggagtatcaatgtcttcagccttccaaaactggaggaaagatgacaaagctcagggcccactggctggggaatcgaatagatgactgctccgcatcaatttgagagcctaaagattacacctttagtaaaggatgaactaaaaataatcctcttcccaccctactaggagagtagatataacacttccctgtcttgaccctttgattccatcttgaccctttgattccatattgaccctcccatgaatttgcagtcccaaattacactccctaactgcctcttccaaaccttaagttgttaattaatttcaaagacagacagcactccataatacaggtaccagacaaagaaataaacacatcctttctggaggaattcatttttatccaaaaacctgcaagagtttctatgaggaaaatgattatttcagagtttaaaaacaaagaaaatcatgaaatacacaaggaagcaatgcatcatgagtgagagctaggagagacaaaatcagcaaatgcagggttgaaaaggaatcatactggacttatcagacatagactgtgcttaacatgttataagaaatgaaaaagataaaaatgggtaaagagctagaatatcataaaagaatcaagcagaacttctgcaactggaaaacagaattgatgtgaaatatttaatgaatagctgaaagagcagattaaactccgttcaagacagaactagtgaatgaaaggtagaattgaagatgttattaaaaacagaaaccagaaagaccagaaaatatgaaagaaatgtaaggaaacatggaggacaaagtgagaaactctcaaatatatctaattggagttcctggaggaaaagataaaaaaatggagaaaatgcagtattgaagaaacaatgactgagaactccttaaaactcataaggataaaaatccacagattcaagaagtcaaagaaattcctagtaggataacatttaaaatacacagttgacacatcataatacaatttcaggagaccagatgcaaagcaaagggatgatttttaaaagagaaagacaagaaaaattacttccctaagagtggcaattaattgacagctgacttctcaccaagaacagtggggtccaggagttagtgaaataatatcgagaatgtgctgagcaacaaaaatacttttcaatgagtaaaataatgacattttattataaacaaaagcagagttttccaccaccaaaacttctttaaagggaatttgaaatacaagtagaaggaaattgatagcagatggaatgtcagagatgcaagaaggaaggaagaacaaattcagtgatacatatgtcggtaaatctaaacaaacatttacagtacatgtaataataattgtgaattgttgagttacagcataatagaattaacatatatagcaaaatagcacataaatgttggtgaggggatgattggaattaaactgtgataaggtcctttcatttcaatttcaaaggtttaggaggagggtaaggatattgattgacttagacttgggctttggtgctttatttatgaaagtttcagccaggcatgatgtttcacgcctgcaattccagcactttgggaggctcaggtgggaagatcgcttgagcccaggagttcaagaccagcctggacaacatagcaagaccccatctctacaaaaaatttaaaaattaggggtggtggctcatgcctgtagtcccagttactcatagggctaagattggagggtcacttgaatctggaaggttgaagctgcagtgagccatgattgtaccactgcactccagcctgggggacagacagaacaagaatctgtctcaaaaaaaatgtgtccaggtttccatttctggagtaactatcaagaagatgaaaaatagcatgaacaacttctaaatttgtgaaccccaaaactggaataaggaaaactaatcagtctaaaagaagtcaagaaaggaaagaagaaaaactacagaaagaaatagaaatggcagaacaaataaaaccacaaccctaatggtattaataatactaatagtgatgcttacacttaatatagccatatgtgttaagcattcttctaagattatatatataaaaccttcatatgtatgctataaaatataaaacaagtatgcttataaggaactctctattccttccttaggagatatatagatatagataagcttacttacaaagtctttttttttttttttttttttttttttttgagatggagtctcactctgttgcccagactggagtgcagtggcacaatctcagctcactgcaacttctgcctgccaggtccaagtggttcttctgcctcatcctcccgagtagctgagattacaggtgcccgccaccatgcccagctaatttttttgtatttttttagtagagatgggatttcaccatgttgtccaggctggtcttgaactcctgacctcaggtgatccatccaccttggcctcccaaaatgctgggattataggcatgagccactggtcccagccaaaagtctttaaagtagatgttgctattatccctgtattacagtggagaaaaatgaggcacagagaagttatgtaacagctaaaaagtgattataagttatggaaataagtacctacaataaatgaaaatatactaaatctgttagctgaaagatgacaaaacccacaaaatcaggtttatgatgtttacaatatagattaaaacataaggatacagaaggttgaaataaaatggcaagaaaatatgtaacagaaaagtcctaatgaaaagaaattataaggcacaaaaaccaaaattactctagaaataaagacaataatatgatgataagagtagtaattcaccaggaagctataataactccaaatttgtatgcaactaataatacagtgtcaaatacataaagcaaaacctgacagaactataagga

SEQ ID NO: 96712 - DNA, 26940 bp, Homo sapiens
gtatgtaggctttgcctctggcggactgctcaccttcctgtctttagagttgaccccagcccagatgcaaccccaactcatgttcacctgttggcagttttgagtgccgagagaggaaaatccgtatcttatcctcgctcctctcccccctttccaaaagatgttcttctctctctacacaggagccagtggggtgggtcgcagccacattaagaatgccctgctcagccagaatccggagaagtttgtgtaccctgtcccatgtaagtagctcttaggcaccttggaggggaggtgacaggctggtaccactcgccatctgaaataccatagtgttattttattattttttaaattattttattttaaatgattattaaaactaaacaaaatatggaaagataaaaatttgtgcccacaattcctccacctaacagaataactgttttcttattgttattcgtgctgtttgtctacataacagaagctatagtaaacattttgatactgccttaaaaattactaagtattaaagtttatacatataactttgtcattttactttttaaacattttctcatgttcctctgcaatttgcctaattctctttgagaactatcccactcttgatgttcaggctgcctctcattttcatggaatgtcttctaaatcaaagcagtgcctaggaaaggcccaaacgatctcaacagcagtcctagatatggagaagagtagcgccagtgatcaggtggagaatttgataactcttccattcccagaagtgatgctgcatggtatagttgtgtatgttcccagaaagaaatacggtgattcctcacttaatattgtcaataggctcttcgaagactgtgactttaagtgaaatgacatataacaagaaccagtttttttactcatcaacaatacaatgaaatgaagttgaactaaaccatgttagtcaacgaccagctgcatgtgatttcacttaaagtcacattttctaagaacctactgataataatattaagtgaggaattactgtactgctaagcaaaatagaaaaccagattctaaacctcatattactattttttaattctttcttcattttgcttttttacacatggatcattgagagttgtctcgttgctggagggacataagagttattccagtgtcacattaggagcagaaagagatggccccaggagtgagtggggaagcagaaataaccagtacaggctcctccttcaagagaatcacatgtggttgtagattgaggggaaggggccagttgagagacaagtgtgatccggaaggcaaaggagacagtcaatggaagatggaaagaggggaggttgggaggattgtgtttcaagctacaatatctggagcatattttactgattagacaatttatatgagtaatagaaaatagtccaacttttaacaacatgagctgaaactaaaccaaagtactcttctttccaagtcatgaaaaggaaaccttaaatatatttccaagaaatcctgaccatagtctgtagatctgtttttaaaatattttccgctatcttcatttctaagtttcaatattcctagatttggtagtttgagagatgtaacttcatttagggaaaatgataataggaattttctatgttaggctttgccccttaaaaattaaatgtgtcctgggcagatggagggatttcctggtgtgcatcactttctagcatcagctcttcaggagcccacgggaggaacccctgtattaaagtcaatgcaccaaaggcagctagggtttccatacagacaccatggtccaagccctcatgaaagggtgaggacctggagtttgtcggggatttgggttcttgtacacagatacaacacggccgccaaggaagagtgaggaagatgggaaggagtaccactttatctcaacggaggagatgacgaggaacatctctgccaatgagttcttggagtttggcagctaccaaggcaacatgtttggcaccaaatttgaaacagtgcaccagatccataagcagaacaagattgccatccttgacattgagccccaggtgggtaggcatggaagggcagggacagatgggctcagccacacaagggatggcgaagacagtgctccttgggaatcttctgggggctcaggattgcttcagccttttaatggggtcagcctggaacaagaacagtagtactgggaatgatggaaagttgtattggggtaaagctcaaagctgcttattagaaggaatccattatgacagctatgtaggtttttttttttcactttccttttcttccttcccccccctccccgccgcccttcttttttttttctagaccctgaaaattgttcggacagcagaactttcgcctttcattgtgttcattgcacctactgaccagggcactcaggtgaggagaggttgtgcgcgatgggtagttcactttctccgggcctgcccatactgggacctcagtccaggtcattggccagagtgctggctggaggtcacagctccagctgggcttcttcctccagggccaagaagccaaagggtatgcacattcgttccagctcctaagccactagctaggccagtgcccatgctagctaacagggacaaaacaaaccagacccagtcatcgtcctggaggcacacagttccaggggcagagatggacagttgagcagatcctgatactggtgggatgcaggctctggcaggggaagctgtgatggacagaggtggcactgaacccgccctggggtgcagtatggctgtggggaaagacagagaggccaggaatatatcaaaaagcctaccctgctcctctgcccagccctacccatgcactttgctgcactgtgcttttgcattgaacaatggacacctttccctatcagggtgtgaggaactctttttctctatagctgcttggtcttctgctgcatgcatgtgtaatactgcagtcaatagccctgtgcatatagcacatgtgtgcaaatatatctgtaggaaaaactccaagtaggatcactgggtccaagagcacacacacttagaatttggacagggaccgccaaccacctgtgagactgcttgtttctctttgcctgcagcatgttgtcaaaattttctttttttgccagtctactggagggaaaaatagtatctcatatttcttttttactaaaagagatgatcaggtactttttcatatgaagagcaatttgtattgccttttctgagaattatctggtcatacccttagctcatttttctgctgagttattgacctttgatttataggaagtctatattagggtaattagccctttgtaatatcagctgcaatttttttccaatttggcatgtctttttgctatgcagacatttttacttttatgtagttacatgatttgtctttcatggctgcttggttttaggtcaaagacagagtcctgagatatatatacacacacatttttaaattttgttttttgtagaaatggggtctcactgtgttgccaggctggtcttgaactcctgtgctcaagcaatcatcctgccttggccttccaaagtgctgggattacaggtgtgatctgggattagaagtcacctttatctgactgggtgcagtggctcacacctgtaatcccagcactttgagaggccgaggcgggcggatcacctgaggtctaaagttccagaccagcctggccaacatggcaaaaccctgtctctactaaaaatacaaaaattagccagatgtggtggcgcatgcctgtaatcccagctactcgggaggctgagacacgagaattgcttgaacccgggaggcggaggttgcagtgagccgagattgtgccactgcactccagcctgggccacagagcaagacactgtctcaaaacaaaacaaaacaacaaaatcacctttatcttcgttttaggattgcagctctggtggttgttgaaatggctcttccatgttcaaagggcattaagtgggagatgctggtgaagtccatgctgtctctgcatagctattggtcctccagaggactctgattagtcagggttagcttgagatcctctgagaattgccatggtcttttgagattgcctcttcatgccctacattaacattctttcacaatgtcttctgaatttgactcgtcaagtatgatgcacagctgagcaacgctaacaattgctgtttaaaatctgtcactggcctctctgggctgggggtggtgcagcttgcttcatctgtggctttcttctttgcagacagaagccctgcagcagctgcagaaggactctgaggccatccgcagccagtacgctcactactttgacctctcactggtcaataatggtgttgatgaaacccttaagaaattacaagaagccttcgaccaagcgtgcagttctccacagtgggtgcctgtctcctgggtttactaagcttgtagaatgggggaacccactgtatgcccctctccagcatttggaattccacccgccttgctttaagacaaacagggctgctccaactagttttgtgtcagcttccagctctctgcagctatcctaattcagccagtaaggttcagtcttcttgctcaggctcctgaagggttgattctcctgatagatggggccccactgatctggatttgaaaaggatttctagaaattgggggtaagaagtactaccaaaatgtaactgctaatcaagggtgatgcacagcaaaagcaatggaccccatccctctaaagcctgccctcctttgccttcaactgtatatgctgggtatttcatttgtctttttattttggagaaagcgtttttaactgcaactttctataatgccaaaatgacacatctgtgcaatagaatgatgtctgctctagggaaaccttcaaaagcaataaaaatgctgtgttgaaatgccaatgaccttgtaactctgggtttccacacaaaaagaaatgtggcccatttcacttaagctcctggacaacagcattaacacaagatgcctctcttgtgttcagatgataaacactggtgccctggaagagtccccattctctgcccccactgcagggctctactggctagtgcccatgtagaaaaacacccttaaggttgttgtagctagtggagcgctcattgtgggcacatatttagaacgagagaaaatccaagcctggggtcccgtggtacagtggaggccggtcgctgagccagggctggggcccaccctgcatgcctggctcatgatatggctacagctcagggcctcgcctcgctgcatccaagagcgcttttttttttttttttttttttttttttttgagacagtctgttttgccaggctggagtgcagtggcaggatctcggctcactgcaacctccacctcccaggttccaggggattctcctgcctcagcctcccgagtagctgggattacaggcacacgccaccacacctggctaatttttgtatttgtagtagagatgggttttgccatgttggcccaggctggtctcagactcctgacctcgggtgatctgcccgcctcagcctcccaaagcactgggattataggtgtgagccattgcacccggcctctttcttggttcttaataccaaatcggaagcaaccctagacctttcttccactaatctgtcaccaaggccttcagattcctgcatgtccccaccctcagcttcgttctcccgactcaccctgccccccgctcctgccaggcccactatgtataaatacattaaccctctccttctctgttcttctagagatcagtggttttgtggtaatcactgcctctgagtacttgatctcacatcagatgacagggcccaaggtggattgtgtaagatacagaacaaaaatgtaaaaaccagaaaacaaacataaaagcatcacatttcaaataggacataaaggtccctagatttttaatcaaaatattttacaatttttgctctgctagcatgagatcaacaagaaaacccaacaggaatacataaaaaacttaacaagttgactttaataagtaaaaattacaacattcttctcccagcaatgaacaatttcattttttaaaagtaaacgaggcctaaaacaagagggcacaggaacaagtagtcagatggatttaggtgagcactgtacacaagctttgaggaagtgcaaaggactgacctctaggccagaacaagatggaaaactaccaggcccatcaggcctataacccagacaccagcatggacaaaactcagttatactgaattcagagacaaaattcagtgacactcttctaccacttatttagggttctacagcatttcactgagcagacttagttttttgtttttgttttacaaaccttttaaacagaggggatttaaaaaatgcaaactaggactacgatgttaagacaaccactagcagacagctgcggacagttactgggtctgaaggtgaggcttcccaactcaaacagagaagtcattgggataaactctgcctctttcatctttcaccacccatatccttaaaacaggacaagatgggatgaccacaccaggtaacatcaccgaggtctcaaagtagcagctaaaatgtgccagaactcttcaccctgyctaggacctatgttccactctctcagcaacaaaaggatctataacatgttttctcartaaggctttagtttctcctccagcttcaagtggycttcactactcagaaaccaattctacctcttttgctttcttcttcttcttcttcttcttggtggtatcactgtcctagaaagaaagagaatgaaagctcacagataccatccactaacaaagctatgactctcccagaaggaaatctggtaaaggtccacagtcaagcaagcctttttcaggacctgtaaggatattttgggttaaatgctgcatgtgacacaaagttctgtaaacctttcagtgacaccctagtggtctacttttggaagtggaaacattcagatcaccatcctacacatcctctccacccaccatcaatagagctctaagtataagtggtagaggtcgggtgcctctatctgtccattccacagggagggcaaaagcactccaggaacatggggaagcactaaaggcactcggtggcatcccacccccaggccacagctcctccaagaagagtaacaaagctggtaccacctgggtaattctttccccacgcagggactaagccagcccaaggaacctgaacgtgtttccacacaccccatctccaggctcrgccccgctctccagaccagctttggccttyttgtccttcttactcttcttcttttccttcttgatcaactgaggagctgctggaggagtctcgtcactttcactctcactctctcgcttccgctgagatgaaagcaattggttaagtgttagatcttgggcaataatggacaagaaaggttcagtgagtcaaaaggtagcaaggcaccaagaaagatcccaactgaatctaacaggaygttttctgactacaaacccggacagggccttagtttactgaggatttgaagacagtctcatcccccaaatccaagaagccttgaggcaggcacaagagaaggagcacagcagcagcacggggcttggggtggaaaggcccggaggagctgtttctctcatgactgcaaggacctctcacagaaagcaggcaaagcaggaattcacatctgacaagtcagaagctcctcccacacagcctgtgcaggatactcagtaccgcccccggtttctgagtgcagacctgtcattctgtgctctaatgccagcagctccatggggtggagttgccaacccatgcttgactgactctttcaacactgggtggtgccaggttaagatgcaattctgctctctgctgaattttgtatggcctcgaatgtccaacagccatggcctctgatttcaacacatctgtcctaccatttgacccagggcgggggccagaattgacacacacaccaccacccattccatcactgtgttgctgccatagctgaggtaggagtcgaggcccatctgattcctgagcccacattcctcctcccagcagataggacagagaatacaaatcagaggagcctgcagagcccaaacaagcaccccagggtatgaggcagcattacctgtgtatgcgctgcacctctgatgctagcgtatatggctggactgcggacagtcacaaagtaagacgaatgccagtgcctcttaggattatctccctaagcacattccaaactgaggacagcatgccactcaccttcgcagtttttgctgcttcggcaactacctgcggggcttttaccacttcagcaaccacctcttttttggcagactcactgaaaaagaggtagcaataggtcaaattcactgaatggctttccagggcagtactgatgttatgtagtgttatctggcaagtctaaagccaccatcaaaatactgacgctggacagaagaactcaccacttactgttgcagactgactccctctagagtcccacgagccagactagaaagggataactgtctgccgtgcaggcccacacccctaactggcctgggcagccaaaatctcacgggagctgaagagctggttcctgtggtcctgcatttagcaagtttgccccaaaccaagtgactccccctcccctgggctctacaacctccatgctcacctgttcctcacctgttgtccatgtactcctgcgtccagatggcaagtgggctctaccttcccatcctcacctgttgttgacatactcctgcatcaaggcagcaagtgtgccrtctctacccaccccggctctgaaacatcctgccctcacctgtagtcaacatactcctgcttccaggtggcaggtgtgctgtctgtgggcttcyyatgcttgtccagaaggccctgcttgatcatcagcttcttctgacttgcctggtggaacatcaaggtgtcaacattagaatggtgtcaatgctggaagcgggcatggtgactayaaagaatagaacaaggttcctccctggtgtattctcagcagggcctcaaactcctctccagagcattcagaatttgcccactaactccaacacacacaggacttgttgaagatcacaaagcttattagtgagagcctctgcagacataacgtccccaccgcagccactctacttttttgcctttgcacatgctgcttgctcccaatgccctgaactctcccctcccctcttcacttcaccaacacctaacccactcttcacaccggtgtggcttaacagacaatcccttgaccagactccttgaccactgtggacactccaggtgacagacacctctctgcactccttggtagccactaacgtgcatgaaattcgccattccactgtgtgattacgtgagtaatgcccaactgtttcccctcattagactgaaatctctaaggcccaagacagggcctgtttccactcatcgacaacccagagcccagcacaatacaaggctgtggtggtgaaacacaccaagagctgcccaagtattcaacaatgccaaacaaaagaacctggcaggagccgccccatccgggagggaggtgggggggggtcagcccccccgcccggccagccgccccgtccgggaggtgaggggcgcctctgcccggccgcccctactgggaagtgaggagcccctctgcccggccgccaccccgtctgggaggtgtgcccaacagctcattgagaacgggccaggatggcaatggcggttttgtggaatagaaaggcgggaaaggtggggaaaagattgagaaatcggatggttgccgtgtctgtgtggagagaagtagacatgggagacttttcattttgttctgcactaagaaaaactcttctgccttgggatcctgttgatctgtgaccttacccccaaccctgtgctctctgaaacatgtgctgtgtccactcagggttaaatggattaagggcggtgcaagatgtgctttgttaaacagatgcttgaaggcagcatgctccttaagagtcatcaccactccctaatctcaagtaatcagggacacagacactgcggaaggccgcagggtcctctgcctaggaaaaccagagacctttgttcacttgtttatctgctgaccttccctccactattgtcccatgaccctgccaaatccccctctgtgagaaacacccaagaattatcaataaaaaaataaatttaaaaaaaaaaaaaaaaaaaaaagaacctggcagggcacgcaacccagtaccacttacctttrgrcctaaaccccacttccgagggtaagtgtctctctccatgatcactctcttgatcttggctactataccatggtcgcaggtagagatgaccgctgtggtyrttaatgcaatagctacaggcattgaataaagaaaagaattatttgaagggtgaaagaattgataattgatgagccccaattctactgttgtatgccactttaaaacttttaaaactctgagctactactttaattggggttacctttgctcaggatgtgcatatggaggaaatactccattatgagaaggaggcctttgaaatgacgttaaacttctgaagttaaaaaacacctaaccaaagcacctaacgatacacataacaggcttgcagctcaagacgtctataagaacggcatgcacactccctttggggccacagaacctttgaagttttaaggattccttttctgctgctgtccataagccgtggctgccttgcctgctcacagagctaaggaatcctgatgacatgcttacttctggtacaaattagacccattaaatgaatagctctaaggttcattcactaagagggtgcgcagagcatttaaagtcttaagagacaatccaacagtagctaagctttcacaagttaaaaaacactggtactttacatggaaccacaaaagactcaaaatagccaaagctatcctaagcaaaaagaacaaacctggaggaatcacattacctgacttcaaattatagtatagagctacagtaaccaaaacagtatggtactggcataaaaacaggcacataaaccaatggaacagaataaggaacccagaarcaaatgcacacacctacatttaactcatttttgacaaaggtgccaagaacatacactgggtaaaaaccagtctcttcaataaatggtgctgggaaaactagatatccatatgcataagaatgggagaaaatatccgcaaactacccatctgacaagggattaataaccagaatatataaggaactcagcactataggaaaaaaaatctaataatctgatcaaaaaacaggcaaaagatttgaacagacacttctcaaaagaagacaaataaatggcaaacaggcatatgaaaaagtgctcaatgctgatcacgagagaaatgcaaatcaaaactacaatgaaatatcatttcactccagttaaaatggtttatatccaaaagrcaggcaatgacaagtgctggcaaggatgtggagaaaagggaacctttgtacactgttgatgggaatgtaaattagtataaccactatgaagaacagtttggaggttcctcgaaaaactaaattgagctaccataggatccagcaatcccactgctgggtatataccccaaataaaggaaatcagtgttatcaaagagatcacagtagccaagatttggaagcaaccgaagtgcccatcgacagataaatggataaagaaaatgtggtacatatacacgatggattactattcagccttaaaaaagaatgagatcctgtcatttccaacaacatggatggaactgaagatcgttatattaagtgtaatcggccagtcacagaaagacaaacattgcatgttctcacttatttgtgggagctaagaatcgaaacaattgaactcatggacagagaagagtaaaagaatggttaccagagactgggagggtagtggggggctggcagggaggtagggatggttaatgggtacaaaaaaaaaaaaaatcaggcccggcatggtggctcacacctgtaatcccagcactttgggagggcagatcacctgaggtcagaagttcgagaccagcctgaccaacatgacaaaaccctgtctctactaaaaatacaaaaaattagccaggtgtcatggtgtgcacctgtaatcctagctactcggaaggctgaggcacgagaatcgcttgaacctgggaagcagaagttgcagtgagccgaggtcacgtctctgcactgcagtctgggtgaaaagagcaagactgtctcaaaaaaaaaaaaaaaaaaaaaacaccaccaccaaaaaaccaaaagaatgaacaagaagagtgagactatttaatagcacaacggggtgactataatcaataataacttaagtgtatattttaaaataactaaggtgataaataactaacagtaaaataggattgtttgtaacacaaaggataaatgcttaagatggatgccccattctccatgatgtgattattatgtattgcatgcctgtatcaaaacatctcatgaaccccataaatatatacacctagtatgtaaccacaaacatttagaatttaaaaaataaacatcccctcttacccatgcagattgcttctcctttggtggtgataaccacaatctcctgattgacctcaatgccgtcctcatatcgaabaacacctggaagcataatcttggccccatagcagatggcatttacctgcagagatggcaccaagtgtaaggggcccagctgctgccctccaccccactcccacaccagagtaaaggaggacaacaagggagtggggcctgacaccaggaaacagggatgacacttatagcccactagctgcaaggggcatgagtggtactcagaagagccacctcactgtgctataggtaccactctccgcacattacacacgactcaaaagtagtaaagaagactttcaggttttcaggttctagagactcacaagtattttcttttttttttttttttttttttaattttcaggcagaacctccctctgttgtccagggtggagtgcagtggcacattctcggctcactgcaacctccatctcccaagttcaagtgattctcagcctcccaaggagctgggattacaggcacgtgccaccacgcccagctaatttttgtatttttaatagagacagggtttcaccatattgcccaggctggtctcaaactcctgagctcaagcaatttgcctggcccggcctcccaaagygctgggattatgggtgtgagccaccgcacgtggtccatattttcatttgaaacataaaaatagccttggcattccttaattactcctctctcctccttatgaggagaaagaacagatttactggagatccaggcaataacaggctcttaaagaacttgaraacaagattactgagccctgttgaaccaatcacacaaaagtcttggtgcagaatttataggtcagtgggtacaagttaaggctacctctccagaggttcaatggtacccaatgcacccatctgcctcataccatctccactcacctagacctcttttgatcacattctcccctccctttacattcacccagaagccaatggtttgataaggagaggacatcacatttatgttgtccactgttttgtgactgagttttttcaactattatggtgccatctttcagtatttattacagcctatacacatacaaaaaatgtgaacatctatacaagatttgaatataaataattaccaactacaaacattttaaatatccagaaatttttatccctcaagttagagaaaaagacaatgttttaatttataaaaggccaactctctgatcatcataaaaacacagctcacagccttgatctcctgggctcaagctggtctcaaactccttcctggactcaagtgatcctcttgcctcagcctgccaaagtgctaggattataggcatcagccactgtgcctggcctaatgtgccttatttttaagtatgcctaccattaaacttttactttaaattaatatacttggtttggacttgaaaaaaataaaataaaacccaaggaaaacaataaaaagagcaagcstcatctttggagtacgttctttccaaatataaactcctaacccggaacttactgcactgtctttcataaccagccgtttatgagatgtcaacagcttttccaaagggtaaacaactcgccgyaggtaackctcatccttgtggttatcatacagccactgagcatcaagcacatcatgcattgtcaccatgtggtcctgaaaagcagccatgtatgaaaataattcagtttatttgtatctcagcccatcagaccccaaacttcctaaaactgaatgtcacttgtttactagtccaagctcattatgtyttcagcctcttcagtcctggctcttccaggcatctttttttttttttttttttttttttgagacggagtctcgctctgtcgcccaggtgggactgcggactgcagtggcgcaatctcggctcactgcaagctccgcttcccgggttcacgccattctcctgcctcagcctcccgagtagctgggactacaggcgcccgccaccgcgcccggctaattttttttgtatttttagtagagacggggtttcaccttgttagccaggatggtctcgatctcctgacctcatgatccacccgcctcggcctcccaaagtgctgggattacaggcgtgagccaccgcgccctcttccaggcatctttaaccgttgaagtattagaccccaagcaggcatttttgtaggctgggaggcaaatgaatagaataatactttctacccaatcatctcccttagcccattttaatgtcccaaagtttaattaacagaacagggaagctgccctggactgaactcaacactttggaaagcatctttcccacgacatgaagcaagtggagtgccatcaaaggctggcagatggtaagaaccagctctaaaacttctagccccgtaacacataccttttcactcatgactccagaacgaaccctccgaagctcctgcatctgaccaccaactcccaataacaaaccaaggtgcacacataatgtccgamtgtaggtgycagcctcacaactcacccaaaagattcctaagatacacacacacaaaagaaaagcagcacctactgtaaatacatcactggttgagaaatgcagttatccttcatctgagccaccaagactagaggtgacagacacacttcttaaaatataagcatttgctgtaaagatctgtaattctggccaggcacggtggctcacgcctgtaattccagcactttgggaggcagaggcgggtggatcacgacgtcaggagrtcaagaccatcctggctaacatggtgaaaccccgtctctactaaatgtacaaaaaattagccgggcatgatggcgggcgcctatagtcccagctacttgggaggctgaggcaggaaaatggtgtgaacccgggagacagagtttgcagtgagccgagatcatgccaccgcactccagcctgggcgacagagcgagactccgtctcaaaaaaaaaaaaaaaaaaaaaaaagatctgtaattctgatattagcagaatttttaacacttaagttgcaggtatattcagcatggtatgtttcatggatgggaggaaaattggcattgtcttaaatttacttctgacaacagaaacttctaagcagtcaaaattgcarcaaataaaaaacacatgcaaaacatactttggtgaaaacacttacctttgaacaaagcaccgaactacacaaatgcagaatgaaaacatttcaactccagcagaagcagtcatcataaaaggtgtaaaagccatctcactttactaggcactgttcactttttcaacaaaagataacaaaaactatcgcccacagacaatatcccagctgtagggcaggttttagaaagtcttcaacttcaagggcatctacttttaataagagaacagaatcctgaagaatgtgttcatacccactcacaggcctaatgactcacctaatcttctttcaggatcgtattcaatcattttgctctcgtagatggtcctcactcggagctgcctctttactgcagcaataagtgggggtcgctggaataaggcacctgtcagagtttctagggcctaagaacaaacacaaatgaaaacaaacacctcatcagaatgtacatgtgcagtcactggtccaggctggctgcagcagccgactgaaaaggggacaaaaggagtcagtcaggacagctaacccatctccagatgtttaggggctcagagatccaagtcaacaaagggtgtcctccctacaattgcagacttaccctagaaagctgggtccccccttcaatagcattgtgcagccggacaatccccacatactctttgcctgaaaaatgacaaaagagtagtcaggtgtggccactgagttttctgttttccawatttcttatatgctcagtcactcccattttgcacagcaggaaaagcggcagtttgaccttgtgtttctataaaatttgcattaagagagatttcatggtgatgatgtgggaaagaatgaagacactttctcactgggaattcaatgtactaacagggacagttgggagtactcagtgtagaagctgcgtggaaaaagccttgcaagataagcaggcttttctcagataaaaatgaacgaaggatactttaggcagaagcggtagcacagagtgagaagcctggagtgacaagctgagagctgaacccggacaaatggatccagtcagcttgatgaatacatgcttagtatgtggaattccaaaaagcgcggaccaccaagatctggcaggggacagaacgtacacagaaaccaaaacaatatccttgctttaggatttttttttttcttaatgaagaaatagtttccagcagacaaaacatagaagggaaatacagaaagcttttcactctagccagtccttccctccctctcccacatacctgcactctgttgtgacttcaccaagcgagtggctcgttctatgcacacgattaaacaaccagtcaccttgggatccagmgtaccacygtgccctgtcttctccacccgaagtatccgtcgaatccaggctaccacctcatgggaagaggggttagagggcttgtcaagattaatgaaacctgtcctggaatggaaaaaaaaaaaattaatgtatcacccactcttaatgctccagtgaaacaacaaatctgaaaagttaaaaagaaaaataattcactgcgggtacaggttatatattcaagacaaagctattctggcatgccactgccttcctgaatagctgatgtgaaagcattttcaaaagaaagtaagtttgcacagtgcctcctcccaacacttacctgatatagtccccaatctctctcttcagaggatttkaaccacatgcaagaggtgtatagtgtgttgtccttacattcagcttatcaaaattctacaaagcaacgacacaacacaaaacaaaataccatgtcgtgagcacatgtaaaaaaagagtcagtaccactatgtggcccacaaactggcataggtctgcaagatggactaagtacaaaaactgagaactgttgacaaactcagcaatttaacattgtggggacatgtgttctacaacagtgttgagtgcactgccaattttttaaaaacttggttctcatttcagataccttaaggaatcctgctttaaactgtatcagtgggcacttcccaaagtcaaggatgccagcagtaagcattctcaatcaattgtttaacacttggaaataacgtaaaagcaggcattcatctgatgcacgattttaaccacatacctttagcaaaaggggccactgagacgtgtccaacttagcaactttggattcaggtttgataagaamttcttcagcgtgttgtatttccttcgacaggacagaaatataacctattaaacttcccacccgattttgaacaattccattactgccatggaaatgtatgccttttaaacagaaaacaaggcttcctatgccttttcactgggacctccaagggaaagagagagaagaaatgaaccaggagtacagaggggaagtgaaatgtcactaagatgggtccaaacatttaaagagaaagggggatggcgggtctgtgggtggcataaggaagacaaattcagagacagcagttggtaaggccagcaccatttagtaagctatgcctgaaggacacttggactgtctggggctgtgtcatttcagtgctttttcgaatctacacaatgactaccaatgctggcccattccttggaaacctttaaaaacacttctttcctttagtttgttatttaagtaaactttctttttagtcaaagtgaagtcaaacacattactactcacggctacatcttcttctggcaatgacttccgctcctttttcttcttatgtttctttggcaaaataattactaaaaaaacaaacacaggatttgggaattttccccaagaataaatgaaacaagggtttaaaataaagaycgaaattagggcaggtaggaaatggattttaggtctacaattacagtcacatgccacataatgttttgcaagtacagactgcgtatgtgatggtggcccccataagattataacagagctgaaaaattcctatctcctagtgatgtcttgatgatcctgaccctgtgtaggtcaaggctactgtgtgtgctgtgtttgtgtcttagttaacaaaaaaaaattttttaagaaaaaaattaaaaaattttaaaatagaaaacttataaataaggagataagcagagaaaatatttacgtacagctaaataatgtgtttgttttaagctaagtattattacaacagtcgaagtaaaaagtttataaagttacagtaagctaaggttgatttattctgaagaaaaatatatttttataaatttagtgtagcctaggtgtacagattataaagtctccagtagtgtaatgtctgaggccttcacattcagtcaccgactcaaccagggcaacttccagctcagcaagctccattcatggtaagtgccctcctctwcgggtgcaccacttataaccttgtgtactatatatatataatatacatacatataatacatacatatataatatacatatatacacacacatatttatatatatatataattttttttttttgagacggtcacactctttccccaggctggagtgcagtggcagaaactcggctcactgcaacctccttctccaggttcaagcaattctcctgcctcagcctcccgagtagctgggattacaggcgtataccaccacgcccacctaaattttttgtatttttagtagagacggggtttcaccatgttggccaggctggtcttgaactcctgaccgcaggtgatccgccagcctgggctgggatcacaggcctgagccaccgcgcccggccctgtgctatatttttactgtcctttttctgcttagacatgtttaagtacacaaactctcgacgctgtgtcccaactgcctacagcattccgcacaataccatgctgtccaggkttgaagcctaggagccatacgctacaccatatacagcctaggtgtgtagtagcctatgccacctaggtttgtgtaagagccctctgatgttcacacaatgatgaaatcgcctaacgacccatttcttagaacgtatatccgtaggtaagcgagaaaacaaggtgtgtaaggccaaatgtatgggtcccatggctgggtaactgactgtaggctactgcacgtgtcggcttcccttccggttcaccacgtggctatggcagagcttaaacatcccacagaagcgctcacgcagggggccggaaagttccataagcgaccactcgactgtccccgcgggcttgtggcctctagaactttcttgcaactcggagctctatccctgctccggggtccctccgctccttttcttctcggcccgtttccactacccttgctcccctagtcgcatggagctgtaacggcggcgtccgggctggcagcagcacagacactgccacgtcccacgccaccgcggggtgggcagcacggcagatgtctttcgacggcgacccggaccccagggaggtgagagggccgagccccatcatgccaartcaccgcgaggggctcccactctcgcgcccttgccacggagccagggccgagagacaaggccggcttaaggccgggcggtgaagaggccgacacgccggcgggaaccagagggaggcgtgcgcgggccccgataccatccccccacccccgttccccgagtcgcccggagttagcacggcccggaagcctgcagcccttaccttccgcatccgccatgttaccctgcaccgcgtgcgtgccgcccggtccacagccgagggaacgaccgcagactcccgccgccttggtcccgtcaggccgcgctgctaggacccacccacccgcgcactgccctgtgcgtgccttgccgcggggcgggaggaggcggggccatcccgggggcggaatccgaggcgcccgctggtcgtctgcgcaatgcgatttgctggctcggccagtacggagggcgagaccgcgcatgcgcttcgagcctcaagcagcctggttggcccaggctggaagcgcgagtgccgcccgccccgacagcccggagtctgtgggcgtggccccagctgtagttgcttcacctccgggtttagctccgcgcctgcgcctgggctcacggctgaacgctccgtaaacagtacctctttctttgctttctcacaccgaccctttcaggttgctgttggatcagtcctgatgcataagtgaacatgttgaagctcggagaggttgaaaggcctttgctgcttgcagttcccatccagctagagcagatggccaataggagtagtgtgcgtgccacatgttgacttttaaattttccagcagcaacatgaaagaagagtaaaaagaaaaaggtgaaaatgatttataatgaatttttttaacccagcgtatccgaaatattatcatttccacatataggcaaaacacaacagtatgaatggggtattttacattggtttttttttttgtccccgcaaagactttccggtgtgtgcgtttatgctcacagcacacctcaatttgaactctacgaccgggcttcacgccaaacagcagagacaaagcactggcactaaatctcatagaaacaggatgagcctgggtatcatgataggcagcagggctggaagctggaaccaaactgatttctccccagggatctttggtggtgtctaattgatcacagtgtcctgtagtaagccatcatgatctgtataaccccggtaactctaggtctggctaaaggcattctgccttgaatcaccacaatggaaaatcatggtgcctcatctaattcccagatctagtcagtccacaggccagagcccgtgaggtgagcctgtaaaggtgaggccaggcacatgtaacgctacaagtgtgtactttcagcctgcctcctcccttctcgtgggacccgtggccatttaccaggggcttgcactagcccgtgtgaatcactggggaagtagaatgccacttggtccaatggtcagaagtggagtcagcccacgtccctttcactatcagccaccctgtggctctttccccggttcttgaatccatacttgtaataaacacaattggtagctggataaattcccagaggggcttcctgactcaaggactgagggtgataatggaaggaaagaacaaaggaagcctctggcacattatcataattgagtccctgggaactgatttgatcatctcactgtaccccaagacatcatgctgagtggacctgatgcataggaagtggcaaatatttcaccacaaggtgagagagaagccccttgaaaattcagggaggtgatacctcagtgaacttcctgggcatgcagtgggctgaggcatgttgagacggtccctccaaagagaaagacaagttgccttacttggaaccctctgcttgctaaaaaagaagcatgacactcagtgggccattttctggagatggcataccccattaggatgctacacagagccttttccaagctttaataagagactcacagttcagccctctggaatttgaaataaacttaaagctaagacctccacacacaaaaaataataatttgccaggaggaaaagctcctggcttgctgtaattatttactgaaacggaatgactgtgatacatgtggtcttaagacctgacctgcccatgataaactgggtgttgtctgaccaaaccatgagtaccatcaagtacaatgatgcagccactttagaaaatggtctggcaattccttgaaaggttaaacacagagttaccatatgactcaccaattctactcctaggtatagacccaagagaatcgaaaatggatttttagatagatggttgtacacatatgttcatagaagaactgttcacaatagccaaaaggtagaaacaaccaaaatgaacagatgaatagataaacaaaatgtggtctattcatacaatggagccgtaaaaagggatgaagtactgatccatgctacaacatggatacaacattgaaagcattatgctgagtgaaagaagccattcaccaaaggccacattttgtgtgattccatttataggaaatatccagactaggcaaatctagagacaaaaagcagattagtggtagccttggcctaggaatttaggggaacatggggaatgactgctaatgggcacagagtttctttttgaggtgataaaaaaaggttctaaaattacattttggtgatggttgcacaggatttcaagaattgtgggataggatggccactcatgatggtttgggatcatctaaatgacagccaaattcctcgaatttttggtttgggtcacagagggaatttctataacaatgcttaaggaattacttatcttttacaggcacaagaataaaacaactaaaaaccaaactttaaaattttgacccatcacctttccaaattacaaaactcagtgagttcgcagccttctcagttctcttagtaaaggttggggccacgatcagaaaagcatagaacactgggatttgaaatgggagtaaattggagaattgggagtccccagaatccccaactcttactgagcctccattgttaaacaacccccacgtttatctgattgcaggttcccttactgtctcatgagggaattagcagggaagcaaaggcacttccctcctactctcccaccccaatgtctccaggcctgtaactagagttaacctctacattgcctcaactgaacaatttaagtcatgcagcaggagaaagcttgcatatgaaaacagtagtaggagtttgcaaacatgtaccaggaaacaggtaatatttatgtaaatgatatgtgaaggttcttgacccaaaaagagagaagatcattttaaatcaggctgatttcttggtatagacgctggaatagaggttcatgtggaggtgatgcctggaccaagaagcctatcccagagctttaactgcaatggacgatagagttcaggtgagagtgtacaaggattgaaggaggtgttttgctaataaatgctgtaagctactagattcccatcccagattatttttcaccacattgttttcaccacatctagccaggtaaccaaaacaaaattcttgcatttgtctgaatgcaagactcatggaagactttgcttctagtaccaaatcttgtgccacttagaaatgttttgtttggaagtacaagaaacagactgttattattggaagggtattatagactgtgggactcaataaagaacaggtttaaagagtggggtgagtgaacattaagggtaggcctcaaaattgtttatgtctcatctctcaccttcacagcaccacaccacaccaagttataccattaaataagactttagtggatgttggcagaggtaaaaactgaaaatcacatttaaagaaaggcatgtgaaacaatagctctaaatatctttttgtactctaagagaaaagcccctaacaatgccctgcatggatgctctttagttcccagcctgctctcctgccctcaggtcctgtagggttatactgcttctaaaacgtttcactaggtcatgtgtggtaagcactgttagttggctgcctaacagacatccctttcctcttctttctccataacagagccccagttttggccaggacagcactgtgcccagcagcagggcaagcatcacagtcgctctaagccagtcagatcctttgtcacatcatttactggcctctcttgcagttagggtggccatgcggcacaattctgggcaacgagttgtaactggaagtcagctggagaggggaggattgggtaatggcaatgaggagccagaagtggccaagtggctctgtttgcaagttagtggagcgattctcataagtggaagcatgtttttcttgggtactagaatctaaaccagccaggtacaaagtcatgaggttgagaagcaaaaattctgaaggcagattattcagcatgtctgtgagatatgccattccccacctcaactctgttttccagacctcttatattctgaccatgagaaaaactgcaccatttaatggtttctagttcagcgtatggtccagatcctcacaagagtgttgtgtcccaactaggaacacagcagaatcttcaacaggccattttatcattggccagatcaacggctgcctacagaatgttggaagaggtatggaattgttttagcaaatagatcacacctgtaaccgtagcagcacttgaaataaccacctgattatgctttcagtaatccacagtcgtttaatgtccacagtttaggtttctactgctgcataacaaaccatccccaaacttagtgccattaaacagccatttcattgtgctgacaggttcttcaggtgagaaatcaagacaggacacagtgagaatggtttctctttgctctgtaatgtctgaggtcttggctgagatgacttgatggataggggtgacaggatggctggaggctataatcttctggaagcttcttcactaacatgcctgttgcctatactaggatggctggaaggctgggttccactggaacttgagcacctactacacacagcctctctttatggcgtggcagccttagactagctggagtctgtacttggtggctcaggacctccaaagcaagggttagagtgaaaaaggcaaaaagctgcatcaccttttatgactcggccttggaagtctcatcatgccatttttgttgcagtctatggttgaagcagccacaagcctgctcaggttcagggggagggaacattaaccccacctctcagtgggaggagtgttaagaattctggagtcctggtttaaaactgccacgttggccgggcgcggtggctcacgcctgtaatcccagcactttgggaggccgaggcgggcggatcacgaggtcaggagatcgagaccatcctggctaacacggtgaaaccccgtctctactaaaaatacaaaaaattagccgggcgcggtggcgggcgcctgtagtcccagctactcgggaggctgaggcaggagaatggcatgaacctgggaggcggagcttgcagtgagccgagatcgcgccactgcagtccgcagtccggcctgggcgacagagcgagactccgtctcaaaaaaaaaaaaaaaaaaaaaaaaaaactgccacgttcaccaagacctaaccacctgctgtgcaggccaaacggatgaattaaatgagggtgtgataggaatttccttccctgcatttttcaagtctttgatgagggaactaatttctgaaattgctcctaagtatgtggtattatttgttttgatttacactttgtgagaaggggaaactctaggggtttccacttgggcctttctgtcatgatggcctcattctgtaggtcaggaaatcattgtgggaattttgttttgttttcttttgagacagagtctcacactctgtcagtgcattggtgtgatcacatctcactgcagcctcaacctactgggctcaagtcatcttcccatgtcagcctcccaagtagctgagactacaggcatgcaccatcatgcccagcaaatttttgggttttgtgtagatacacggtctcaatatgttgcccaagctgatcttgagctcctaggttcaagcaatccttctgccctggcctcccaaagtgctaggattacaggcatgaagccaccgtggctggcccaatgtggggattttgctgactttttttttttttttttgagacagagtcttgctgtgtcacccaggctggagtgcaatggctcaatcttggctcactgcaacctccacctcccaggttcaagtgattctcctgcctcagcctccctattagctgggattacaggcacgcaccaccacgcctggctaatttttgtatttttagtagag

SEQ ID NO: 96713 - DNA, 178530 bp, Homo sapiens
  misc_feature (1)...(178530): n = A,T,C or G
tgaacctgaacaaagatgaaagtttaatgctaggagggaacttaatgtaaattttctatcagtcaactaatatctttgtattccttcctgcgctttttatatttggctttccatctagatccccgacaaaatgtaaaaactgcagcagcctacgtttttctgaaaatgggaacaagacatgattcacaattgaagtgtgcgtctccatccttttcccatgaagctgaggccagagagataagcacatcaatagctctgttgtagccagaacacgcctcagtgcactgtcagctcaggggccctgtcagaagcagggcaggccagatccaaaggaaggtcttaacaactggtcagaacattttagtggaccagacttaggggtatataggcaggaagcaacaggatgaaatgcagatgtccaatagcaaagcagtcagtattcgggtggctttaaagggagacaggaagatgccataccagaaagatgaagctcttacccaaggagtttgatagcaagagctaggtgctggtccaggcaggttagtggcattactgatatctaacagctatgaaagggactgaggtttaggaacaatttcagttagagccagaaggagtaaggcaagggactcatttcagaggaaatagggtgataattattgagattaagtagaatgttgaaggaagccctcatttttcttaaatatctcaatgaggaaatttctacagtaatacttcatacttgtctagcgtggcctgggagtaggcaggtaagtttgatttgagggtgtggttggctgaagaaataaaaagaccatttactaaagattaaaacccatgttcttcaaaactgcttattcatcaataaaggtaatatttggataattatctcaagtgattccaagtttgaagttgggaaaagataagtcattaatgatcaaccctaatatacctaaacaggaaaatacaagggttcagtttctaaaccagtgttccaagttagagtaggccactaggagaacagtggtgtctactttgccatgggacaaagcctcctggaactacagaatgaccagagccagactcagttcctggagcttgcaacagggatgcttctgaaatgtgatatcagggagccctgtgaggaagagtgcagggatggaaatgcgaagagggtcttgggacagggagggcataagggttatctcaggatgacagatcatcccatgcatacagaatattcttctcttccagaatttctgatgcataaggcttttctttgcacccaagaacagtgttctggcatcccttgtgtagaaatgaattaagacctatttacttctcttgtcttgagtgttcctatacacattatatcgtctaacaagctgagttcaaagttgtattcagcttctgtccaatacatatggctttacacacacacacacacacacacacacacatacaaacacactttgtctatatatattttgcaaaataattttatgagtctgggactctagctgaatgatgcttataaaacaaatttggtgattaaagcagaaatgtggtctgtataacttgaaccaaggcagaattgtgacagaagctatgaaggtattttaggcctagaaggaagcactgagaagcagtgagaaaagcactaaataagctttagtcctggctctgtcagtttcaaactattgcattaggcaagtcatttctattttataagcctcaattatttcaacggtaacattacagtacaaatgtcttactcaaagggacccttgagggttatataacttaatgtttgtaaaaataattggtaaaatgctaaacacataggatatacccaataatctggatttcaatctgaattgtgtttttagcctcaattatttggggaatacttagcaccgttattatttatttatttacttatttatttattttgagatggagtttcactcttttcacccaggctggagtgcagtggcatgatctcagctcactgcaacctctgcctcccaggttcaaatgattcttctgcctcagcgtcccgagtaactgcaattacaggcgggggccaccgcgcctggctaaattttgtatttttagtagagacggggtttcatcatgttggccaggctggtctcgaactcctgacttctggcgatccacccgcctcggcctcccaaagtgctgggattacaggtgtgagccactgcgcccggccagcgttattttttcacttctttgtagttgttgttcaactaaatgtgaggcttccaaggaatgaagttagaatgtctccacaacatgagtgtgaggacagagtgtttgcatgttttgtttgatttggaattttaaagctcaactgagaattaaggtaagcacaaggatggagctattgaagaaattggaaaggaacagacagtcctggaatgtggcagctcctgtttgattttaaatgtaagttaaatattaatttttctaaaaaaaaaacctctttctccagggagggctttctctctcactctcttacgttgacagattgttggtggcttgcctttcacactaacttatttggaggaaaaaaagtcttcagatgattttatttgcgtaagaaaaaattgtctccaaaacaactcccttgtcaccagcatcaacagcagctgaacaacgagttgggttgtcgcacagtgagaattattcctttcatttcaaaggaatcaaagatgtttggggcaagcaagagccctggttacacgtgatcataataaactagtatcagattcgcttttggaaagtgttaagtctactgctgaagtccgagtacacttttattgttccaaaaatatttactagaatggagaaaagttggtttttaaaaactaagctgatttggagaaaataagaagcacttaaaaatctcttctaattcctacttgctgatggttccctaaagaaagacggtgcaattatgctgttgacttgtaaacagaagtcaaaaggaaattcaagctctgttaagactcaatccaaatataataaaaagggctctgtcgcccagaatctcctttaatgtttttggatggattctcttgtgctctggctattctttgattttgtaaagaataggaagaaaagcaaaattccagtctcccagttcatacctatcttagtagaaatgtcaacattttatgttccaatgtcgtcttttctcaaatatttttctttcttactgtcatgtgcttttttcttttgctttttaaaaaagaatttacaaaactactatcacccactgccccatgacatctagcatatatgttttatattttgctatatcaaattaagcattgtactcctgctactgcctacctgtgggtctaagtatcctcatttttaagttaagggaattagatgagcctcgcagtgctcaaactatgctatatccctcaggcttggcaccattgacacattagactgaataattatttcttgtaggtagctgtcttgtgtattgcaggatggtcaacaccatccctggttctacccactagacaccaacagtatgaatgctcccacctaccatgccccagatccgacaaccaaaaatacctccagataatgtgaaatgtcctctggggagtacaatcactctcaattgagaaccactgctctaactgaagctgtgaatcttaacctttggttagtatctgcatcacctgagaaactggtaaaaatataaaggcccagactagattctagttcaaaaatccagggtctccacgatcttactagctttttcacaacacaacgaagttttagaaccattgttcctaagaaatcagataataaagtatgggcagcacatcatcaaggaacaagttagaaatgcaaatttgaaagctccaccccaggtttagtgaatccggaactctgagatggaagtcagttaattatttaaggaaaaagtacattcttggcacactctgtgagaagttcaggagtataagagactcgtggatgactgtctgttccaacattgagtaagtaccactgggacagcatgacctggaatcagcttcttggcactgcatggctcttattaccataaggtcatgaactttttgtcctgatccagccttaaaaagcagatcagattggctttcctgggagggaatatctgggggattacacaaaaccctacctattctccaaaccctacctactcatgaattctacacagcacctggaaccccaactcatagacttattctttgggctgtggcattagctgtagacctgtggttctcaaccttggcttcgtattataatcacctgggaaacttctaaaaatcccatcgctcaggtcatatcccagaccaataaatcagaatctttcagagcagaagccagacacttcttaggtgattctaatgttcaagcaaatttgagttgtcaatgaatagtttctctcaagtcaggcagagattgtacgtaaggtagtaatacaaggcatattacttacttactacttgtagtaagatataagaaataaggtagtaggacatacaagaggcttgaaagaacctggccaatttggcaatcagtaggatgtggttgcattctataggctattgactgtgtgctaatgccaattatttccctaagtctttttagatccttctagccagaagctatctttgtaacctctgtgttcccagagctcttttttctttcttcttcttttttttttttctttttgttttttgagactgagtctcactctgtggctcaggctggagtacaatggcgcgatcttggctgactgcaacctctgcatcccgggttcaagtgattctcctgcctcagcctcctgagtagctgggattaaatgtgcctgccaccacgcccagttgatttttgtattttcagtagagacggaatttcaccatgttggccaagctggtctccaactcctgagctcaggtgatccacctgcctcggcctcccaaagtgctgggatcacaagtgtgagccactgcgcccggccaacactttcaatctaatctaacacgtaccacattctaccttgtattatagctgtatacattatatatatcaaatttgtttcctatacagtactgtgagcttcccaaaggtaagaatcctgacttatcttctctttcacctagaatatttactttaagagtaggcatcaaaaattgttaatttaattgaaatatattaaatgatgtagaaatgtcaccaaatgtacaaatagaatgtagcaaggtatcctggcactttgccctcagtcccacagcaggagttcctatcctgatgtgcttcaaaaccttccacaagtggactgataaccctggactagactccaaaatctttatctgaaaacagacaatctctagagaaaaagtctgggcagatgactgatgtgctaattctggaacactgaccatccaaggcattcaatatacattcagctccaaactggagctttttcatcagtgatatgagccgaattagtaacgtttggtgggaaaaaaaaagagcatgattcatcagtgtctcttggaattacacagccagggctgttcatggcctgagtggtcaaacctaacaaaatgaatgaaggaatcagcatgaatctctggcaagcccctcagcgtagtggtgattccacataaaagccttcttcggaaaaatcatagcaactagatacatgcgtgagtctttttcccattgcctgtccctctgctcaccattgcaggggctgaaagactgatgagattctcacaggcactagaagaccacagaaatgcctccaggaggcaggctgggatccagggtccaaccaatattcttgtgagagtgtgaagccaaggaacacgaaagaggggaacaccttggctaagaatgtattcgtgacagaggagaaggggaggaacaggaagcctccagctagtcgtttggaatctggcaaccatttctgtcagctttctcattcctagattgatgcagattgcttaattccttgaggtaagggatatactaaattgcctctttgttcaactcttagaataagaatttccctctcctctcccgtcccctcccctcccctcctctcctctcttttctttttctttkttttttttktttttgagacggagtctcactctgtcacccaggctgcatgatctcagctcactgcaaccttcacctcccaggttcaagcaattatcctgcctcagcctcctgagtagctgggtctgcaggcacgtgccaccacgcccagctaatttttgtatttttagtagagacggggttttgccatggtggccaggctggtctcgaactcctgacctcaggtgatccacccgccttggcctcccaaagtgctgggattacaggggtgagccactgcacctggcccacagcaagaatttttttctgaatagcattttacgtgttaggcgtctggctgtttargagatgaggaaactgaggccctcagttgccaaggtcacacagctggtaaacggacggagccagaaygcgagtacagctcctcctgcctccaaaggttctctgggccctgtaaaaccacgggctgcacaggaaaggcaggctatatattgttcttcccctggcccagcgccctgatccaatgcccggacacacatccacaccaagttggacgaaaaggtaagggasaraccttccccaagagaagragcggtaagctttgrttctaaaggccctgggttgggtccgtcctttgccacttctcagctctatgcatttaggcaaatcacttatcttcttaaacctccgcatctgggcctacagggcctctatgggttttttttctatttatttatttatttattctttttttttttaactttacrttccgggatacacgtgcagaatgcgcagatttgttgcgtaggtacacatggcatctacggtttgattcagtctgaaatggcgctccaggcttcatttagaaggtgaagcactctgcaaactgcgaggccatacagagattccagaatatgattaaggccctaaccttgctaagctggattttctttatttcccaaaaagaagactaatactatccacttgtacaaccagaagggagctcacgtgtaaagcgcctcgtccccggccggcctcaagcggcgctagctctctggctggcgctggagtgtgccgcccctggcagccccgccgctgcagcggggagcctgggagagcggctctcggagtctcaggcagcaggaggagcgtgtgagctgtgggcgtccctttaagagcggctggccaggcacggcctccgcctctcagtacgcggagcgccggcggtcacctggggctcgcggagcggccagatcgcggcggagtcggcgcgcttccccgagggaaggtgggagaggggacccggacgcgaggtgccccgaagccctctcgagcgtaaccgtcccgcgcctctctgaggcggaggatgcgggagcgcatctgggcgccgccgctgctgctgctgctgccgctgctactgccgccgccactgtggggcggccccccggacagcccacgccgggagctggagctggagcccgggcctctgcagcccttcgacctgctctacgccagcggcgcggccgcctactacagcggagactacgagcgagcggtgcgcgacttggaagcggcgctgcgcagccaccggcgcctgcgggaaatccgcacgcgctgtgcccgccactgcgcggcgcgccacccgctcccgcccccgccccccggcgagggccccggcgctgagctgccccttttccgctccttgttggggcgggcgcgctgttatcgcagctgtgagacccagcgcctcgggggccccgcatcccgccaccgcgtcagcgaggatgtgcgcagcgacttccagcgcagagtgccctacaactacctgcagcgggcctacatcaaggtacccacagagcgctcctccactgcaaagcccctgcggctctcacaygctctcttgagccctccctgctgcccccgtcatctctgttcagtctttcgaattgggtctccttaaatatgtgtctcagtttgtgaatccagatatctggtggccctatctctgtatgcaacaattgattaacttggacaagtctttttctctctttctcagagccagcttctctctcaaaaagaggactgtcctgataaggtgatgtttaaagtacccattcagcactaattcatgaggcattgacaaagctgaatctagtacaatttatcttctcccttctcacttcccatttctcttctcccttctcacttcccatttctcttctcccttctcacttcccatttcttttgtctcctctctcttatccttcctatactgtagtctgcaccttttctctgaagtttaaaagaatcttcaaaatagtgaagttgaaagacctgttccaaaacaaatttctctctcttctccccttcacctacaaaaaagtaaagatcaaaggttaaagagaaggtatgcttggaggaggcgaagctgtttgaggcagtctcagtcaaagtatccaccctaagtgttgactttttctcctttgatagagggcttacgttttctggtggtatgcattggactgggttactaggcatcagtcctctctttctagttttatttttgtatgcctaacttgcctaaagttagcgtcaggaggtatagtatgcatattgacatattgttcacatccataactttgaagatctctctggatgcttcagcagagggaatttgaatgagttcttcaacctccactgccactcacccaattttccttcaaattgacactcttaacccttctttctcgttttctgtgttaatatatcaatgtatcttctacagctaccggaaaagtggaagctttggggttggttgttcatgctagycaatggaccaggctgctctgctctgctctgctctgctctgctgtgctctgctttgctttcttttctcctctcctctcccctcctctcctctcccctccgatcccgtcccctcccctcccctcccctctcctctcctctcttccttttcttttctttttttgacggagttttgctcttgtcacccaggctggagtgcagtggtgcaatctgggctcactgcaacctccgcctcccgggctcaaacgattctcctgcctcagcctcctgagtagctgggattacaggtgtgcaccaccatgccgggctaatttttgtgtgtgtttgtgtatttttagtagcgaaggggtttcaccatgttggccaggctggtctcgaactcctgacctcaggtgacccgtccgtctccgcctccaaaagtgctgggattataggcgtgagcacggctggaccaggctgtgtttctaaggagatgaaagtacataccatgttcaaatatccaaatgccttttgcagctcatcccacaagatctctgccctcatctgtggtagggttctctcagattggcaactgttggtggagtgcacgaaatttcaactaagtataaatcttaacttcyttgtrttgtggctaaggtgttggagttcactggactagtatcttgggcaagaaatgaggagaaagtctgaatcctttccaggacttgtcttctgcttgcttgtgcctcctgattgctaaggcatgtatgaagtataactctaatttcttctaagtgatttacacartttctggtggtcttacagaaatcagtcaacaccaggcagagaggggaccttgagtgtctgacggtgaagttatcataagctagttcccagagcagaacatgggtggtccctgtagcttggtcctcccaggagtctcggatgtaaggttagcagtcctgctgttaattctgtcacaaattttggacatattttcctttctcatatctggagaaagaatacatagtcaaggtcagtcctataaaaacaaataaccatgaggtaactctcaatatgtgggtttccctggttctggaattctgcttgcttcactgttaatgtnagcatttgtcagtcatttcccctccggttccctggttggaggtcaaagaaggtgaagccataggtttaacatacctcaaatttttgtggtgaattgattacaggaacaagtcacactctgtaagtgaattactgggtgttgtctgatgaattaatgaagtttaagaagttctttcaaagatccgtggcttcgtgtgttcatttcagttctaccagcaatatttytgagagcagaacaagtcttgcgtcttctccctacttctcttctctggcagtttcttggatctacataattgataatctcttaagaagaaaatattttatccttttggaaattcgtttttgaaagttggagtttgtgaacctctaaaactgcatcatggtttttctctccccttcacccccctcccccagcccccaagaaagccccagttttagcctttgcttggcttccttggaatttcacttatgaatacgcacacacaccatcttttgagactgaaaaaaaaaaaaaaaacctctsaaataataaaagaacatcctggagctctgacaggtctggattctagggcattgattccctgatgttaggatgaggaactccctgccatgtgactggatatggtcatggtgccctgtattgtttaattgcttttgacatcagtgatccagtttgcacttaaaaggataatcctggactagatcaaattcagtgagggaggactggaatgcttcataaagctaagaaagtacaattattctcagctaagagattttccaactatagaagctctcaggagatgttactgctcccccaaatcctgctgagtgggcctccgatgaaagcagattatttgtgctggtgtgttggaggggaagaaggatgaaaaatcatgaaatctgagacccaatgagttcaatttcttggttcacagatgaggaaagggatgtttctaaatrtttaatagaaaggtaaagaggtttgctcagtgtcacatatttagtggcataccaaatgatctgttgaaatgagcacagggctgggagtcaggagtctggattcttccaataactgattccgatagctttcctgtgcccactggcctgtaggttcacatcaggtcccagagaatgctgcataccccagggctatccttatgccagatttggacagctccagggatgagtatatccttgtcttgcagggtaacagatactcactacatctttcatgagccttgctctgttgaattttttcaaggcctggcatgttgggaatttgcctagacagctatgaggcagtagtttcacgtggctcctagccatactttttgtttaaaggcagtgtgagactcttcaaacttttgatttttatcatttaagattgttagagataacccatgattcatagcctaagacgtaatatatagcttttatcattgcattctctgctcagaaaccttcagtggacttcctcttgctaccatataaagctcaaataggttaccatagcatccacagcctggctccctctcaaccttcccagtcctatcttccccaactctgccgccttccagccaaaggtaacaatgagtgctttgtcttatgcctgacacttctgcatctcttggccttgtttagtctttcttgggaggtgtagaggctttagaatggatagatatgggattaatttttagttttcccagtctctatctgtgtgactgtcagcaaattccataagatttttcagctttagttctcccatctgcaaaatggggaaataatggggcctacgttcctattttaagttaagtttaagagatgagtgatgtaaagcacccagcatagggcctgattctcagtaaccattggagatacatttattctttttattagttaaaatagtagacctttcctcttcctcttctacatgttcaaatcataactatcctaacatataaatgcacctatttctgtgagttcttccttcactccatctacaactcccaaaagtataccatttctccattttctgaattcccacagtaacaattttgttcctcttctgtcatttttcatttttaaccttgttttggaaaaagtgataatttcgttattacttaggtgagcttcctgaaatcaagaactgtcttagtgattcttgtatctcctaaagcagaggttcccagatttggatgattastaaatggataattattattaatcatcaggggctttaaaatgtgattcaaaattacagatacaggctcagtaggtctgagttgggtgattcacaaccatcttccctccaaatacctaaaacagggggtggttcagtgtatgtttgttgaatgaataataacttggttccatgcatatgaaatgttgttgaggaagatttytgcatggtggcaggaggttttctcactttagttgtttggcttcctggctggtcagttggaagagaacgtttcaggactgttgactgcctgacttctcactattttytacttacaagttctggctaatgttgcaaactttcaccccctttcccaccccactttttcttctttagttcttattacttaaaactatacttcaaaatacccttgacatattgtacctgtttcatgcacaattctggaatttaaacaaacatgagggatacttttctttcttatctgtgtcctttataatcaggaatggtttgacagtgtctggttttttttttttttctcccacttttcccaaccatttaaaaaaaggaaaaaaaaatgctgtttatttattcatttttctactcaaaacaagcttgcccctgcttgttttgtttctgtgttgttgctttgttccatttgacctttgtttttcttcttaggattaaaaggaaggcgaaaattaattccccattacattagggaattctggtttgggcctaaagtcctctcttgaaacttcttggatcttgaccataatccatttgattaggattaaaggaaggggaaaaattaaggcaccattacattaggcaattctaatttgggcctagagtcctcttggaacttcctttaacttgaccataatccatttgattagtgggtcctaggggaacacaaaagtaacctctagggatttcccccactcttactctggttttatcacctgctatctctttctataatgcatccccttaaaataaattgaaaacccaggcaaggccatcatatagatcttattagtttagaataaaaatgctttcctgaatttcatatttaattatttttacctatttgtagaatatgtatatttttctgcaaattatttcaaatagaagattgatttcatatcttcttgaaatagctgttatgaaattgttctaaatggttatttcctcaaaagatgaagcttttcccccctctctttaacaactgaacacttttttgtgcttaaaccatcaaaaggtacaggtcaccatctttatgtctcactccttaggaagaaaacctgagagattgttcatctagctagattttaggtcccgtgtgctaaggaattagaatcacaattgttcctcctaaggattgtcccatatctgaaacgcctggtcagnnnnnnnnnnnnnnnnnnnnnnnnnctggttagtcagtttggttaatcagggattccttcctggccatttttttttttttttttttgagacggagtctcactctgtcgcccaggctggagtgtggtggcgacatctcggctcactgcaagctccgcctcccgggttcacgccattctcctgcctcagcctcccgagtagctgggactacaggcgcccgcctccacgcccggctaatttctttttgtatttttagtagagacggggtttcaccgtgttagccaggatggtctcgaactcccgacctcgtgatccgcccgcctcggcctcccaaagtgctgggattacaggcgcgagccactgcgcccggcctcctttaacaatggaaattaataaactgctgcctccctttcttcatagacctcgtctctcaraatcaaatggattctgttactaatatcatctgctcattgataaactccaaaggggtagctgtgaaattctcttggaaatgcttgataaaatgtcaacttcctcataggcragacttgatacattttgaaaggtggataggttcacctaaatgaagacttgctggatttgatataatgactattcttttgtattgctaaggaattaagtaaactgtggatttcttagagtcacagattttatagctggaagagactccaaaagaacaccttcaagtcaactaactgctttggggcagtgacgtaaaagcaagggaggaaagggtaattattttgttcaagaaatgtaatctaacaagggtggaagtggtagttattaaaattataaaaatgctatagcttgaaagagccctcaaagatcatgaaaaaatctatccctgtcacttaacagatgatgacactggcctcacagattctacaacaaatcaagaagggaaagcaaatggagcttggcccagaataggttttctcacttccagtctcctactctttccagcctctatgtaacagtcatggctacctccttgaggggtggtctagtgaatcagtggtgcacttgagacctgcagtaaacccattgccttcagagacaaagtggacataagacacatcttcctggactgccccctccaccctgcactttcattcacatgatacataagttattcagccaagagtcacagttgtctggtggaaaatgttgcatttctcattaggaaaaataattcctcctgtcttttttttttccattcatctttcttctataattctttttctgtctttttattcatccctcctttcctgctgtctgattttctagccgagtattttccaccagaccttgtcatcatttgccaaatggcctacacatatctctaaaaaaaaaatttggtgtcagccttctgagtggcgttcctagtgttgtatgtgtgttttgctggttttagtactgaagaggactgcagactgttgttgaaagaagctatttctcttgaccacactcctttctgctctactgtactatatcgtttcctctagttatttctctgtttttccttggccctacccctgcattgtcctgttagtagtctacacaatgaaagtacatctgaaaagaagagagcagaggggaaaatggggaaagagaaaatattggtagacctaaggtcaggtttctagctgtattaaaatraaagccattgagcctttcatttaatctgataaaccgtcatagrtatctactttttgatactgtttttatgtcacttaccctcatgtgtgttgtgcaagacctgggtatgggttagaggaagatgttccccaccagctctctatctttctgccactgcccgtctgccacattaatgaaacattagtactgcaaccattgcattttatggatgggaaaataaagctcaaaagagaatygagttgatcaaagtaaatgcaatcaaatggaagatccaggattagaatccaggaaccyagactcccwccaagtcctatgacattgccattgaccactagttgtaagatccacactagaacagggttcctcccatcaatgagctcacatctaatatagargatttcaaatggcgcataattataacacaagacccatggggaaaattgtcaaccataataccagttataggattatttttatcrcactccccattattccattaatgataaagtgacttaaccctagggacattaacgatttcarcaagttttacttttctctctctgagcatcttccatgaattcctgtgaatagaagtggctggatcagcttaattatttaggttccttcaggtctgtgattstgacattgaggctgtcaagaatattgtttatggcaagaatccatgcatcaggtaaattagatgcatgggattctgtacaaaattttctgtgtctttgaaacctcataagaaagaaagagtcacattcaagtggggaataggaagaccagaaactggtttcatggaggaagtgatgtttaaaatcttttattctagaggggccaatgctagtttccagattggggttttgatacacagatgaaagctacagtgtcatttctatatatagtatattaaaatagagcccctttgactgattttttttaaaaaaggcattckttctccccaccctttaccaccctatctttctgcagctgcaccctgccacattaatggaacactagtattccaggcatcccattttacagatggaaaataaaggccaaaagagaattgagtggcccaaattttacagcactgtaagagaaggaccagggttagaatccaagaaccctgacttccattctgtgaaatggccgttgaccactatttgtaaggccccggtgaaaacacaagcttaacgaagttaaaatgaaacacacagcatgccacttgcattatwtgccaaatgaaagagaccctgaaataaaagctgcaatcttcttatgcaatgttattccttgcactactgttcttcctacttctggggaaaactcagaaataagaacctgagtcaatgctgtttcccagttagcttaatgaaaatgagtgaggcaaaggatcttctttggaagggaagtagaagaataggagccagaaagagggagatccaaaacgtcagaatttctagaagtgcagggctatcagaatgatcctgctggaattcattatctacaaatattagattcagtttttgagcacataacaggaaacttctggggattgcagtttaattgtactgggaccctggaaaggaatggataaaagcaaaatatgtaataaaataaatgattacaaaacaaagaaacttctaacaaatctggaagcacaggaaatttgagccaattttgacatattcttcttgcttgaatgctaaatttgtaagtctgccaaaatcaatagatttgcacagagaaattgacacataattaagactctgggcatagagaattaccttaaaaccagatttggctgttttttaaaaaygagctcaaattatagtatcaaagactaatccagtagaccatacaaattatttctccactgaagcatgtgctattttaaaataatattttcatatgaaatccaggatcaacagtcagcatttgattcttatacatgccatttataaatgccgccagggacagagactttcacagtcaatcattgtttctataggattaccaagggctcagttaaacagtggggtttgcaggttttcaggtcaataagcatttcagtccgggtttctcagccttggctgattgatattctgggatgaataattctttgttgtggcaagctgtcctgtgcattttaggatggccagcaacattcctggcctttacctgttatatcagtagtaacacagtccactcccctccaagcagtgataacaaaaaatgtctccatatattgcaaaatgtcacttggaggtcaaaatcaccccagatagaaaaacactgatttaaacatttagccatatttaagatgactgggccaggtgcggtggttcatgtctataatcccagcactttgggaggctgaggagcgtggatcacctgaggtcaggagtccgagaccagcctggccaacatggtgaaaccccaactctactaaaaatacaagaattagccaagtgtggtggtgcatgcctgtaatcccagctactagggaggctgaggtgggagaattgcttgaacctgggagggagaggctgcagtgagctgagatcacgccactgcattccagcctaggcaatagagcgagaccctgtgtcaaaaaaaaaaaaaaaaaaaaagactgggcatcaaggttagatggttagataagtacagtttatactagattatactagaaggcagtttgcccactgatgaattataatatttattaaaaaagtttggctgcagctagatatcttttagaggagaaatctattggaaatagagcttctctcttcaagatgcaaagcacttggcttatatcccatatctggttctccatagctacagtaactcagcttatggaaaagaccagatagttttctctactgattgtcctaacatgatgagacagcttgctttaacaatacaaactaacacatcttagttgtgaatttcaaactccagaatgactatatttctcattcaccttgtaaagttctcaaacccaattatttataaataatccactgcaacctgtacgttttctttgggttagctctgtgtcacatctattcttaggaagcagcttgactgaaaacaaaaatgccaactcacagaaggctgggaagtgggggaaataagaggaggtcaggtgaaagaaaaaatattagagacagaaagaaagagaaagggagggaaggagggagccaaagactgatacagaaatagaggaagaaggatgacgagataatgaacaaaaatgaagcaaaggaaagccaaaagcaattagattgaagtctaaaggtctcaggcatgaaaagagtctcacgaaagaaaagtaggatgtttcccactctgatatctgtctcacgaaagaaaactaggatgtttcccactctgatatctatgttgtataattagtaattgggaagcagatgtttgtctttcttccactccgtattgccgtaaggccatattctattgagacacttctgccttgctgaagcccagaacagcagagttaatcagcttcttcaggaaagagaaggaagtaattcctctggctagaaattccacgtgtacaacactgaatatttaccaaatgacataattcccctctaaaaaaacaaaaacaaacgagaaagatctcaaacaaaaaatgctagctaatagttttcattaaattaaactgttttctctatcagcaatttaaaaaaatactgaggccttttagatgtaaccttcttttttaaggccctggagatatgaagatgagtaagacactcttcctatcttcaagtaagtcacagtccattgaaaaaaacaaatgtgtatatagctataatattaattaacgtaataaacagaggcactcctatgtgattatgtagtgtcaattcagagatgttttgtatcaaaaaagtgaaattaaatatgggaaagaaaaagtaaagatttacaggctgggcatagattggccacacctggcccagtcatcttaaatatggctaaatgtttaaatcagtgtttttctatctggggtgattttgacctccaagtgacattttgcaatatatggagacattttttgttatcactgcttggaggggagtggaatgtgttactactgatataacaggtaaaggccaggactgttgctggccatcctgaaatgcacagcctgtaaataatctcagtgctttgggaagctgaggtgggaggatcacttgagcccaggagtttgaggctacagtgagccatgattgcaccactgcactatagccagggtgacagagcaagaccatgtctcaaaaaagaaaaaaaaaattatggtgtgtgaaacctgccatttaaaaaatactggtaatttttaggctgggcacaatgcctcatgcctgtaatcccaacactttgggaggtagaggctggaagattgcttgagtccaggagttcaagactgcctgtgtaatataatgggaaccctgtgtctaaaaaaaaaaataagtaaaaataaaatactggtaatttttaatacttaggaaaaaaggaataaaaaacaaaaaatactattggaaacagagacagtgaaaaatttggagaattaatttaatcaatagtacaggcagttttaagaataaatttgactaatcatagtttgtaaaagaatctgtactattctgaggcttgaaagaaatgtatgtatagtaagatatgaaacaatgccttttagggaattttactaatagttataaaatccattacccaaagctaaatgtaagtgaattgtagctttaaagattttttaagtttgataagggaaatgttattttgccatttcaggttcctttgaaattctaggtgaagctcaaccttcccttttacagttctccaaattgttcaccctctttgtgtctcaatttctatctctgtgaaaagataataataaaaactgctcaactcatagggttgatgaaaggacaaaatgaggaaatatttgtgaaagtcatttatgagggataggatacataaaattaggagtgagaaaatagagaaattaaaatmcttattcgtagactaaattattcacacaaaaatgctatgaaagcgcaacaagaagaaaatcttctattcacacagctgaaacacaggtcaaagaatctccctattttatcgagataacttgttgaattattttttacctcaataggtataaatgtatatccatctatcatctatctatcatccaaatatatatcaagaaagtcattaaactaataacgaaaaatgttttgtgtatgtgcaggaagaatcagactaaatactcatatagaaaaaattgtcagcctttgaagaccatcttatattatcttcttgatacattttgttttcaaaacagattttgaagaaacctgaaatagcaaaatgacatttcctttaacagacttaaaaagtcactgaaatcaaacacttgatcttagttttgaagacagttatgttctatgactatagttattagtgataacagatattattgactattactgtgtacccggtattatgctaaaagctttatgtaaattttctcatcaaattctttcaacaatcatgagatccaaactctagtatattcttcatttttcaatagggatactgaagcctgaaagattaaataatgtgtctgagattatactgctagtaagtaacagaatcagaatctgcatccagatttttctgatcacaaatcctgagttgtcatccacttctcatagcttgagttttgacatcaaacaggtatatagtcaaaaaaagttctgacatatcggttgtttgagactgtatgaaacttgtctacgtgaatcagaattttgtatcgggaaaatgacaataatcatacctattttacaaggtacttgtgagaagttaaaaaaaaaaaagattgttccttgcctcatagtttctaggcagatggtgaatttctaagggaatataaagggcaaaagaatatttaggcaaatatatcatggtaagtggagaaaataattacatctataacaggtacagaacactaggggacatataaaacaggtgcttgacccattcaatctgagtaactggcttcacgttcaacactgcgcactgtagcacagacttaccygcctctccaccatcaagataaaacaaaaatcatcctcttaatggaaattcgaggctgttcatttgctatgttaagaaatgttcttttctttcttccccattaaattctcccattctctgatttcacaatttccttgagattgtgtcctcttctttgtattttttttaaatggactctgttcaaacacattccaaatcttctctgtttcatattaatagataaaatctcttcccacagacacatcttgggaattttaaacctctttaagcctccttcctaccctgatttcttgtacccatgggagatgacttaagtttgagaatcaacaaacatttcttcatcatagacaccaaaatgaaactgctttttgtttagcagtcaggtaaatgggagagtagctcacaaaaagtagtagagggttacaagtctaggaatcaagcaatttaatctctacacccagctctgtcataaatggctttctctagtccttggggtttgcatttggactagggcagcattgggccagttacttaataagagctcttctgcatctgccagcttgagatgctaaaatactttagtggattggtacagcaagccaacagtctacctgtggaaacagaaaactgatgagattataaaataatggaatataaaatgcaatggacataaattagtttaaaagtttacaggaaaggaattacttccagtgtatctaatgctggtcctcatcttggggcagtgaatccctttaaagtaaaacttgaaaggaagttacacaaatatttaatttaatggtaatttaagaggacagaataaactaggcmatgttcaagagagacaaagaagatagataaaaggctcaaaaccatatatgagaaacagctgatatagaggatgagtaagctaatgaagaaaagacaagcaacaacaacaaaaaatctccttttgcagtttcaaaaaagattatcatttgaggcgattgttcctgatctttatggcactgaagaattgaagcactaggaccaaataacagaaattacagaaaacaagatctcggctcaaatgtgaaagactttcctcacactattctgagatctaataggaagccctagaaggtgttcaaacgtgagtcaaacaaatacctaatgtagaggttgtatttaaggtgcaagcaccagagtgatgttgaaatgaatgagatttaaaatattttccaatccaaagtctataagactccatgattttgtgaaatgaaaatttctcttgtactcacagaaaggatcattaaagtctttttcattgaaaaaggcatacagttttctagcttccttttgaattctagttaatgtattttaggccatggttgccagcctactccctataaatagttacataatgcaaaaaagaaaagaggaaaaaacagtaccaaggccytaagacacacatgccagaacacrcatgcatggaatatttagcagtaataatatccacatgcatgattggcatcagtcctctgatttccgactcttgtctccatgagatgacatctgagatggatttagttgtggttacatagtaccactgggggttttaagttaaatttattacaactgatcaggacatccgtgctaggaattgaaagtaggtatgcttctctgagcgaatatatcgtgatatactaagtaaaagcaatttcatttatagaggctttgcaatcctattctgatttgcttcctgtatgtactgtccagaggccaatctttaaacctggtggtgttctacacygtagttcatttctcaaactttgatactgttaaagaaatttaaagggtattaaaatattaaatattttataataatatttaaataatccctttatccagctccctcctctttgaagttcttccctcactctctagttgggagcgggaggagtgccctgataccatcactggagtggaggggagtgggtggaagtccatgctgtctcggaccagctgacataaaggtgaattgagccrtggtttttgccccatgctgtttggctggagtaggatagatattatcactaatatttctgttctgctatgcctaatcctttgactagagagagcatgctttctaaatgatctttgaatgatgatgatgatgaatataatttggaatggatatgatttcagatctctagcagagttttgttaccaatactttaccacaaaaagctactgaaggcagggtgcrgtggctcackcctgcaattccagcactttgggaagccgaggctggcagatcacttgaggtcatgagttcaagaccagcctggccaacatagtgaagtcccgtctctactaaaaatacaaaaattagccagatgtggtggcgggcacctgtaatcccagctacttgggaggctgaggcacgagaatcggttgaacctgggaggcagaggttgcagtgagccgagatcgcaccactgcaccccagcctaggtgacagagcaagacttcattgaaaaaaaaaagctactgaaaaacttttctaatgttgaataaaaatctctaagtcaactttgtcaccactactaaattaaccataagtcggtgaaccggattgtgctatagttcatgtcaagttgttgagtattctttcctacctctgctttagaagtatggaaaagtcccagtgctctttcagccttgccaccagcctgccctttcacttgtttatatgtctgtagatgagctcctctagaacactgtgatttaactcttcataaataaatacagatttgatcatcctggtccactttcccaataagatagttaacaaaggtttacctaatgtgttatttatggaaaaccaatttacacagagtttggaatagggaaaaaaagtttctaagtaatgatttcttttcctgtaacccattgtcccagattaagtctgatagtcttatgatcaatacctcctaaattccagattattgtgtgtgaatctttgacctaaacatttacatatggctgatagtactatttgagtcttgcacgtgatggaaactcatgcttgttgaatttgaattgtcagttctcctaggacataggtttgtccatatgattttacacagttatttagaaaactagcatacctcagaaatattgcaggtttggttccagaccattgcaataaagcaagcctcacaatttttattttttggtttcccagtgcatataaaatttgtgtttacattataatttagtctgttaagtatgcaataacattatgtctaaaaaacaatgtacataccttaattttaaaaaatactttattgctaaaaagtatctgagccttcagcaagatacagtctttttgctggtggacagtctttcctcagtgttggtggctgctgactgatcaggttggtggttactgtaaattggagtgactggcatttaaaacaaaaacgaaaacaaaaaaacaagaaagtttgccccattaattaactcttccttttttgaacactttctctgtagcatactgtgctgtttgatagcattttactcacagtaaacttctttccaaagtggtcaattctctcaaaccctgccactgctttatcaactaagcttatgtaatattctcaatcttttgttgtcatttcaacagtgttcactgcatcttcaccaggagtagtttccacatcaagaaaccactttttttgctcatccttaagaagcaactttttatctgttcgagttttattataagatttcagtaattaactaacatctcaggctccactttttattttagttctcttgctatttctaccacacttcagttactttctccactgaaatcttgaattcctcgaaatcatccatgagagttggaatcaacttcttccaaacttctgttaatgttgaaattttgaccttctccttatgaatcacgaatgctattaatgacatctagaatggtaaatcctttccagaaagttttcagtttactttgcccagatccaccagaggaattactatctatggcagtcataaccttacaaggtatatttcttaaataataagacttgaaaatcaaagttactcctctattacaggctgctgaatggatgttatgttagtaagcaggaaaacgacgttaatctctttgttcgcctccatcagagctcttgggtgactagaagcattgtcaattagcagtaatattttgaaatgaatcttttattctgagcagataacagtgggcttaaaatactcagtaaaccatactgtaaacagatatgatgtcatccagtctttgttattctatttatagagcaaaggcatagtagatttatcataattcttaagggccctaggatttgggggatggtaaatgaacattggcttcaagttaaagtcaccagctggattagctctaacaatagagccagtctgtcctttgaagctttaacatccggcattaacattttctctagctaagaaagtcctatgtgacatcttccaagaagatgctttatctacaatgaaaatttgttgtttagtgcagccacctttattaattactttagctagatcttccggataacttgttgcagcttccacattaacgcttgctgcgtcatcttgcactttcatgtttatgaagacggcttctttttttagacctcatgaaccaacttctgcttgcttcagactgtttttctatagcttcctcagctctctcagccttcacagaattgaggagagtttgactcttgccctgaattatgctttggtcttaaggaatgttgtggctgattcgattttctatccagaccactaaagctttctccatatcagcagtaaggctgtttcactttcttatccatgtgttcactgtagtagcacttttaatttccttcaatcgcttttttttttttttttttttttttttgcgttcatgatttggkgaactgatgcaaraaacctagcttttattctattttggcttttgacctgccttcctcagtaaacttaatcatgtttagtttttgatttaaagkgagagatatgtgactcttaacttgaacacttaragccattgkgggattattaattggcctaatttcagtgttgttgtgtctcaggggacagggaggcctgaggacagggagagagacaggtgaatggtgagttgatgaagccatcagaacacacacaacatttttctattaagtttgccatcttatatgggcatggtttgtggggcccgaaccagctgcaatagtaacatcaaagatcagttatcacagatcatcgtaacagtaatggtagctatgaaaaagtttaaaatattgtgagaattaccaaaatgtaacgttgagacatggggtgagcacatgctgttggaaaagtggcactgaaagaagtggcctgatgcaaggtcgccacaaaccttcaatttgtgaaaaacaatatctggaaagtgcaataaaatgaagcacaatcagaagcggtatgcctgtatttacatacttcaaaaacaccattttctgcacttgatcatagttttgtaaagacagacctttcatgatgataccaacttcatatgtcagtttgagaataatagcatgaaattgggtggaacattttggaaactgtattagagtgaggaatwtagaaagtgtggctctagttttaattatgttactaactctgtagggctttataatagttaaccttttcttggcctcagagtcttcttttacaaaatgaggtgattgtaatatgtaatcttggaagtctctgccagcttcaatatattttaatatttggcagaatatttccactgataaaaaaatttattaaatgctactaaactatgaaactctcagcagttgttcactcctcattttaataaatcctagtatcttatcctcaataccaaaaattgtgacatttagacattaagataataagcttaggtaatataaaatattgaatacattgcagagaaaaatgaccttggcaagccttatgcaatcatagaagtgttttttttgggggggggggcggcggggggggcgggggacggagttttgctctttgtcgcccaggctggagtgcaatggcgtgatcttggctcactgcaacctctgcctccccagttcgagcaattctcctgcctcagcctcccaagtagctgggattacaagtgcccaccactgcacctggctaatttttatatttttagtagagatggaatttcaccatgttgggccggctggtctcgaactcctgacctcaggttatccacccacctcggcctcccagagtgctgggattacaggcatgagccaccatgtccagccagaagtggtattttatagcagtgtcagggttctgaagaaatattttagttttcatcactcaattctacaattagcctcagtacctcttcctcttagataaaggtattgtacctgccacacagttctgcagactccgctctgaaatggtgtaaaccagtggttaacattcaactttcttcacaattttccttattttccataatgctaaaaaagatcaagatatatattgttaataccatcttttttctatgaataaagcagtttatagattgtctttcaggtaagacttcttattagaaatgtgcttttttgctgcacaaaaaaggtcagttctgtatcattctttatttcagccaaccttggttcaacacatccatgttctgatttacacaatattgtgaattaaaccagagcaacagaatctttcttgctatgtgataaagaaacaagaagtttytgctgataaaacctttataaagatataaagctttagtgataaagaaaaaaggagttattccacactttccccctgcatatatacccgttgtccaagtgtaattcttctctcgtggtttgtccgactataaagcaatatctgttgtatctaaacatgtggtagtaattgtctttcctcattgtgtgtattgtattacattatgtgatatcctacagcgtcatttgaaaatgaagttttgccagaagtttattcttcgttccacgcataatttgttgttcatgttgaggcattttttactagcttcttggcaataatatttaatgtaagtatttttgctgcaagaagtgaaacttgacaaaatgtttttattagttaaattacttttagatctagtatttgttattattcttatatctactattaagcttcagtaaatcatgaaagaaccctttttcttaaaaaaaagcacagctatagcaaaatacagcaatggcattaaaactgcaaatgtaataaaagtaaacagcrttgtatcaacaatattaagttagcaagatcaaataaaccttgacaactaagtggtatgtgacagaaaatgcctggaagaatccaatgaagagcttgtatgaccttaagaatgtcataattattaagaatataatggaattgctaagaaaatcataattaaacttgyattttaattctgcgaaatacacctaaatcaaatcattgttaagtctgaaactgttggtggtccgtgtaataaattatgaatgatcaatgtattttgagaaacactgatctagagaaataaacgagacactattttttgatttggggcaagttactcaaagtctcttttgcctctgttttctcatccagaaaggaggggtaagtgacagtggcattgcgaggatttcattagtgaatacaagttaggcacttagaatagtaacagcttattgtaagccctagtaaataataattgttattggtgctatcattatcatttttctaatgggctatctatcatctattatcctgtctcatttatagcaactacggaaaattatgactgttgtcactttcagacctcatctcttaatttttaattttgtagcacgagattaacctattgtcatttggaacctaaactgtacacaatctgattataaaacaataagagcgattccacagatccctgcaaaagtcatacattttttggaaacktagtttctccttctgtaaaatgggggctactaatattgattatggaacacgtwtgcaataaggactaaggaaagtattttgaaatgttcaagttctatacaaatgtagtgtatacaaatgtatacattttacacgactgtaatttctcatatgagaatttgcatcacctaaaattgtttcatttttaaaaaattacttttaccatattcataaaatgtttttttatttttcaccacagtaattgcttatttttactttaacaatgacaatatccatactagccataaggcttaatgtgacctaaagtatttttccaaatgctattgcgcttacataaattagacatggatagtgcagacacagagagcatatgtagggttttttggggggccttgaaaggtttaaggcctctgacctcctttaatacattccagactcatgcatgcctttatcctgcgggggtggggcgtggggatgaaagctgctgcttaaaacaacacttccagtaggaattgtttgataaggccaatggttagaatatttgcagcttcttgttttgaattcttatgataatatccactgccaaagattatgtagcaatccaacaacaataaaataattttattgtgggtaatccaacaacaataaaaattaggttttcaagtaagactttgtagatatgatacctgaggcagaaagaaagaaggggaatatgtacctgtgagggaggtctgaattggccccagagcacagtatgtgggggcctcattgtttttcatgtcataacaggtggaatcgttttgttttatttttcagtccacagtctgtttgtttgtaggtataagtcagtctcttattgacttctttattgaactatatatgaggaaccagcaacattatttctgattttcaaatatatgggaagaatcagtattggggaaatcatagcggtttttttggttgtttgtttgttttacttttagtaatgcatcacatctgtgagagtcagtacttgcatgatatgttccagcactcagtttcacattgattctccttgcttttgaatggtgagaattacagtgagaaggaagataatcacctctcatgtttgcattatgctctgaaattcatgctctgaaacttcatcacacacgtcttgccttcctcacgagagccctgtgagaaatcggaggtttaatggcttgtccattctcaagtgtggcagaactatggctcagtagagaagtttcctgactccaaggccagtgctcttgccaaaatgtcacagttgctgtctgttcagatttgaagttctttgtagacacaaagctacaaactaataaatttctctttcaaggctctcatctctcatgacgctgcttttatcttttcataaaaagatgtcttttcatgatgctgtctttatcttttctgataggtggtatttccaagctgaagagattgaaatttagcaattcaccccactctttaatatatggagaccttttggccaagttgggtgtctgtgttcattgacctatgataggcatggaagaaggtgggtgtgagaatactgtttccagccagatgctaacacaattgcatgactgaatgtgggattgcccaaaagcttttttcatctgaagtgaaagctacatgcttctctttctttcttaagcgttctgaatgtattagttcattttcacactgctatatatgaactacctgagactgggtcatttatgaagaaaagaggtgtaattgacacaattccacaggaagcgtgaggaggcctcaggaagcttacagtcatagtgaaaggcaaatgggaagcaagcacgtgttaccgtggcaaagcaggagagagaaagtgaaggagggagtgccacacacttttaaaccactagatcttgtgagaattcactcactatcatgagaacagcaagggaggaatcagcctctgtgatcaaatcaccacccaccaagccscttctccagttcaacatgagatttgggcagggacacaaatccaaaccgtatcactgaataatattcccaattgttcattattgtacttaaaggaaatggcagttgtatgggcctaggtctatttgtcaggttcttggcgtttgtttgtattgtttgtaaacattctgtttgtgctctgtgtacacgctgatgtgcagtgttgtatttcattccctaatcagttaaaggactacatgattttcagaatccaagatagggcatcaaaagagatggtttacattacacatgggtttttgttgttgttgttgccttttatgctgtatttacttgcctttcacttgagtcgtaatgagttagaattacagcctgtttttggccgggcgcggtggctcaagcctgtaatcccagcactttgggaggccgaggtgggcgaatcacgaggtcaggagatcgagaccatcctggctaacatggtgaaaccccgtctctaccaaaaatacaaaaataattagccaggcgtggtggcgggcgcctgtagtcccagctactcgggaggctgaggcaggagaatggcgtgaacccgggaggcggagcttgcagtgagccgagatcacgccactgcactccagcctgggtgacagagcgagactccgttttaaaggaaaaaaaaaaaaaaaaggaatcacaacttgtttttgttttttaatttccctctaaattacatatcttcatggacttagctctctcttattgttgctcactgtggaacccaagagaaatttgaaattaaattctccttgtaaacttttggatgaggtttttttggtttgcttacattgcagaattgtaagcaaaatgttgaacattgtataactcttcttggtgtagatataggttcattgcttaacattttgaggtgataatccatatatatatatatatatatatatatatatatatatatatatatatgttttgagacaatttgtctttgagacatgagtcagcttcaagttcctgtgtataggtgtgtaaatttgggttagatatttaatgtctgtaagactcggttttgtcatctgtaaaatgaacataataataagtctcagttttcatgtctgtacaatgagcaacttctaaaagtgttataataattaaataagctaatacatataaaatkcttagatatgcctgtcaaaacctaagaataaagcacatgttcacttttctgtgaaaactaatggaacttactttgggaaatactggctctattcttttactaagttttcaaacttgtgatattgattatatttggcctgactgtggcagaattgtctcgatacaatgacataatcatggatgatcagtcaaaaaatctgaataattgttctagtcattccttttctagctgcctgactttggaccagtcatttacacctctgagtcttgtttcttttgtcttctagtgaagaaaagtggtcctcttcctttacaggatgaacagaaggatgtttctctgtattggctgtgttaggtgttttgcggattacaaagtactatatatgtctttttattatctcagttttatcacttcctgttttgggttgggcagaatgtcagagagacccagtaccccactgttgttgctgtattgtactcaggacatcaaggctatgagcttgagtcagcctttccaaggccaccattgtcccaatggttatggagctgtgcctgggttctgtggaacctgtagggaaaatgtgaatcagtgggctgttttacttggctgctaaatttggttcactgtttcataaatcagaacaagtctgtctagaatggttctggttgccatcagcaaccagggtcatagaattcaaggacatcagatatgtaagagaaatggaaaataacttttcaaaggaatgccttctgcaagaatcccgaggctagttgaaatactaaagaaagctaaatagaaactataacttcaagcttggaatttcctgcttgttacttggatgttgtcatgaggacttggtccaagattttgctttcctgggtggaagaaatagtgtcagtattggattactgattagtgtctttgcaatgtacagagctccatagttccagtcagtagagcagatgttaattttccagagaaacacattctcgattctggttttwcagtgtatcagattgtcacctattgctctatatcaatgtttgtggaattcttaaaattaatcaaaattattttagttcatgctagctacatagcaccacttttttattcttgggagccaagttgataatgggaaaaggatgtgaaatttttatcatgtaaaatgaaaactaaatgacttcatgagaatttttcagtgagccatttaaacttatagcgtataatcttcaattttaatgaaattttcattaatgattaatgtggtgaatttttctaaaacttaccaaaaaagccaccagcatattaattattttcagtgtatctactgcaaatcattttgacaacaatgttaaaccaaacccaaaacaaagcaaacaaacactgtaaatagtagcaatcactttttttcttccactcagtcacattttcagcagtgccatctactctctctcttctccatcctggacacctttgatgacttcagtttctgaagatgacttgtggttcatcacgatccttcctttttatccactctccagctaccaatgcctgtgagttcaacaaccgtgaggacactgccttaataattttcctttaattttctcagatttctttatctgatttcaccctttctagctatccagcagaactttcctctatggccttcgttcctctttccctttctctccagaccaacccccaactcatggccaacctctttagctagtcacgtgtatagaagggtagggccatttgcattgcaataaggattgatgatcattcttttcctcaactgtctgtcttgtcaagctttacagcactccaccactgttcactgagcactgcagacaaatgacacagagctatgtctctgccgtctactatgtattcgcactgcatgatcacaactaaggttttagagttgtttatcaattttctattatcgttgcttagtattatttcttagaattgatgtcagaattatttctacttctcaaactgtgtcccttcattcttttcatgattttatctcccacactactaaggaaagctctaataaagggaggaattttgggtggtgaattggagtaggagaagagagatcacatgtatgagacactaagcaggtgaaattaataggtgtttgtatcatttttgggggggattagaaagtaaaggaaggggatcagaattgactcggagatttaaagcctgggtgattgatggattgtggttctatgagcaaaaacaagaactacaggagcggatgtagaataggaaggaaggatattattttcctttgccccttcttttcctctttgtctttttaaaagtctcattatctttgcttaattgccttaaataaaatataaaaatttactgcttgaaatgaatgagctttcaaaataaaagggcacataccagtaagactgaaaagagttcagatcccagcttcccgaaagaataatcctcttaataaggcagctgtaagctctctaatgctggataactagaacagcactctgcctttggaaaaatgccataagtcccttgcacttttccttatttttaaagatagccatgtaagcaagatgtagctcctaatgagagtattttctagacttcgttccttgccttaagcactagctattttgctaagcaactgtcttcttggagggttttgctttttagcaaaccaaagattgacaaagttggtgaggaagtgactcatggcattggggttattttagtataaactacttgccctgagtacatggcccttttatactatttcagctgaagtatttctcctttgatagaaatatagagttgctaagaccaactggatttttttttttttttgacggagtctcgttccatcgcccaggctggagtacagtggtgcaatctcagctcactgcaatctctgcctcctgggatcaagccattctcctacctcagcctctcaagtagctgggactacaggtgtccaccaccatgtccgggtaatttttgtatttttagtggagacggggtttcaccatgttgaccaggctgatctcaaactcctgacctcaggtgatccacccacctcggcctcycaaagtgctgggattataggcgtgagccactgcgcatggctggaaaacatttttacatgtaagacatggccccacttatttaatgcacatcagtaaaacctagttccacgttgttcctattctaatacatcaggttatgctctctcttccctttctttaatatctcagcctctttgcatgtaacatttcctacttcacagagaatgtcaaaacaaaacaaaagaaacaaatatggcatctccaacatctctttgctttcacactgtcagaatactgttttcctctgccagcctatgtactctttaaaaagcctcatttgccatcattcttttcagaattatcaggtactctatttgttaaggatctggcttgtgccatctttcctttgaaacttatattgattggtatttataaagaaaactttctagtacaatatatataagcaaatagccatttacagacattaagatgtaatcacctgtcctaaattgatattgtagtaacacttcctttcttttcttagtaataatgggaaataggggcatcctattatatcatttcattaactatgaattatgcagaagtgtaaagttgagagtgtatagtcattaaaagaakttactgttaaggtaacaaatgtgtccacttcgtgtttccatatggcaatcatgactcttagaaccacttccatcaatctgaatgctttatatcagaccagaaagcatttagcaaatttgagcttaatgctgtaccttggtaaacacaatccagaagctaaaatggtctccacaaatccaaatcaatactaaaagccaacacataatttttggattacttggcttttgattttttgtggctgaaattcctcttcacttgcacaataaaaaactagctttgatatttattttatttatagaacaaacattatattccaaataagactgaatacctgtgttggcaggtagaaagaagcacagtcataccttatttgttcatagttttgagagatggcaggcggaataaaaaaataatacatgagaaggctatgatagtattgatgagggagtaggtaactgagtgaatgaaggaaacttctgtgagaaattgacactgaagttacgtcttgcaaaggagtaaaacattccacacagaggaaatggggtggggctctccaagaaaaaggaataatgtgtataaagacttggtagtgttcaagtgcctggtgaagaattctactaggtttacagtttgttttctaaggtaataggtggtaaattttttttttttttgagtcagagtcttgctctgtcacccaggctggagtgcagtggcacaatctgggctcactgcaagctccgcctcccagcttcacaccattctcctgcctcagcctcccgagtagctgggactacaggtgcccgccaccatgcccagctaattttttgtatttttagtagagacggggtttcaccatgttagccaggatgatctcgatctcctgacctcgtgatccacccgcctcagcctcccaaagtgctgggattacaggcgtgagccaccgtgcgcggccaataggtggtaaatattttttgagtctaaaatatgctcagtragaactgtgaaaaatatgtccataaaatgtttatttacctttctgtacagattaatattttgttttcagtaagcattttactcagcatattttttagtgcctttgatccggtatactccacaaggaaaaggagaaatggaaaaaaataaaaacgaatgatatcttctaaagaaatttccaatctatttggggatgtagccatgtttatttagttaagaagcatgtttgacctgatgcataatgagaaatggaaagggtctgttggggcacagaggaaggagcaattctgaaggctggcaggcaaagcccaaataaatctacctacagagaagattcattgacttcggtctttgtgcttcatgacacagacaccaaaccacaagttctttacctcactgaccactgagactctgccagacccaggaagcctccccaacaaacgtccccattcatcatttcttcaccctgtgactaaaatgtgatgtggtgtcaggcattactagctaaatatgggatcaaaaaccccaattgcaccacggtggtagccttgtggtatgcaagtctttttaaacaggccccacagattggacacccatcttgtcctacccatattattatgactccatgggtttggaaagtccggcatgacaaccagcacttgtttccaagtttctgacatacttgccctcccatgtctcagatgcccatgacttattcctataaatgctacatccctttactgacaaaatacagaaagaggggaggtggagaatgaggcataaggtatgtgtgaccaccctctagagtcaggacagaacatccgtccagtcctcctgttgggagggcgggaacagaaggtcacaaggaaggagacattaaggtgttttttaatgagctagtctctggacatgtatgcccatcctctgttgcccttgtttcaaacaactactttggaatttttggtgaaatttcaacatctgatttaacaatgaattttctttctctttttttattatactttaagttgtagcgtacatgtgcacaacgtgcaggtttgttacatatgtatacatgtgctatgttggtgtgctgcacccattaactcgtcatttacattaggtgtatctcctaatgctatccctccccgcttcccccgccccacgacaggccccggtgtgtgatgttcctcactctgtgtccaagtgttctcattaacaatgaattttcaacatctgattcactcatttggaaacttccttagtcacttggcatgaatgctggccctaggagataagataaagggctagagaatatggtgtcagtgtggagctcccaatatctgcctggggacaccacgggggccatggcgaagacttctgacaaaactgggtctatttcttgttccctctggttttcacacactttaagtacttagggtggtgtaagtgtgggagagttaaagtgtgctataggtaggggtcgaacacgctatattccaaaggtagagggagtttggtcatttatgaacatctgcaggtattgcaggaactgttttcaaggctgtagtatatataaaaatgctacataaaatttttcattttaatcagaattaatctcattaagtttcttacttttttaaaaaatgagaaaatcaagtacaagggtcattcttttcaatctttgacattctcacaagcccgtaactattattctgggaagaaaaacctatacccatttgccctccttctgatctggtctctgttaatgttctattaattttgaccctaataattcagttatcaagtaccatccaagagcagaatatgataacagagtcaaattttatccttcccttcccaattatgactaattttggtaacaacctaaatacaagagagatctatgtgttttctttatacatcagtgtagtgaaagggaacacaggcttaccttgtttgcatttaccactttccaaattaacaaagaaatatagaatcattgagcttaatgaataacctgccttctctccctagacatctaagaatgtgtccagttaaggtttttcacttaatattgccaagggaattatcccatagcatgcttatccagatgtattgtacataataatattctgaggaaataatattttagggatttagtttttttaaatgatgtgttcattttaagaacctaagaaagaactcctttaaaaatggctttaaatttttttattatcatcaatgagactttagatctattgaaataaagattatttccatgtgtttcatatgaaattttatgtttggtctctgttgcgcttaccttgagtaaagccaaattgaaaactagcacattaagttttgataagaaaacttgcacaacagaactcgtgttgagagggcagaaagtaatcactttcaggaacttgttgaacacttggaccaattcctttatttccaatatttgttaatgtgtgatatataataaggcatctttgagatcatttagctgtgaaaacacagatgatcaggtctgcttttaacttacagtaagccagaacaatttttgttttgaagtcttccttcttccacttttgcttactttttcccactcctctcctaccctctcctacccaagaatcattaccagaaacaaaactaacaaaaacccacaaaaattgggatcattatggaattttatagatctgaatttagaaatactgatcgtattcaaatactgacttcccataatgcatttagatatttaagttataaagaagagccaaataaatggatgacattgccttttcttgatggttttttttttttttttttttgagatgtagtcttgctctgtcgcccaggctggagtgcagtggtgtgatctcggctcactgcaagctccgcctcccaggttcacgccattctcctgcctcagccttcggagtagctgggactacaggcgcccgccaccacacccagctaatttcttttttttttgtatttttagtagagatggggtttcactctgttagccaggatggtctcgatctcctgaccttgtgatttgccctcctcggcctcccaaagtgctgggattacaggcgtgagccaccgcacccggcctcttgatggtattttattaaagcagatgatacagatgtataaacagcagtgatagaatttgaaaagtatttttatagagttaaattcggtgtggtataaaatatgcagagtaagaatttgttctacctggtagtatttgtaaggctaatttaatttagtctagggagatgaataggagttcgctggattttcaaagtggagaaaatagcatggattttcataaagggattgtagacttaattactactgctcttatgtgtaaataagttaaagcttatgctccacatcagatcaagtcttcctctcaagttcccatcttaggctgggctatggagaagaattttaaattgccaatctgtccccttctggttttgtttgtttaaatggygcaatcttttggggaaaatacttggtctttcagatttcttctctcttctcaatgcccctttccaacacaatgcctggatatttgagaggctttgtgtgacttcttggtagcagagagtatggttctttcagatcttcatggagtcccctggatgctggtctggttgagtccctgggctagcactaactgaggtatggtgtgtcccacttgacctttaagggagaatttggattcatgatttccctagtcctaaccatttgtgaaattgagaaatctgtatgctgaaactctaacacagaacctcacgcctatgcacatccatgatctaatcaattctgaggcttcttctgcacaagcaggagttctgattcttactcagctatatgcagggtaaggaatccagcagaactgctgcaggttgggaattagagagatgagctgggcatctggaggtcagcaactacccccgggaaacactcagagaagcagacacctcatgctgtggcactctcttttgtaagtatctgtttctttctacagaggtttcactctgagctgtcaatctttgttatgcagttagagggtattcagtgatagcccttaagagactccaagtgagagacagtgaggttctaaaataggttctaaaataggatagtggctttggggaataaaaaaagacagtgagtcccagatgtattaggaagattagaatcaaacagatttagtttgaattttggggatgagtagatgacctcaacatttgttgcttgggtcatggggtagctaatgataccatcaagcaaagtaatgggtttgggggagaatttactgagggcagttttggtaatgaagaataatctttatttaaatcttttagtaaattttgctgcacccaatggaatattcccatctctctttacctgtccagtgaaatgtgttactgtaaaaattcaagaattagaccattacatactattaattttgtaaaattactagggatatatacaaggatgggtttttaggtttgagacccaactaaggtaaagagaatattatcaacaaagtaaaataatgccatgattttttgatctatattaatgaatagagggataattaataaatatattaaatatgccaataactcaaaagtcacttttgtacataaatattagtattttctgtctctaggttttctaatctgtctcaaacaaagggttagaagtagttgttattgagcaatgaaaaataagctacaaaagggaaaactgtgtagtcagttccagtaggaacaacaattttaaagagttatttatttacaaggaaggagcatattaatcgatcagactgtgtggagctgcaaatgcttagataatttgtgcaagcacatgtcaagcaattgggaaatcgatccttttcctgctttggcaacatttctattctccattcagaagtttatatatttaatcacatgtatccagagacttttaattaggggtaagctacctttgagtatgtctgtatcaataaacagaaatgtcataattttgaccttcttagttaacatcacacttacactaaaaattcagtaaaaacagcagacatcaccaatggctgcgtcattaatgttgtgccaacaaacaacattgggttctagctccttcttctttctctgatttattatgcccccaagcaaaagtcatgatttttctctgtgctttggttgagaaattctcatcccacagatgagaatttcaccagaagcaacacgagaataattcaacgtctgctccccaagcaaagaaccttaggcccaggcagcacatcccctgtaattctgtatttgagatgaacaccatcttaaatttttatctgaaagctttatagttagttttctttctttcttttttttttttgtttgtttctcttagctctcgacaaaaactgggtaaaaggaattacccttaggtacagagctatgaactatgtacatactatcttacaccagaaaacacctactgagcgaggtattaagtctgttccacaggttgtagagactgtggctaaaacaaaacctcagttcagaaaagttgtactaaggtctgtgttaaccctaaacttgtatactttgcattgtttcatattacttcattataggagaaataaagaaatggaataaaggcatttcgcagagttggtttatttttatacaataatattttattcttcattaatattgataagattttaaaaatgcaaaaaccacttgccagagtaacaatttcagattcagcacctgtgattattaatttattattaagtctgcagcatcacagcttttacaatatccacacctaccttttaaatgtgcgtttaggtcttggaagtaacgtgagctaagactaaaggtatgtcttctggccaagagatggagaaaattaatacaactttctgaagaaaataagatacaaaataatgctattagtgtgctacttaaaattatggcaaaagtttgtgaaatcatcagattaattgtcatccttattttcttctttagcggagaccatttatttatgtcatcctcctattctgaaggttgttagctgcaaacatgttgaagaggttttggcatagtgtaaaggaagtgaatggtgagaaattattcgggaaattcttgctctatatgcaatatacataatcagctcatttgagtcctaacttsatgtgtagattcaggtcctttctcggctttttaatagctgcttgaccttggctaagtcactgagggaatatgccaccatttaaatcatcttcttactgagaatccaagttgctataagaaatatcttttgatttgatgacttttttaaaaaacataatgagaatggagtacattaggtacttagactcttaacctagaagaatgttattaaaatgaaaacatccacgtacccttttaaaaatccagccaagcttgtggttattgttcgttcacttttaaacaaacattactctgtcagacacaactacagcccccatgggagccaccagggagggttctgttgtctcatgtagccgagagtggctctcaggtccagttggcaaaagggagagaaaaaaggtttgatgttaatctgaaatgtctctgagaggccatacatgatttgagaatggattaaatatcaatgggtgactagggrattcttatactcagytaattttagaaagaacttttatttagagctgcctttatgcctgtgatggggcgggatacaccacaattacacattttcagaagggtggatcctttgatgacagatgtaatttctacccccttatttctccccagttaaaagattgccagttaaaaatcctttgaaaatggtttgatccttttcatacatgcaaatttttttccagtctttaggaaatttatataggctgtagtttttagccaaaaagcacacaccaggagttgagtcttttccttatccaaaatagaaagggtgtggattttccttctttgatgtggataaggcacaacttcttctctaacacttctgatggctgtggtgtttcctctttgttagaaatccactgtgaacatcccatcccttctgcaggtctttcccgtaaaataagatgttttgcatttttcagaccatatgtcttcttggtaagttaggctaaagaggcaaaaaaggcaagttattttcatgattgtgttttcaagactttagaaaattaattttatcataagagaaagacctggacaccattatgagctgcttggttgtgagaatttgatgaccttaggtaaatgcagataagctgcatgatcctctgcattatgggatcctgattatgtgtacatatttattcacctaatcttggagtattatgttcctttgtcaaatcatgagtatgatataattttatttttgtttataaatataggtatacaatctctctaaagtgattcttcattttcttttactgttcatattaatggtaaacacaaggtaattatattcttcccacttgattaagtaacaagaagaaaacattaaaaaaaacccacctctgttgtctacagcattggctctcaatactctatgcaaagcattctgctaagctcatcaccttcacaaattcatttattcctgttaagaatcctaaggttgaaaatacagttcaataaagggaataaatttcagtattcaatagtatggtagggagactatagttagtaataatgtattgtatatttcagtgtagctagaagagaggaatggtagtgttcctagcacaaataacagataaatgtttgagttggaggctatcccaattaccctgacttgattgttctaccttgtacatatatcaaaatatcatatgtaccttcaaactatgtacaactatgatatatcaatttaaaacaagaatctttgggtgggcattattattagtctttttttatagatgaggaaaccaagactaccttgtatgttttcacacaagtagaaggcaaactcaggacttgcatccaggttcgcctcaagctaaggtcaatgtttgttgttttgttgttgtttgttttgttttgtttttgaggcagaatgttgttctgtcactcaggctggagtgcagaggcgtgatctcagctcactgcaacttccgtctaccgggttcaggtgattctcctgcctcagcctcctgagtagctgggattacagacactcaccaccaagcccagctaatttttatatctttagtagagatgcagtttcaccctgttagccagactggtcacgaaaactcctgatctcaagtgatctgcccactttggcctcctaaagtgctaggattacaggcgtgacccattgtgcccggccacaagctaaggccattgttttaaccatgtttagcatgtacagctgaatgccttaagtttgatgtctcagaaagccttagctgttcagcacatttttatacttcataaattataattttgccaaaatgagtggctgggtatcatcctacagccccagccctatgattgactcttcaacttgtctgcatttcatattataacttagtttgtattctaaaatagaagtggttgaattcatcattcaagggttttgaggaagttaatgcatgcaaaacagtaatatgcagggctagcatggaaacaatgctggcatctgtctcttagtgcctctcctccagactggaacggtagtcacttgtcactagtcactttgtctctcaggcctgaagaggagaaagtggcgacactagatggtagtacacttttagaaatcagactcattttcttgaaacaatttgaaggccctttctcttttttccaaatcattcttttttctttccatttatattcattttattattgtaaagatacactacatacatacaattcaatttggaaagcctttttaaaaataatccacttactttagggttgatggtaacatgaagctaccttgtttttgcccttaattatataccaaagtaagaaaaataattcagataagaaagtcttaaagacttctatctctttaagtgcctcatactataatctctattttatttctaggcttccatgtgtcaaactaccttgcctacacaaacgaaccataataataaatatcacagaacacataaaatctttagagtttacagattgatacatattcataattttatttgataatttctttagttctatgtaaaagacaggaatacttctgctttttctattatacagttggagacactaacaaagagaagagccaagggtttgctcagagtatctgtaagcgttagatattctgagtgtgactatcagccagagctgttcacataaacatggtaatctaagctctgaacttctttggaagtaaattattgtctgtgacagaaagaaagagcagcatatttctttttatttaattatgaggttctggagggtttctgtgaattcaagagatgggaaagtcattatttttatttcattctctttcatgtctccactacagatgttgccatatgtttttcttttgtttgttatgtttttatggtttgcctctcaaatttacagacaccatctacagttggggttagaaaaaatgctcaaatctcagctgggcgcggtggctcacacctgtaatcccagcactttgggaggccgaggcaggaggatcacctgaggtcgggagttcgagactagcctgaccaacatggaaaaaccctgtctttactaaaaatacaaaaaattaactgggcgtggtgttgcatgcctgtaatcccagctactcgggaggctgaagcaggagaatcacttgcacctgggaggcagaggttgcggtgagccaaggtcacgacattgcactccaccagcctggccaacaagagcaaaattctgtctcaaaaaaaaggaaaagaaaaagaaaaaagcactcaaatttaattctctcccggctatgccaacatgatcagatgttgtgtggccaaaactcttacyatggcactcaaggtccttcatacactaaagcctggcttactctgtagcctcagtgccctctgctatgcccgtatcttgttatccaactccaatcaaatactgggtttgcctcaatgcatcatgctcacacatgtgtctgtgatttttgtctatgctcttccttttatctgtcaggcccttatgccacctctgaactgattttcaagattctacggttactttccttacccatttatgactttgaattgtcacactaattttttatgcctctacttaataagggaaatatataacttgccttttcctactctattataataacaatgattcattgagtagttttattgtacaagcactgtcctaatgacttttcatatattatgttatttaaatgatgtatcacaaatctctgaaattgccattaatactctcctgtccccttttatggatgagaaaactgggcactgacaggttaactgcctaggtcacagttagtaaatgatagccagtatttaaagtcagttctatctgctttgaggtaaaggttctcaccactgtaatatacagcttgaaatcagtgaattaagaagggggaggttcaatggctaatgcattcctgtgtaacagttgctagccccaggtgtggtggtgttaggtactctgttgagaaggtggaaagggtgatgcacactgggcagtgtctctgtgttttgggacattagtggactttcaattcataaatatcaggtattaagaaaataaggtttcatgagcttttggcatatatctaaaatgattctgccaaatcataacctactactagtaaaatttaaattgatgtatcattcatctgtgcttacatatactaactcaattctcacaatacttctttgtggtaggtactattatgtccccagctttacagatawggattatttatttatttatttatttatttatttatttatttatttattttttgagacagagtcttgctttgtcacccaggctggtgcagcggcgtgatctcagctcactgccacctccacctcctgggttcaagtgattctcctgcctcagcctcctgagtagctgggattataggaatgcaccaccctgcccagctaatttttatatttttagtagagacagggtttcaccatgttggccaggctggtcttgaactcctgaccttaggtggcccacctgcctcagcttcccaaagggctggaattacaggtgtgagccaccacacctggctcaaatatggattattaagtcatagaatgttgatgtcagaggttacatagccagcaagtgactgagctaggattggagcatgtggactccagagtctatgctgtcaaccactgtgcatacagtctcgtgtaaacagtcctttcaccctcctgcacttcccaagggagctgtctgaccactcttccacccttaactaagaacattagggcatccacacggatttctttgctacttccctggaagaacaaagtcttcatgggaaggaagagaatgatgatcctataaagaataaataaaaaacaaataaaaagtttgggtatacagttagagctcagggaactgagcctattttttcttacctatgagattatgagtgaggataataacactacatttctgtgtccttttccagtttgtgaatatatatgccattgggtcatagtatgtctcccttgtctcatggggctattatagctcgttggtctcctttgcttgattagaagtttcctcatacacaattccctctaatcagttgcctttagtaggtggtaatgagtgatggttgaaattgataatagtagaagataaaacaacagatttcatttattgaaatcctattaagtactaaatgattgacatatactttcttgtttaatagtaacctgtaagttttaattaaattcatcataaatgcagtaaaaactgctaaaatgaccaatttcatagccstgactattgaatttgtcccatcttccaacaaatgtttatcaagtgactatcaaatgctaggcactgtcctaagcactgaagatacaataagtaaaaaataatacaaacagacataatttttggattagtggagcttacagtccagggactttgagtgctaaataagtctcactccctcaacttatctacttacaaattttagttctactccattagcccttgagaaaggggatggagaggatttggagtcgctacccatcaatactttcatctcttgaactatgttgaaagcaataggaagggcccttgatttatttgccttgggccagttggagcagttttgggtcatgcaacaattattcaatttaatgatatgttgctatccctggtcttatatgcctcatcagttgcaatcattactctctatgggtcccaggaaggctctggtacaagttgaaatttggatgattaaagagaataaattccattcatatcttgataagagctttgttcttaagtgagtagtgactttttcacaggcttgcgtagttgcatctcttcctaaatacatgtctaaaaacatttcctctgcttataatgtaataactgtattaatctgtatagccattattgttacaaaacctttcatccttcattgtatcttttgagtctcacaatgacactttgaattgagtatttatcatctcccttctacatgatgaggtaaccaaagaggcactgggacttgtctgatttcttcaatagacaagaacaattctatgcttgttgtactagatagtattcccatctccaggacagatttcaggccattcttttgctggtttgtgtgtgtgtccatgtgcatacaaatgtttgtgtgtaaaaaagagaaagaaggagagaaagggaggtggagacctaggaaggaagaaaataagttcaatttcaactgattttccaggtctgactttagacatcagacccctttgattacagggaaggtttttggtttgtctggactgaagacaagagcacagccatgaaaaagaaccaattgctacagatgactaggcagagaaaatgttcagtgttgctaggagaccaggtctgctgtcaggctcaggaatgagaacatgtcggatggagggcactgggctggaatttgtgtttgacataaactattgaatcatgcatgccagtaggattaagtcagaatcaactgaagctaaaaacagtcaggaaagtttttctacctctttttggtttttcccttaaattttttttcttttcagttacaaatgcctaatgaaaggctcagcagtagataggtgatgcttaaaagtttttagtaacaccctgaggcagatggtactgtgtgtaaaccagcatttagaatgaaaaaccctttcctccaaaagactaagctggaggagttttaacttgcttgtcatcagagttactttgaggtagtcaaaattattgataaaatgaatcatcattactgagttagagtctagactttttgcagtgtttataagagaaggctgtggtgtgtccttacctggacttggaagaactcattactaatccctgtttccaccaagcagccatgtgggcttggacatgtcatctttctctaggagtctcccttttctcagatgagtgaggctagaattgtgggttataataccttataaaatattcagctttatttggttctgggaccacaggcaaatgtcaataacccagatctgcttatattaattctaaagcacatggatgctgggatcacaagatagacctagggaggtggatatgtgaatgagtgagcaggcattctcactttgctgcagctgtagtaatagctgcctcatctttcccatctttccatgattaaggtagcctggcactgtactgaagaattgcccagtgttccatttcctagagccagcaaagaacttcagggaatgttctggcttttgatagtttttggtcaaacacattctcttttttgtcaagtttccaggaagcagggagcacttggccctgaaaatccagagtgtgctcctgccaaagcacataaatatctcaaaattaaggacacttgtgtttaattgtttctgtgtgtgtgtatgtgtgtgtgtgtgtgcatgtgtgtttggtggtttttttttttcatatcttaatatggctggaaatcaccactgctgacattgaaggttcagcccaggagaaacaagcccaaatttgtccaatatatgaactaaatagacgaaatgaaatctgcccaattcaggtctaagagtgaccatttgtgttaccatgaggagtacaagacaaagccatgctcaaatttcctggaggagttttctgaaaggtagttgatacatctgcagaaaaaagtgttagttgtgggaagttaatacatttctaatgtaaaaattcaatcacattattcctctaaaatacaacctgtagtgagtcctctgtagacacagatgtgactgtcttcatctgaaaatcaaggctttcaagatctgacccgacctatctttcaacctgatctcctattaatccttttcaggtaccctaagtacataccaaatgtctcttccacttctctctttcttgatgtttctccctcttaatctccacatgtccaaatcccacctttgttttcaaggcacttctccagtgccatatattttgggaagctttccctaattcctgtagtttaccaggaagatttcccttctcagaaatcacatgagattttatgtgtatctgtcttggtgcactttttctttttgcttttcttttctttctttttttcttttttttttttgagacggagtttccctcttgttgcccaggctggagtgcaatggtgcaatcttgactcactgtaacctccacctcccaggttcaagtggttctcctacctcagcctcccgagtagctgggattacatgtgcccaccacactcaactaatttttttgtatttttagtagagacaaggtttcaccatgttgggcaggctggtctcgaactcctgatctcaggtgatccacccgccttggcctcccaaagtgctgggattcctggcatgagccactgtgcccagctgcacttattcttttctactttgcatgacagttattagtttcatatcctagccttttcttcactactagactatgaactccttgagaacaggatctctgtcagttttgcctctgtattggccatagcatcactctcattatatgctaaaaggtgtgagtggagtggatgaatgatagctgagggaggtgctgttggtcagatgttcttcagggagaattgagagtagcacagtgcaaagttagagagcaaatcccctctgactaagagaagaagtttcaaaaagaagtgatcgtagactgaactgtacacattgaccatgtatttgattgattatctgtgtatattttcttctctcgtgctttcaggtctttcttaattttatttttataatctattaaagagaacttagaggatgcataaggaagtgagagaaaagacataaagcaaattgttgaaaatcaaaagacagattggttaagaagatgttcaatttacattcagttgtacatgcaccctccatctctttttagtttttcccctctggttataatgagatggaactgggtctgtaataaatctaggaattacattgtgttatgataaattaggtgatatctttttttttacagtgatgcttttggtgtgaaattgtacctttagaatcatagtattttactttattttatttattttgagacagagtctcgctctgtcactcaggctggggtacagtggtgcgatcttggctcactacaacctccgcctcctgggttcaagtgattctcctgcctcagcttctggagtagcttggattacaggtgcatgccactgtacccggctaattttttgtatttttaatagagaccaggtttcgtcatgttggccaggcaggtctcgaactcctgacctcaagtgatccattcacctcgacctcccgaagtgctgggattacaggcatgagccaccgcacctggccaagaatcatagtattctagatttaaattcacaatttttggaataaatgggatctcaagattaagttatccaatcacactttactaatccagaaactgaaacaccacaagatcaaataatttagagtcatatagcttgtacatgaaggctcaaaggtaaaatccaagtgtcctaacttacagtttaagtgtcctgtcttttactgatacgagagtatttcttaatctaatgacaaatgatattctgcatgatgtgcttcaatagctgatccttcctcaaaaaagtgaactgtcccctaaagcgttatttgttaagttttgtttatcactttaaaaattcaggcaaagttcacacagctgcagacataattctccaaacagccttatttgtagctcatttgaggtatggccttggcacaaaaagagcaaaagtccttgattgcagttgaatcatttccattattgcaagcatctcttcttttaaaagcatacatttattggatgtatatataccactggctttgaaatgaaactcagtttgccgtaactgagccttagaaattctggccctactatttacactcagcctatgatccttgaccacactgcagtttctgggcacactgctgtcagcgaccttcaatcatgcccaccagagctgctgtggcagccacagttcccaggccaaatgacaggatgtactctaggccttggtggttaatgaccctcttaccatctatgctcaagcatgcctgtaactgattagctcagaatcgcccggaagctgaaaacaagcagattgtttatggctcattttgaggaagagggcttttatcagggctgcgtggcaatggaatgatactcaaggatcrcagcacttcttatctgtggaactgaagaaatgggatgagaggttggaaatgacctcttgggtttcctgccagctttgctgtgaatctaggaaataacaggctggagttacttgtaatctttttaattgaagtataacagacacacagaaaagcacattgattagaaatcacaaggtgagcatccatttaatgaagactaaaattccaaattaggtgtatctgttctttagtgccaaattctgataataaatattttcaccacattgatcacaaactactgtttctattacctcttttataccacgtgactttgtgatttttaaagtgatatgaatgcagttaaaatggtacaggagatatgatactctgatacsagactgttacaatagtgatttaagaatgatatttactttctctggaataatttatgttcatggtagataatttgcaaaatatagagaagcaaagtatagataacaaatctcagaaatcagtattcaacatcatcatccagaactaatcatggataacattttccagtataacatttgaaatgcacatatgccacatgtacatataaatttaaacagttgtttgaattatattgtgcatgttgtttagtaacttttattaattaaaaaataaaatgatacttacaaaatttttgaatagctgtagtataactgttatatgagcatattggcatctatttaataaatactgatttttagttatttgtgtgcagttttgcactaataaatattgcttgatggtcactgttgtatctgaatattagttttttaaaatttttaagtacatccttagaagtagaattgctggattaaatagcaaacacactttaatatatttgatatatattgctaaatcatcctttagaaagttggtaccacttaatactctaattcaacatcagtggacgagattgtctgattcctagagccactgccaatgctctaaattatactttaaataaaagagacttaaagtttaatggattaaaacttcatcttgaccgggcatggtggctcatgcctgtaattccagtactttgggaggccgaggtgggcagatcacctaaggtcaggagttcaagaccagcctggccaacatggtsaaaccccgtctctactaaaaattcaaaaaattagccaagcgtggtggcacatgcctgtaatcccagttacgcagaaagctgagacaggagaatcactgtaatcatgcctgtaatcccagctatgcagaaagctgagaaaggagaacctgggaggtggaggttgcggtgagccgagatggcgccactgcactccagccggggcaacaagagcgaaactctgcctcaaaaaaaaaaaaaaaaaaaacccttcatcttgttttaatatgcattttttattatcagtataaaaaattttaaatgtttcttgctcattgtttatgtcttttgtccattttattgaagtatttttcttattgctatgttagatttgtttatagataggtatgcaggtactgttcccagttcctcattgtcctttcaattattgatcacctataatcatagctgagatcaacagacttaccagaactaatttgacgtgaatcctagatactaaaaagaaatgttctttttcatcactctcaaatgactctttaacatctgcagctttttctttttgatttcaatatgtatgtgcctaggaaaaacccatgaatagcacaataagttggtgactatgatctttcctcaaatggaaaggagtaaaacagcacaattgtgcttttacattcttcattggaatgatttggaatacaattaattgccttatttttaacttttctgctactgtttatagtggctattaactaatatttgcttagtgattaatgttattcagaattagtatggaagctgattggatttacatgtttctagaactacgagtggatttaactgatttgccaggaaagaacttaaacatattttaagttttaattcaatatttattctaggtgacagattctttttaaggactggcattgaaaagtctgtttattgtggcttgtaataagacatttcaaaattaatgtaggccctttgaagggtatttatttcaacatttacctagtaaatatttggatactatctgagtgcctgaagcaaaccgtaatagctaaagtcaatgtcacagggatttgcttagttcatcagtttcaatgcaaacatgtcatcctgtaacatgatagtatttattgagaaaattagatacttcacatttgatgaatatcttagaagctagtggaaagtgttttataatccggaaaaaagccaaaattattttactcattaaaattgttctaataaattgttttccttcatttaatttattctgctttaagtcatttaaaaagactgtgtgcagcctacatgtaatatgattatgatgttctggtcgggtcagctaaaagaacaacattttttctcaatgaacaggagttaatgaagtgtgagcaatgcataagcgtgaaaatggaagctgtagcaaggggctggaatgtaaggcaagtttgaggtcatggaaattcccgtttcaggcagacaatgtgttgtttaactgaagatagcttttttgagaatgatggctgttcatatggattgttagtaataagaactttaatgtgagaaggggaattggctacatatagatagtcaaaatgttttgtcttgtaagtcgttgcctctttgatggaactgtgaccactccctccttggaccgtgtgctcttgattacagcactatgactataatgctggaaaagatgagaggaagcttcatggctagatgaccctggataccctcatgaaggacactttcacatttttatgacttcaggaactgacttgatattcctgtgactcggttaccccaaatgcaaggcaagaaagttgaacctgatgcttactagaaccccttctgtatcttcctatgtactatgacttctaagaaaacaagatagatcagatgaggataatcctatcctcttaccaccaattcctccaatgcactgagccaaaatctgcttctcttcctctctcaatagtaaataataataatgataacaataataataaatctctatgtaagaacaatgcaagttcaacatttttgactaaatccctggatctgacctatttccgctagccttcataaggacttcatgcttggaactatcctttttttctgttttcctatgtcatcagtttctccatagccaccacgtgattgccatcagcacagccttcatgcatgcatcttaaaacaagtaaaccacctttcacctcacttctccgttaccacaacttaaaaagaagaagaagaaaaaaaaaaaaaacttgtctacacttgctggctttacctgctggctagctttacccccaattttctccacaatccatgctaattggatttccatctacaccactgctctgaaatgtcactcataaatgtttccagttgtctaccccttgctagagccaatggtcagttactggccatcagctttcttggcctgttagcactatttcactttcatgaccttgcatcttgaaaccctttcttctccagacatttcttcccaccctcgctagatttccttctatttaactggacattttctctctatttgtttgttggttctttgactggccctctgaaagttggtgtccttcagcatcttggttgctaaggatatgggtagaattttaacacacagagataaacatgaggaggactgggaaaagaagaaaaggtaaacatgctgtaaatcttacagagaagttctgtttggctggagaggaggtgaagaggagattcatttatgggagaagtttgaaacatcccatcaaatatataagatttacactgagactagaagaagatttctagggactgtgaactttccattttttctagtcctgaaatcagtgaaatgtcaaaagatgcttactcagtggggttggtcagttaactaggcctcatattgaaggtagcaatatccttttattggaaacccacatcttagcaatgtcccagtagagaaaccaagactgtgtcatcatagattttttcttcttggtatggtttattcagaagacactctagggtctggagctgagcctatagatatttaatccttaattacccaagtatttattgaactttaccatgtgaaaggcacagataggtgaggctctcttggattaatataccagaatttttgttagaatgagctaaggtgccgcctgtgaaaatactgacctcactcatataaaacattttttctgtggtttttcagtgtactaccaaacatgggatggtatcgatagcaaacgtttagttggttgtaataggatattaaatgtgattgttctcttttttgtatttgcaatttttttgtaaaagtcttataaattatatattggtttgaatttcttgtgtgcaaaagcatctatatgtagagaagctgaaaattattgccgaagaagaaaacacattatgtagatcaacaaatagctgtcattttaccgagaaaaatcggtaactcttttaagtgataagccttctccctcaggaaatcgcaacttcagcttttaggaaacagctctgtctactcgtccaccttcatccaggaatgaactgrgcaagcagtagtttttcaaagaaaacaaatctcctacatagatttactctatgtatttttgccagctccttagtaactgttcagttttgatatcactaaagatttagagtaagcctgatttaccaaatctagcagttttaagacccaataacttttgtgggagacaaagggtgtggggtaacttcccaccaacatatgtgtgtgtccagggggctgagtccaccctcatgtgaccagaccgcttggccacttatagagtggctgtcgaggttaaggtatctggaatctagtaatatttcagaggatgggacaaggtagatttcccaggcttcttttcagtacttgttacttagctattgtttttcattttaattattgttgaaattcaaccagattgattttattttgaaggtcctttcaaatgtttgctaacaatgtattctctttaaatgtttggagaaaattataagtgatttataagatttatcttataaaatttttataaacaatgtaattcagacatgagattatactatcccattcatcttaacctttcttgatttgaraaaaattatataaacattttaagcataaatttgacttaaaattaaattaaaaagttgtatattttattgttatcatatgaaaaatctaactcatgctatttgtggatgaagcctaatttttatatttaaattgttataactatgtacatttttttcttaggtcttcttttcaaattcatttttcaacttaaatattgagatgctgatgcacacaacttgtacttgcatgtattatgtaaataatgaaatgcaatattttatctttttattggattccagatatagataaataatttttgtatacttaagaataaagaaaatattcccccccagaaatacttcataaataattttaaaactttttaacgaacacttaagaggaggagaagaagaatcaaaagtatatgcttagtaggtaaatgtgccagcaccatatgtagaattttatggctggaggggaggtgaagaggagattcgttttaaattaatataccagagagtgacacagaatcactagttattcaaaagcaaaactctagagaaattgagataacatagaatggtagcatttatctgagaatttgtcatagggagattttgagtgactaattctttgtttttattttgtttggggtgtatgagggaaatacttagtaaaaggggtatggaggtcatgcaaggatttgtctctttgcttctgtggaagaaacatggagctcaagttcctgggtacatgaagactgcttgataattcatattcctcccacttcttccttctcctttctcttccttcactttttatttagtaaatatttcttgaatgccttgagtctgaaagatggattagactcaaatcatgtctgcaaaaggtatgaatctgatagtagagacatctacaaaaatacacaaataataggtaaatgtaagaataargctgggtgtggtggctcacacctgtaatcccagcactttgggaggccaaggcaggaggattacttgagcccaagagtttgagaccaggctgggcaacaaaacaagaccccatctctacaaaaaaaaaaaaaagaaagaaaattaaaaaagaataaactacatgtgaatgtagtggagagaattattgtccatccagcgactgtcaaagaaagctttacccaggaagtggcatttgagctgggtctggaaaggtggaaggagaaggcactctaggcagaaggaacatcatgagcaaaagcacagatgaggggctgtctgactttttcagggagccatgaatagacagggctagagctctggcttggagtctgattgttgacgaatgacatagtaagaaatttggactatagatagtaagtcccaaattatttgaagtagagggatttcactatcagatttttttcataaactttttttatattgcattcttttttccatttttttatttccataggattttggggaacaggtggtgttcagttacatgagtaagttatttagtggtgatttgtgagattttggtgcaaccatcacctgagcagtatacactgaacccaatttgtagtcttttatcccttacctacttcccatccttaccccctgagtccctgaagtttattgtgtcatccttatgcctttgcatcctcatagctcagctcccacttatgagtgagaacatacaatgttttgttttccattcctgagttacttctcttagaataatagtcaccaatcccatacaggttggtgtgaatgccatgcattcattcctttttatggctgagtagtattccatcatatatatgtatgtatataccacatatatatatattccatcatatatatgtatgtatatgccacatgtatatatccatattccatcatatatatatgtgtgtatatatgtgtgtgtgtgtgtgtgtgtatatatatatatatacacaccacagtttctttatccactcgttgattgatggacatttagatctgttccacattgaaattatatcaagtactctctcagaccacagtggaataaaattggaaatcaattccaaaaggaaccttcaaaaccatgcaaatacatggaaattatatagcacactcctgaatgatcattgggccaacaatgaaatcaagatggaaatttaaaaattcttctacctgaacgacaatagtgacacaagctatgaaaatctctgggatacagcaaaggcggtactaaggggaaagttcatagccttaaatgtccacatcaaaaagtgtttcataaacttttataaattatagattattggaggggagactgatgaaagaccaaataggaggctattgcagtagcccagaatggtttacttatatcttggtaacagaggcagatatgatgaccaaatacgtgtaggacatttcatataattaaggaaatgacagaataggccaaacaatatttttttgaatcctgtattgactaagactttgactagagagagtcttcagttagaaagtaattctataggagcagtactgaaaaaaaaatctctatgtcgttactgattaacataacactgactgttgtaaaagagaaactcctaaatctcagtggcttaaaacaataaaagtttatttctcatataaagttcaagaggtgttgggtgatggggaggagtactcttcctctgacgtcttcaacaaatggcttcaaaatcctcctgggtattgacactcatcaaccagttgatagacaaggaaagggagggagggtaatggattccatggaaggtttttatgggccaagcctgggaatggcatgtatcacctgcatccatattctgatgtataactcagtcttgtggtcacattaatgcaaaaggactgracaatattgtctcactttttgcccaggatgacagggaaacaagtttagtgaacaaccagatggaatctgaaatgctgtcattgccttggggagactcggttttttaatggagacagtgctctcctggagaccttggacatcagtgccttctggcataagcagtttttaggcagggagtcctccaattatggagagccagcctaccagaaaccaagagcccaaactctttacgcaacaacaggcttttcctagaagatggaattagctgaacagcccctgcagtctactgtttgcacctaaggaagctgctttacattttgattttgttgtatatcagaagactggctgacacaaaacaagaaggcttatcttatagcctctgatatgtcctgttacttcctgctgccaggaaaatgcttaagacagcatgttaatttaggagggattttcaaaactatacggtatgactcaaattttatatttttcaaatatagacatctttgttattataaatatgtacatttagactgttacttcagtgaagcctcagatatacccatttttgctctgcacttgtccctggtgacttccagagtatctggcataccattgtctcaataaaaataggctgaatagataaatatatatgtgaatgcacaaagactggaaatgtacatcagatgttatttaaatatattttaagttacaaaatatccccttgcttaaacctgtcgacttcagattcagaagagtcataccgtgatgagatttactgagcagctatcagcctagcccttccagcacagccctatttgttgactcactccctaggaaggatcagaaacaaagttactgaagtgtagccaagaatttagttattaagaatatttattctggctgggttcagtgactcatgtctataatcccagcactttgggaggccgaggttggagaatcacttgagctcaggatttcaagaactgagcaacaggagttcaccctgggcaacatagtaaggcctgttctccactaaaaattaaaaaaaaaaaaaagttaggtgtggtggtgtgtgcctgtagtcacagttacttgggaggctgaggcaggaggatcacttgagcctgggaggtcaagactacagtgagctatgattgccctactattctccagcctgggtaacagtgagaccctgtctcaaaaaaaaaaaaaaaaaaaaagtttattctaaaatgatttcttaaatgtttatttaaatttaaatgcttaaatagatatatagttaagtataaacattctcaaatctaactcatggtgaaaagagcaaggaggctcttcaaattcatttctcgcagaaagtaacaaattggctgctctctttaaagcctctgcctatctgctccccatctttttctgcatatcctggggtaacagcttatgttccagaggcagctcggaagtctctaatggtcaccatacaggcttcactcactccaaaaataaacattgtaattacaaccaccaccacagtgggcgtgaggagactttcacacatttatatgtcacagaacatcaagggtggaaattgtattgaagcactgttatctgaatctctaacaaagcacacacctggtatttagtaacacattaatcatgcaaagggaagcttttaaacttaaaaaatggaagtctgaaagcaactgcaggtatgatttttaaaaataactttggtagcaagcggtgtctgatgtggttgtcctatttaaagagaaccattagtactgtctgtaatgcaatagccaaacgtattgaccagagcaaaagtttagcaaaatgcctttttcccaagaacatttgcttttgcctgtggaatgctgacaagtaggatgctgtgctcaggcatggaaatgataaatactgtctcttcatgtcagattactgatcacattaaataatccacagcccttgctatctgcagactccagcactaactaactagaagcagcttatcatttaccagtagttgtgtacaccccatggcaccattttcatagattatgaagccatttgtaaaaagtagaactcctaaatttaaactaaaacatctcaggagccatttgttggggaatgtggtttgggcccaaatacactggcttaatagaagaatagctttatataacttctctgattgattaaaagtcttaatgatgaaagctcagagctaatcttaaacaaaattattcaatagaatttgctcatggccctcaactactgcctgctccacattcttgctcccaattctgatgttatcccattctggtattctgttcccaccagttcattatgccagggtcttgcttcctgttcaagtccttggtggtggttaggatatggagtttgtaaatgtaagattgaatcagtggggaataacgttatctcactgatgcaagatactattattaattccattttacagaagataaaaccaagccacagagagattgagtaacttgcccaaggttatgtcactagttagaaggtaagctgggattccaacaaaggaagtctgggtttatttcaaaacgcaatgcttatacataataatagtgccaggcttattattaatcagtaaatattcactggacacctaktaagtccacgacttacaagtgtggatattctacatttagtgataaagcagtgggtaatgtatgggccacagttttagttattagagctagttcttaagagtgaaaaattatttctttattcaatttgaatttgttaaatggggatattctgtgcaaggaactttgagactagagcattaaataaatgatgcttgcatcaaggattgtgatgggaggggatttgtcatgtacattagtttatgatataggacacagaattaggagatgccaaaagacaggtaattataaggatccatggatacagggggaaagattagggttgaagcaaataaggaagggtttgagagcaaagagatagtattgcagcttaattttgaaggatggatagcatatgaacacaactgatataaaatgactgtgatgaaggattaagaaggctaggggagaattttagaggaaagagtttgattatctttgattttgcctgttgaagggtagaagtaagctaaggttggaaaagtaagttagcatatcatggaggacctcgaggagaaagaaaatccaactaccatgtattaagtacctaatatatgccaggcattttatatacttttctcatgtaattctcacaaccacaaatagtagttgtgttttgtgttctaccaagaaaagaaacaaaagcctggacagactgaggaactttctcaaagtcatttagtaatccactaggatttgaattcatgcttgtgtggatcctagcatctgttctttccatttcatcatgacctctttcttttgaaggcaataagaaacccttaaagacttcttaggacagtacatggtatctggcaccagtttgcctgagttagaaggaggcaaggctaagggatatgagtgtccttagcaggaaactggcaggtgaatgaagagtaagaaatcatcttcaggacatggcagaaatgaactctaaaaggtttagtactatttagattttgtagtatagtaggakgtattgataaacacaaacwgggtaacctgtttttaactctgaagtttrtggttgaacctgctttcctgtcatctagctgccagtctttgtaattctggacccttccttgagccatttttatcactttcaccttcatatgagggtttgcattaaaaacagaaccatattgcactaaataaaatccacccatagctcctggcatcaacctttcaatggaatgtgtgttttaatggttgtcagttttccctccattgggattcctatggcgttaattcccaaacacagaacggtatttaaatgctctcytaaggtccagaggaaaaaaagtgaaggagctattctcaggcacttgtggggcaagtaaggaggatgaagagtggaggaagaaggtgttttagttttgtttttaattccagttcaatcttactttgtatattcctctatagtcagaaacaayggaatgtcctagagccctttagtgaagaatgaagcaagataagaaattagtaaatgagtatagtgtacactatctgggtgatggaatagcctggaagccctgacttcaccactaagcaatctacacataacaaaattgtacatgtgccccataaatttgtacaaataagaaaataaaaaataaataaagcaggtgcttagtgttccataaaggtcatcaaaataaaacaaaccatgtagcatggttcctgccatttctatactccccttccctatatttttagcatgttagtacatgggttttgatttacaatcaattttttattctcagaagttcttttaagcatctttatccatttatgagacagtggaacaaaatagcaccaaattatagtttgatgtgaaatctttggttttcccttggagatacacttcattcgagtaagtagagatcataggctaaattaggccattgtgactaagatacagtgcatcatccaattctataaaaacagagtgcttgactgaaagcaatgatagctattaaaaaatataaaattggaattagaagaattgagaggaaaccacttccaggagtcactgactatttaaaatatccaggaaatttttctcttaagtctggcttggcattcatgattcttctaattcccagaaaattaatatgtgaacttgaacggattttgtgatcacttgtaacctccagaaaattggcggacttggatgctgaatgcattgtaagcttccttacagatctccagcctagttttaaaatagatgctttgcattaggatttagccaaatacttcgttaatagtggcaaatgttgtatttttctgtgactactatttttttttccttaacatccaggcattttaggaacctccaaagcagtgaatttcaacaaattgggtgcttcatctgcttcaggacaaacactttcagctatttgttacaaaacctgggtatttttcaggcattggattagtcttaagaaaaatgttttcatcaaaatgttctaaattcttacattaagtgtcttagataaagccatttttagaagaaaattcttgatgttggcaaaaggtagatacctggaaaaatttcctgtcttttctccttaaactggaactataccaattagagtttcccagcgtaacacacttcattcatatggtaccatgtgactttaaaaaatctcagatgacgagaaggaatcttcattttccaagcttgaaaaacaagaarttagtcagacttgtgaacaagaagacactgtggagagtggttagggctcttgcaggatactaaaaaatgatcaagaattatgtttggttttgtcccctagccatcatgcagtgtttctttcatatcctaaagatgctaccaggatgaggaggccagcattcgtgggaattggtggcaagtgttggaggggtgggtggcagaggcagtgaaggtgagtgatgctggcgttggaggaaagcagtgaagtaaggataatgacaaataggaaaatgtcactttttccaattctggtagttcagagctttctcattctcttagtctttgcttctttcaccatgacactatggctggagcccaggaaggaaaaggatccccatgactaaaaccagtgacctttccaattttccatcctccagtgttgtatgacaatgctgtgcttttgatacctctcggtgcagctgtgctgggagtctcttactcatgagactatcttcctggaatacagttgccaaacacatactgacccacctactgtctgcatcagctattaaaacacagacctgctactcaagaaactcaccatcagtaggggagacagacatgaagacagataattatactattatggcacaggttgggggaagtaggagaatcctcacaaggctatgggagtgtagggtaggaagctactgcagcctcaccaactgccatgaagcagggactgcctgtctgagtctgcatcctctgtgtagtccagcctttgtctaaaggaagtcctgggtatcagaaaatgatcgagaaaggggatcagcaaagcagagatttaacaactgaatgtacaatgttggtagctaataagaatgccctccttccccaatccactaagctgaaaggatagcagggaaagaaggaagccattgtgtttcactgtaaagtctcctcagcaaaaatcagttgttttctcgctgaactaaatctggcttttgtttagtgagtttcctttgtgtgtgtgccttctctggtcttttcccagcatccttttattatcagggacagaacactgtgaccttttgcgcagggttaaaataacagcagtagctgaaatgaaggttgaattttgctgactggtttacatcctccctataacttgctgtctgcatcagcaaagcaggtcgcccttctgcccacagcttccagtaatgttgaagctgtcaaggcaattaagtctttttacccttttaagttgatgtaacatttcaccctttccattcctggacatctactcactcccattctgttaccaagttgtttccagcattcctgggaccatttactccccattccattttacaactttgacccatatttgaaacttcacaagtttaacccattgtagttcctatggcttccgtagttttcgccttgttttaggacaggaataaatacttttattccttgggggcggggataggtatcatcaatacctggtatcttcactatgaggtgaataaattgatctataggaaacaataaatgctacttacacgagagagggtagcttatccccatcttactgaaaaagaactaggacttcaacaagccagttgacagatagggactaaaatctatgtacaaggcattttgctggccccttagggttatgtgttgaggaatatatattctcctaaattatattaagtcaggaatgactgaggtgatattgggattttccatgctcttccttacagtctttattttattttattttttggtgttggggagaccctttcaatcctgttttttatctgccccagctattcctctgtctctaatattcccatctttcacaaatagacccagattttttttctcattaatgagtacttcaagttgaaggtcagctatgccttagttctgggaatgactgaggaagagagggaagaaggaagggaaactcaagaactcacccatcttccttacactctgaaaatagattcctactgctgaatatgttacctattccttcatctttcctttcactcccatgtttcgatggaaaaatgctcttagtagccaaagtttgggtttttattgaaatatagatgaatataaagctgtctaaaacagaggccacaccacatcatctgtttgcctcagccttccctctgcaggatgatcctgtaagataaagtgtgatggcttttttctttcctctcagcgtccacaccattatcccaaatagaaatctatatgaaactctcaaaggatagcttgcttcaggtggaggagtgatgtgggattctgtttccagggaactagggaaaggaataacactggtagatggtaggccttagaagaaagtcatgagaaggagcagagaatttcattccagacatgattaggaatcagaaccagcggggttcagatacatccctgggacttagccttccatggttcttactcctaacacagaaaagctgtgcttctcagactttcgtgtccatacagatcagctgggggattttgttaaaatgcagttttaattcagtaggtctgatctagtttgagatttgcatttctaacaagttccctttgcttctggtctaaggatcaccctttaagtaacaagactcttaactatccatcattatgtaaaaagaagcaggataagaagatacttaaagttaggcctactaaatttttcaagttgatttgtaggtaatacagacatccccttttcaagtcattctccttctgctccagttccccacttccccttctctcatgtctgaaaggttggcagccgtttcatcagtcctctctgctataaatgaatccaagttatcctggaatgaggtcgcattttccaaaagcatgtttctagtctatggtgaagggggagggtctacttgaacagttgaggcttgggaagcatattctttgtaaaacacagcagtgtctgagtagagtgtggatctgaggactttccctaggcaaaggaagtggggaggcccagagcagctgcgtgtgcttttctaatccagctccttggatttatagaaatagaccgctggcatgtttaaggcatcccagttaactgcagctgagaaaaagtctccatcatttctgactgagctatccagcctcacaccaaagtctctgtcatttctatggacccccagaagcttaatcgtagtttgactggtgatgaatggattaatccagattatcatcacgacttcttgaaattacgttccctgtagatttggcttttcagaaagagtccacctatcaaacattctgaatgcaatgaaaatatttaaaggtttcccagaattcatttgagaacaatctaatttaaaactgcatatttttccatgaatgtttagtgagcccttgctatgtggaccctgtgttgagtactcgggaatatarcggtgaaccaaatgaaggcagtaactgccctcatgaccgtagggaactgcctgtggtctctatcagggggacagcttcttaacaagctgtattagcttgggctgccaggacaaagaccacagtctggatgacttgaacaacagacatttattttttcacagttctagaagttaaaagtccgggatcaaggttccaggtggtttagtttctggtgaggctgtcttcctggcttaaagatggccatcttctcactacgtccttcacatggactttccatgtgagaggcagagagagagagctttctggtgtctcttcctataaggatactactaatcttatcatgtcatagccccatcctaaaagaccccaccctaatgacctcatttaacgtgaagtacttccttagtatcccctatctccaaatacagccacgctgaagttagagcttcaatatatgaattttgggtggacacgaacagtccatagtacaagtaaacacacaagtaaatcccaattacaaagcatagtacatcccaagaaggaaaaagaggctctttttagagctacattccatggaattgttatagaaagcttacttttattatccactaaaaatataaatcagaagagccaggagtgtaaaattgagaatgatattgtattctgtattctttcttggaacgctgaatctattttgtttgtacttgcctcaaggcccacataataatctttgacttccttcaagagaatatgatcgttttgtaaaatgtaactatggccattgcctgactcttgaaatgtaattacatttctaagtacttcactttttggtattcagcgaaatgagagaaaggagaaaaaaaaaaaagcactctgtatagagtttcattcccaattttttttttcacattttgtttaatatctaaagattcttgttataatgaatttaaatcttttttgttatggtgattcttttttaagtaaaggggtaaaattgagaatgcactgatgtgaatttcagtctttcaaactgaagttttagaaattaaatataatgtcactttttggcagaagaaaattaatgtgggaaatttttagaagttttatccaaacgaacacaaacttggmtaagtactgaggagactgctgaatgtaagaccctatgttacgcacagcttgtagttattcccgattgtaagatgcactattaaaagttgtttgtggacaacaggggtcagtggtctccttaacatctgatgcccatgttacactttcctgtttctattggggaagacgggggagtctcctgttcgagagaggcctgtccctcagagaacaagaaagatgtgcatcccactttaactgctgaaggaaggaaaaggaattgggaggcctaatgaacatggaatttgactttcacaatgtatttctcatggatagattcttggagaatggtgtctgtttgggggcatttaagagggatattgaaagagaagagctgttacagatggagaacaagatggaggggggcatacaattctgtaatgtgaagaagaggcgggtagtaagcttagttcccttagtttctactcataatactgaatgaagtgaggtgaggggatgggggcagtgcctgagtcttttcatatgcctgatgcccaggtagctgaaatccatgaagggatacaaggtgtggatgaatgggtgaaaaattcagaatcttagaaattgtacaacgtgagaacaatctttaaagcagttaggactctccatagataaatgagctgcctggagtagtggagggagtgatactggcatctctgtagaggtccaatcaaagcttcatgactgagcaaaggtattttacatgactgaaaaaaaaataaagatcctagtgtcaaacagctgaactacaggcccagtagtatctctcccaatgttgatattctatgatcttttttttttctctctaccacattccaaagatatgacaaggctggatgtcactactgacgtcggctctcagatcagtctgtgtcgtggctgatggcttcaccagatcctcagagaccaggctagttgccctgcaaattattcaagattcaattttctcagactatgaacttcctttgaataccatagttatataaggcagaatctttcatttcctaaactgattaatgatgataaataaggcatttagaaaataaactataggtgggggtggagggttctgattaggcattatttcagtaacctcactgttccagtagtggtcttggagtataatgcagcatagtggctaagaacattagaatacagtgcagataaagcccctgcatatatggccagctgattttctactaatgtatgaaggaagttcaatggagaaagaatatttttttcagtaaatggtgatggaaacattgatataaaaaaacctcaatagattgtagacctatgtgtagaagctacagttttgaaatttgtttaagaaaacagggaaatcttagtaactctggatttgaaaaatacgtcttgattagaaaataaaatacataaactataagagaaatagatcaacaaattgggccccataaaaattaaaagtggttgttcttcaaaagacacttttggctgggcccagtggctcattcctgtaatcccagcactttgggaggccgaggcgcgtggatcacctgaggtcaggacttagagaccaccctggccaacatggtgaaaccctgtctctactaagaatacaaaaattagccgggcatggtggcgggtacctgtaatcccagctactaaggaggctgaggcaggagaatcgcttgaacccaggagacagaggttacagtgagccgagattgtgccattgcactccagactggggcctgggtgacaagagtggaactccatctcaaaaaaaaaaaaaaaaaccactttatttaaaaataaaaataaaaaggcagtcatagactgagagaaaatatttgaaaaatatatacctaacaaaagacatgtgtctagaatatataaagaattcttaaaattcaataagaaaatccaattttacaatcaaaaatatttgaatagacacttcaccaaatatgatatgtggataacaaataaatacattaaaaatgctcaacatcattagagaagttaaagacttgtatctgaatgtttttagaaaatttatttgtgatagctaaaaattggaaacaagcggccctcaacaaatatataacaaaacaaattgtgatattgtcctagaatggaatactactcggctattcaaaggagtcagctgttgatatgtgccacaacatgattgaatcctaaaatagttcttctgagtgaaagaagctagataaaaagatttgctgtatttttcttttcatataaagttttataaaaatttaaactaacctatagaaatgaaagcagatcaacggttgcctcagtatggactaaggaagaaagatgaatttgaaagtggcacacggaaacttttagggagagtggatatattcattgtcttgatcgctgtgtggattcatgggggaatgcatatgccaaaattcatcaaattatattcttttacatgtacggtttactgatcatcaattaaactcactaaagacagatagatagatatgtatgtgtatatacacacatgcatatatatatatatatacacacacacacatttatatgtatatatacttatatacacataaacacacagcaatatgttcttagacacggtaataacctttctatcttcgatttacatttgtataaattggggatataatattacttacttcatggagaacagtgctaagcatggagaaagatctcaatcaatgtgagctaaaactattactctgtagtatagttcacttcttttaaaacatattttaaaagaagtttgttttaaaagaaatatgctttaaaagaagtgtctatgtcctttgcagggacatggatgaaactggaagctatcattctcagcaaactaatacaggaacagaaaaccaaacactgcatgttctcactcataagtgggagctgaaaaattagaacatatggacccagggagggtaacatcacacaccggggcttgtcggggggtgaggggcaagaggaagggagagcattaggacaaatacttaatgcatgcgggacttagaacctgaatgacaggttgataggtgtagcaaaccaccacggcacatgtatacctatgtaacaatcctgcacgttctgcacgtgtatcccagaacttaaagtaaaatttattttaaaaatgatttgtttattctatttctccacttttttctttgtttttgaggatattcgttaccaggaaagatattgtgtttcctcaaggactattttgtggtatgtagtttttagaaggtctgactcctgggcaagtgtgaatagaacagatgggtgaagaagcctttcaaatggcattcccaggcctgagaggggaagtccttgtgcttagaaattttccatcctcctccacagctgaaatgcctcccttggctgaaatgcctccctcagcatttttgttttgaacgccctttcttgggggatcctaacccagctgcaagaattcactgtgggctgaaacctggcagatkagatcttggagagggaaagtgatttgaaagtaatgtttgttcttaaaaatgacaaacaagtattgcaggtttctgttattttttgtgttccaattaaattgttgaggattttgaagatcagttacaagacctttgaatttgccaaatggcaggtttcctttgctccttttaatttttaaaagaaaataagctgtaacttgtaaaaattggctcttctttaagcaagrmcttcttattacagctactaaatgcccaggatttatctctatatgcttttcaactatggcctctagtatgaaaagttgagcaaatttttaccttttccgtattaaattgcattgtttgaccaaagattaaatgacattatcttaatgccatwaaattctatgtcattttttcctatttccattttttatagagaaaaaacaartgttattttgtattggttgttcatcatcctgacaaaagtaactttttcttcagytgcctcttcactcttttctcatccagagtaacctcccagctattaatagcctatttcctttaaatcctaacctgtacccgcatcaaatggcattagcattgtcctgtttctgcattattgattctaacwtatcaaattacatgatgatacagttattgatgtcacaggtgaactaacargacctgcactacctatagctatgactggtctgcttcagttcgcagattaggaaattgckacagattaatatcctaatttcagaaggcatttgacagtatcttttatattatgacttcatgaccagctagataaatgtattatcattggtattgtgtaggtttgtgaaacaatttacytggtatcaagtaatgaattggtattaagctggaaggaggtcactagtataggtagtaagtttcaggctaatactcttcattcttctaatgtaatagaatttgcatgaagctgagatattataactttataagagaaggtaactgagaaaagatgaccaattttattataaagcacagtctctgtcatgaaggacraataaaatctaatggacttgtgttttcctaatattcctcaaaaaactcatayatacacaaacaaatgatcatacagatatagaactgtagagaattgacttagccacaatatttatgaggactcraaagttttagtaaattaattggaatcaatgataagacatgccttccagaaaaaaacaaaacctgacatctaagtctgcatctatagaagcatagatacttctagagatctgaatttctgtaatcattttgaagccccatgtcttaagacattgacaagtagagaggattaatttgaygcattcatttaagaactagagctgtgtcttcctgcaaaatggaagagtttgtgaatatgattgtcgctttcaaatatctwaaaagctattgcaggaaaaaggaattgcattactcttctttttgttcttccaaagtgcaaaatcaagagcaatagtggaagttatagagagatagattatggttcagcgtaagaaagaaatcccgtttgacttagatctttcgtaggacagaatgaactcttttggaaagtagcaattttgttcacatggggaaaatttaatcagagactggatgaacattttagattgatttatattagcatttttcactgcatgtcctgcaaattaccacccttgtaagatattttgcaagtttctgggtcaaccagctttgagagatattacagagtatgttgacctcttgaatatttacaatgtgcatcagcatattagagactctgaaagttccacaataaagaaagctgtttaactttgtgtaacccggcatttcccaatttatttaagcccctcagtttttcacatatcgtggaacaaatatgcttcagaacwcacattgggaaatgcacttaaaggaggtgaaccagataactttgattccrtgaaactattttctccatatgtattgacaggttattttataaattcacacacatacatctgtgtgtttgtgtttgtgtgtatctatgtagcygagggtgggttttaagtcttatttatagataggtgacaattttgaaagagtttttatgaaggccaataaattaatagcatgatgaataaatactcctttaagaatctcaactgcctcaagaaaactacaattcttaaytttccatagagatgtcatgaaagcgaaatgtatttgtcacatatcaacaaccactcatcaacctgagaataaggctaaagctccagaacttttttttcttctttttttccctttccctcccctgccatttaggcraaaagccaatttcttgaaagtggtacaggaggggatgtgagcaaatacagcgtaatgattgagctacaatttaagcatctggttttatttatgtgcaagcaccgtgcacagaacttaattaatatgactgaaaaaaaaaccatgtgtctattgaaatgttaggtagtgcctcacatatgtgtgtttctctttcctaaacactccccgatcctgatctttttatcacaccttcgagattcagttttgtgcaagatttatgaacatgcagtttttcttcctcttctgactttctatttttctttccctgtagttttatatctagaaaactactactttggcaagggttgaggactgagtcacggacgtgcccttactcacgtcttctgtratttgaaggcagaatctgaagcaaattccaacacagctgtgagaggcagcccgtttttgttcttaaaatgctaactacacacatttgcaaacctgcaaagctatttttctccttcctttggaaggtgttaaggctaaaaggacatgtagacaggagacagcaaggagagtccctttcctgtctctgttatagaacttctatttatttttagtgtttattttttcacttgtgaatgacatgatactgacctggaagaaacattgcttctgggatatgtagctgatctcctgctactgtccctatagtccaccgaaaagttaaaaggcttcarttctgatcatcttctccaggagaatttttatagccartgatgtcaagcttacattttaactttgttttcatttgtttgttttttaatatacttggttattaatgtcatagttcatcaatagcctaccaggtacaaaaatcatctagtaaaataaagcaaaatctatggtagttatattattttcaaaactattttttggcattctcattgtgttgcccagtctggagtgcagtggtgtgatctcggctctctgcaacctccacctcccgggttcaagcgattctcatgcctcagccttccaagtagttgggattataggcacctgccaccatgcccagataacttttgtattttttggtagagatggggtttcaccatgttggccaggctggtctcgaactcctgacctcaagtgatctgcccacctcagcctcccaaagtgctgggattacaggtgtcagccaccacacccggctcaaaccatgtttaagttagcagaagccatttttaaaataaaatctcttgaatcattgtaatttttttaaaaagagagaagaaaaaataataaatgaagatagttgtgttggtgaaactgctcctcttctgtattcaacagtccttgagggacctctaaagtacctccagaagtcattgtgacagccacttctctcaaatgcaagaaatcagaagaaagacctgtatacataaaaaaaggataaaacaagggtaaagcatttctttgtgttgagaactttccaaatcttaccttctagctattttgcaatagattataaattattgttaactgtagtctccctactgtgctattccatactgkaacttattccttctatctaactgtatttttatamccattaaccaatgcctcttcattctcacctctcccactaccctttccagcctctggtagccatcagagactacttactacctctatgagatcaattttttagcacctgtatatgagtgagaacatgcaatatttgtctttctgagcctggcttatttaccttaacatactgtcctccagttccatccatgttgctgcaaatgtttcttcacaggaaacatggtgtatatatacacacgagaatattattcagccataaaaaagaatacaaccctgtcatttgcaggaactcttatgtttagatatctgtactttcatgttcattgatggacacttaggttgatttcacagcttagctattgtgaatactcctacaataaacatgagagtacagatacctcttyaatacactartttcctttcccttggatatatactcagcagtgcrgttgctagatcttatggtaattctacttttagttttttgaggactctccatactgtttccatattggtttccatagtggctgcactgatttgtatctctaccaacatcrttgtcaggtcascatttgctatatgaagtcttttggattatagccattttaactggggtgagatgatatctcactgtggttttgatttgcatttctctgatgattggtgatgttgagcaccttttcatttacttgttggtcatttgtatgtcttcttttaagaaatgtctattccgatcttttgcccatttttagatcagattatttgtttttttgtttgttttgttttgtttgctattgagtttcttatatattctagttattaattcctcattagataaatagtttgcaaatatttctcccattctgtaggttatctctttgctttgttgattgtttcctttgctgtacagaagctttttagcttaatataattctatttgtcaatttttgttttggttacctgagcttttgaggtcttctacaataccaattagagtggcttaatagggtaaattaccctaaaataaattaaattaarttaaaaataaattaccwtaaatttctttaatttacattaatattgggcatttagttagtttaattctctgtggttcaattacaaattttatagagaaatccatttgcatcaattttgagtttatatctgattgtttcttaaaggtaacctgtgagattatagtgttgaaatgtttagttttaatgttwctggctactatgacaagctattctggcaatagcatccacagctacagtggcccacacatccaaaatggatgagggctctctaactctgctcctctcttcatcatcatctaccrttacttcatttggccagaacaatggaatttggcagcattatacctgagtagactgttcttcctttcatcttccacrtaattgaaaccatattgtatgggtcacagaaataaagggattatgtcgatcttacccctttggtgtttggcatgagttatctttaagacgtttattcaaaataagtgtgatatcttgtgtaagtcaggattcaaccagaaaaaatagaaccagatagatcacaagagatgtactgcaaggaaacggcatacacgrttgtggaggctggcttggcaagtctgaaatccttagggcaggcaccaggaagggcaggtttgaactctttttttttttttttttgagatggagtcttgctctgtcgcccaggcgggagtgcagtggtgcgatctcagctcactgcaagctctgcctcccgggttcacgccattctcctgcctcagcctcctgagtagctgggaccacaggcgcccgccaccacagctggctaatttttgtatttttatttttagagacggggtttcaccatgttagccaggatggtctcgatctcctgacctcgtgatctgcccaccttggcctcctaaagtgctgggattacaggtgtgagccaccgtgcccggcctaggtttgaactcttaaccatgagctgaggcttctgtctacaggaggaatttctttttttttttcaggaaagacgaaattatcttcctaaggtgtttcaattctattcttaagggctttcaactgattgaatcaggcccaccaggattatctaaaatactctgtcttacttaaagtcaactcattatggactttactcatatttacaaaaatacctccaaagaaacacttatattggtgtttggggactgtagtctagttaagttgacacatcacagctctgtagctggttcttgttctgcctctctctctatgtctctctctctttctgtcatacttagaactaggatatatgaaggatttggttggggggaaggaaaaatgaataaaaggcagcaaacaggaatgcagaataatgggaagaagaaaatttgaatttttttcagatgtctcttcttacagcaagagccctatttattcttgctaagggaaaagaatgtttagagatcttagctgccacgaagcttatatctaagtgtaccacacaattgcattaattttctcatcattgcaaaataaatccaagcttttcacattggcctacaatggcttagatgatctgggccttgcctgcttgttaagccttccctaattttattaggtcctataaaatccagcatgtttttcttttcctcagagatgccaaaggtcttcctcaaagagcctttgcacttgcttttctctttgccttaaagatcttcctcaacgtattttctctcctgggcattttattgagttcttagctcaattgttattaaatacttactcagaggcctttctggctaccttagctaaaggagtctcctcctccccaaattactgtatcctaccatccaatttcaatttttagtgagaagttgtatctatattaatcttagcgatttcacacgtttttctggttactgcatgtcttcactttattcatgttattgagaacagagaccctttttcttccctccgctaaatcatagtgacaatagccttacctgacatttagacgaggtttacctcatactcgtggaataaatagaggcatcgcaattcactttccaagtacaatcaatcactcctccatatgtgatagtttttgtcctagcttgtaccattrtattttctggctacatatattgttattgtaagttaccttacactattatttttggaagttgttagtgtatagtgtatgataagtgcatgcttttgcagaattaatgaagtgtccctggtgaggattctcatgctccagtcctgagtggaacagcatatatcaatgtcgagaattcttactggggaccacaagcgaggcagatgtcagaactgttttctgtgtgcactgcmttctagygagaggtgtggcagctgcaaaggattgagagcccagagaatrtgccttggctaaaagtttctgtattactccaccactctgatttctctgtactgtaaaatgtctcccatttggcatctggctcatctgaaactaatgtgtcrtgtgttaggattatgcagagtggtgagaaggcawtgagcatctgggaaacaacgtgtgctcctgacaagtgctcaagtattagctaatgattttcaaaatatcctgggaatggagttggacacctattcattctyttacttgtgcttttgttttgtttttattttaaagaaacacttatttgaccctgcatttattttaagaggtgtgcaatatgctamctaaaaatgaagtaaaatataacaatctctctttcattttatacttctttgtaaagtgtttatgactaccttggaagttcaggaaagcaatacagttctgttgttttgttttgacatctccctggaattcatccaaataacactataaaactcctatttcagtaataaaagcatgattttaaggcagatttgctagaaaaatgctcctgaggtgcattgtcagagtctgctgccctgagaatcttccatctgactctgggagacacagctgtgaacttgtggaacatgttggctcaaggttcataattcctactctcattattgtttctaattatgatatataaacacttgattgatatcaacaacagtataaagtctggatagtggtaactacggaaggtgagggatgtgttagtttgagtgtagtgatcattttattatatgtatatttcaaaacatcaaattgcacacattaactatatacaattcctgtttaccagttatacctcaataaagtgagrggggataaagatcaataggaaattcttgtgtagtgaaattgtggcaagttctcacgggtgacctgcactctgctgttctttcttccacctgtgtaaagtacaagtttaaagagaataagaagaagctgagagttgcgaattacccatagsaagtcagcactctttccactcatcactctgcagcctcatcatctccattcatcagtaggctccacatggcttcctggaggttagcaactctggttccttaattttgatttgttgctttggcgcttaaaggatgacaactgcctgaattttcatgaaggtacataataagccttatatgagatcttactataattaggaatatgataaatgtatatgatgttccatctgagcatgtgcacatgaacacacacacacacagacgcttctattattttgtgatattataatataaaagtgattttgaaattgtttcatttcttacattttcaaacactttcctatacttactctctcacaaccctttgctaataggccatgtrtggtactctgttctgctactggaaattagtttaggaagaaaaattaacgaccatttctagtgattacatttcaaatgaaaaaaatctgccttcattttyagcgttaaaattgactagcctttgtttctagtctggctttctaccaaagcattattttatgagtgaaaaaaaatgttaagggctcaacagttttctccaaaatgtggaactctggggataaattttcactgccttctcctgactcttgtttctaagaacagtcagtatgctggaatcccacttacccctaaaagggaatagtaactatgccaatgtaaaataggaaccattcctttgaattcaggtcaaaaggtttactgtagggactggaaatgatgcaaagtagaacatactgtacttttattcataaggttgttccgaaggaagattctacattaattttgaaaatcttttattacaaatatactaacatcttatattgctatacagctttagagtttgcagtatattctgacatactttgatatattccacaatatgcctgtgagatagatggccagattctacatacacacacacacacacaaaatcttacaagacaatgaagttcttaggatatcctgacaccaaggacacacagagtaaacaagtaaaaatttttggaaccgtgtcctcagattcctaataccatayactttctgctgtcagtttcatagttacttgccacaaactttgtggactggataagttaaacaaaaaacatcaaatatggcaataaccctcagtccctaatagagttcagaatctcaacttcctattcatgtctattaggttagttacacatcagaagatcctagtcaggataggtcttaaccaaaataaataattttcttccacccctccctctactcctccaccattgcattcagacgatagaagccagttttagagtttaaagccactaattaccaaaagccattggtttaggcacttacagactttaatcattaagaataaagaattgccccgtggggaatgtgttttccatgcatatgctgttctaaactgaaaacaaactaggtaagaaaaataaacaaacygggtaagtgattactttctttttactttcttcatatgcttttttgtatgttaaaattttttttaagttgaacttcccatgaccatgaatttttaagttctgttcacagcattgtttttcacttaaaaattaaaaattgyctttgtgtaaaaaattaaaaatttaaaaagcagagtgtctctttcctggtacttgagaacataaaaaaccatataaaagtaatagggagaaattagctaattcaggttttaacatgttaatagaggggcaacaatgactagaccagctgtgctattgacctaggtctttgaggcctttcaggttgcaargtagctattattctccttaagcatttgcaggtcaggcatggaaacttttaagcaggctctgactgaagtactagtttgcattctgtaattgcagtaagcagagccagctgtgaacctctcgggatttccccttattggactaagaatttaaacattttgctgagtaggcrgtaaagttttcttctcttcactgccaccctcctttaaaaaatatactcttaatatgctaaaaagaaacagggtatgaaaataaaaaatgaagaacttatgtaaacacaaattttagkgcttttttttttttttttttttwaagacaggttatcactttgttgttgcccaggctggagtgcaatggcacaatcttggctyactgcagccttaacctcctaggctcaaatgatcctcctacctcaatctcccaagtagctggggctacaggtgtgcaccaccatgcccagcttatatatatatatatatatagagagagagtgtgwgtgtgtgtgtgtgtgtgtgtgtgtgtgtgtatatatatatatrtatatatatatatatatagtagagccatggttttgccatgttgcccaggctgatctttaactcctgagttcaagtgatctgcctgcctcagcttcccaaagtgctgtgtttacaggtgtgcaccaccataccagacctttagtgccttcttgaaggtcacacacgccaacatatggaaattaactggtactatgtgtactagctttgtagtagctgatacatcataatcataaattaaatatttgttgaatggattgcatgctaatcagctcattttttgcatagagttcataacagaaatgtatccaatgtatctgctattccaataactttccacaggcaatgatgcagtttgtcttaagtcagggatactttgtgtgaaaccaagaaatcagaagatgtaaatgacttaaggcaatattatcaccattcctggaaaaacactactgtctatgtttgtgatagcaaacataaaagcattaccttccttaggtgatgaatatgaacatttttagtcgtatatctggtgcccttagatgaccagtcagatcagattccatgtctttatgaaaagatggtgttctcgtgtcttgactctgatggaacaagctgcttttccaaagttattctgcaggtggtggattcagtaaccattagttggcattctcccttacaagcctcaggtaatcctgtgtgcacaccaggtttatggaccgaatgagtaccacartggtttatagacccaataaaaactgtttaaatatstggtggtgctttacaaatatcttcatcccaggtttttcaaatctcccctggaatctatgcagccaaatgtgcagttgttctgtaactgatggtcrcctggatatcatttgataaaagtgtaagacgggttttttgtgtgtgtgtgatgccaattactgaggacttgaagatacgcatcttgaattattacatataaaaagattaaaaggctaaatatctatttaagaaatatctaatgcaactatagtcactgctctcacttctccatattcctgtgagtttttgttctgttccttattcttagagtgtaaagtgaatcattttaggaatgaatatcatagaaagtaaatacagggaacagaaagcttaatgcattcattattcattcctttccatcaatactctgaacacctacagagtgttctaggctcactggggaaacaagaatcaataaatctcattttctccccttactgacctcatgatcagtagaaaatcaacccgaataatctcatactgattcctccttcctgtgagtcctcatgcgttctggaaacctttggagggatttatcatagtccatattacttaagagtttgtgggcatttcttttatgctccttggtagatgttgaatgcctggaaggcaaagactttgttttccctatctttatatccctggttccctgtgtagtggttactccatgctatgggcttaacacatgtttttaaataaaaggttcaacggttttgcaattaacaatatataagactcttagctagtaattttgtatctttggggcctgttttctcatctgtgaagataacacatgctatatttcatgaagttatcatatcagaattagatgcattaaattytgcaaactgagaagcaaagcattataccaaggtacagacttattaaaattgaatattgctttcatttaaacatgagttgccatttaactatggctggtagttgcgtttgggggattctgttactattagtggaggactcaacaatcatatgctccataaaattgtccttccttacagtgctcaattcttttttatttttttttttttgagatggagtttcgcttttgttgtccaggctagagtgcaatggtgtgatctcggctcaccgcaacctctgcctcctgggttcaagcaattctcctgcctcaacctcccaagtagctgggattacaggcatatgccacctcacccggctaattttgtatttttagtagagacagggtttctccatgttggtcaggctggtctygaactcgcgacctcaggtgatccgcccgccttggcttcccaaagtgctgggattacaagcgtgaaccaccgcacctggccacagtcctcaattcttaaacatagagttaaagagtaggatttcatgaagcatactaactgcagtttattctttaaaacttttaacctctgccttgtccataaatgtgaattattgtggcatatggtttcattcagtgtatgataaatattgtatgtcctttaggaaggaaactataaggtatatttctggcttgtcttggggatgaaataaatggcctctgcagtcatttccacctctggcttcagtgattaatgcatcctagrggaccaactttcttttagctataatgccagcttctatccttatttcatccctggagctttaggcagaaagggaactraaaagtcatcagcttttattttatgtgacttttttctactcctgtttgggtttcacttttttttttttttttttcattctgcagttagttcttcttgttgaatatctaggtttttatctaggaggacacctggggtgattgagataatgcaggggtgtatctggtgtttggagraagactgtatgctcaggaggctgagaggccacagcacttctagtgccaaaagttctgtttatctcatcatgttactcactcatagtctccaggaagcttgcagccaatcaggtttccttgtttgtgacagtttttttttttttttttttaaacctagtcttgctctgtgccccaggctggagtgcagtggcgcaatctcggctcgcgacaggtcttgacttgcagtgtgttaggcacagtagataagcattttgtgaarcagtwtgaatggaaatcaaaagcaatttgatctaattttctcttagatttagttatatctcaataccaacttctaattcagttttatttttgctgattttctaaaaagatagttttcatcaccagtgtgaattagcttgtcattagatcttggagatctttgagatcagtggagaagtttcaacttaggcaggagagtggctttgttacaaaaataaatgttggtgatggcttatcgatattgttatttgagcccatgtgtgatgctttcattgcwatagaaatattctgttgtctcattttaaagaaactattattttgcttaacaaatttgagtgtctgcaatatgtgacataaaggaggygcaagaaatgttttagacacaatagccatagttaaattgcttataaattgactttattaaaatgtcttaccatataatcattaacattcatatctcaaataagtgtcagtaatttaaaatgacctttaaagtcatgctgatcagtaattgtaaaaagaaaacagagagtcatgctaataaggtgaatagatgtgacagattgacgtgttgacatcaagggacaagaattgattcaggtaactaagtcaaactatttgctaaaatctgagccacggtatcttattttcttctgcagactctatccagagcaatgattcttycctagggtccatatttttcctgaagcttagggatctatgaagcacataaaattgtgtagatgtgatcatctttctggggagaaatctagagcttatactagattctaaaagtaatgatccagtaatgttaagaatcattaatatagatttttacttataatttgcttctccttttagggaaggcagtgtcagaattctagaattaagttgaaaaggtataaattatacaccttaatgctctcctttccagctatatgatctcaagttatccaaccacaatgtttttttaatatatgaaatgggcagataatcccttcactcctaagtgtcaaatgagatgagctatatgattggccagaataaactataaaatatttgcagacataaacattattactattgtttgggcttctgcatgtgccaatccatgatactattttgttgttgttgttaattgaaaattttattctattaccaagtaaatatatatatatatatttttatctttccaacgttgccaacatagtttctcaaagaatgatgattcagtttttccatgcctttggaggcctttgttgttaaatgaatcagtgtaagtatctcatgtaccatggctgctscctggtttacatcacagtggaggagaagggatcatcgctcaagggcagagcagagggtgtccctggtctttgtcagattctacagagggaacttgggggaactaattctgtttccttataattgaagtcaaaggtagactcagtgagtgagactgagggagaaaaagaaaagtggaaatgaatgtgatttgacattagagtatgagttttaatttctgtcttgccatcatgcaatcttaagcaagtcataattcctttaagactcaatgttaattttttttaaaatggagattttaaagaataatctcacaagattatgttaagaatgaaattatcatatctgtgggatgaagcttgtcgactataaagtgatataccagtttagatgttataaattgttaaggcatagtcatttgcacaaaattctaaggtgcaaaataatttgatcactcccttggacttccttttgatgggctttcaatactgttgtatttattcaaacatgtatgtagtctatatgtatgatttaccattcctttggagacacaagaaatatgtggaatgcatcattagttaagagcaaaattctcaaatcagaaatttgagactaactgaaaaatgagaaagtttgggagaaaaggaagagtcatgtggttatacaaaaaagggagacaaactgtgacttcattttagagaacaacagaagtgggaaggagatggtggtggcaactgagactttcagaagaaaaaatttcattctgaatatggmaaaatgggaaaccaaatggtgcagaagtagagacaattcttgcrattgaataaaataactggtcagaaatattcatccaactaacaaatggtttccagggacccttcactgcagcttactgtgtagaatttaaactaagtaacttaacaattgakaacataacctgtatgtaccctttgtcccctgcccccactccaaatattactgctaattagaagcacatgttgaaggaaaaactctaataagacattccrgtataagatctgggtttgctttaaatcccccaagcagcctaaagcccaacagaaggtatttagccttttgccttttgtttaaatggagattattttgagttatcaatagtgcaatactcccatcctgctgtcctttagtgtaaattaaggcaaaggacatgataacagtatcaataaaagagcaaaagtaaaaaataaaatgcataagattattaatgggtgacagaaaattgctatatacatcatagctggtagattaaaagggagtgacaaagagatgtcctgagaaatttattcaagggtttacaagagaaaaraaaatgaaggatttaagactgtttaatctttaagaatttaaaacttttaaatatctctttaataagctttatattcacataacattttaataggattttatatagactaactcaattgtcaaatatactgaggcaggttgggtatcaggtatcctctaatacctattaaatagaatgaaccagagaagttaaaatatttttgtaaagttatgcagcaaataatgtgggagccaatatttaaactctggtcttctgatataaaagcttttgttttatgaactattcctagttgccaaggaagcaattacaaacaaaaaaaccaaaaaaaagaaaagaaaaaaatagccatttgggggcagaygcggtggcttacacctgtaatctcagcacttcaggatgctgaggcaagcagatcacttgaggtcaggagtgtgagaccagccagaccaatayggtgaaacactgtctctaataataatacaaaaattagtcgggtgtggtggtacatgcctgtaatcccagcgactcaggaggccgaggcaggagaatcgcttgaatctgggaggcagaagttgcagtgagccgagatcacaccactgcactcctgcctgggcaacagagtgaaatgccgtctcaaaaaaaaaaaaaagaaaagaaaagaaaagaaaaagcgatttggccagatatttttaaatatttgaaattatttaatgtaatttaaataaacatacagcagaattcccatttttgatgtatagatcgattcccatcaacaaattcagtcatgttgaccaccacacagaaactaagatacagagcagttacgtcaccacccaaaattccctcatgcagcccttttataatcaacccctccctccttcccaatctgtgacaaccatttgttttttcttcctcaagttttgcctattgcaaaagtctattaatgggatcaaacaatatgaatcattttgtttctggcttctttctgttttatgggtgaccaaaatcacatggagagtatgttattattttcctatgttttttacatatctgaaactgtgcaatactgcagaaacttctgaattattgtgtttattgtgaaactcaatgtccaaatagtgagacaaattattgttcaaattctgtcgcttaaagattatacctaatatgcctagagaaagtactaccaccaaaagtgcaagtccagctgtcatcttttttaggtgtctctctcattactaaacctgacttttgacagagtcaaaataatcacatatgtgattatttcaactatccctttatctagtcctttggacaggattatttataaaagargtctatgcacatttttagatgtctttatatcatgttgagtcttatcttgccacaataactacattaaatctttttttataacatcgtgttccgtctgaatattgtttacgaaagtattctgtaaygtgagcttsaaattgtagcaaaacccatgttaggaaagtaaatatctaaaagcagaaaatataagcttccctggttgccaagaaaaccactgtacgcaaatttctgtttattaaatatttggcggtaaaataacaaaattgttgaaaagaggagattgtcttaccctgagcaataggatatgaatatcatccayttttkgttggaaaaataaacaacaacatgggattttaggataggaggtcttcagcagtctcttgcaaatagcttaaatcatggggattaaaaggcagcaaaaccaggtacagataacttggtaagaatagttacttcttttgggacttttacagccaagtttacaggaccagccacatccaaatggaatgaaggccgtatggtttgcaaatgaagattgaaatgctacggccaaacaatacagaatggatcctgagctcataaagaaatagacatgtactaaacatgagattactgaaagaaaaaaatcataagttttctttttgcagtcataaatgacaaaaatgtttaaaaataatagataattttctctcaaggagtatgagaaaagtacccagttggttctagatattttattttctttcacagatttctctctatayttttctaaatttccaatattaattttaataaaggtatatattctggttattttgaaaagagaaaacaccacaatattactaattcagttaaatcaggagtccacaacccccaggtcacggacccrtacaagtctgtggcccattaggaactgggccacacagcaggaggtgagcggcaggtgagcaagcgactgtatttacagctgctctccaccgcctgcattactgccagagctctgcctcctgtcggatcagcagtggcattagattctcytaggagcgcgagcgctattgtgaacwttgcatgtgggggatctaggttccgagttccttatgagatctaatgcctgaggatctgtcactgtctcccatcaccrctagatgggaccgtctagtttcagaaaacaagctcaggactcccactgattctacattatggtgagttgtataattattttattatatattgcaatgtaataataatagaaataaagtgcacaataaatgtaatccacttgaatcattctcacaccatcgccctacccyaccycctcacaatycccaccgtggtgcatggaaaaattgtcttccacgaaatcctggcaccaaaaaggctggagaccgctgagttaaatcacacctaccaaaaaagccaaaacttgaacattccttctcagtgactctgtcatagggtgacaatttaattttattgtagacaaagtttctaggaggaaatagtaaagcttcaaattctaatcttacaaatccaaagctctaaatgtacccataaatgttctcatgggttttgagtctgtgtccaaagttgaccttcatgtgttgtgagccaacctgcttgcctgcatttcctcttctcctctccttcctatccttttcctctytctcatccttctcttcctccttctttttgtgatgttaccaaaactttmatgttgaatttttactgtgaatttcttgagactaaatcacagaaattatggaactgaaatcttcacatgttgatttaagacatggaatttggaaaatattcaggctcctaaggcaattcatrtagtaaattttatacttgagtgaatgagtcagcattttgacaacacacctacagaaatatagtgctttgaaaaaaaaatattyctctgttgaaaataaacaatgtagaccaggcactgctaccataaacatttctggaattgtagagataacaaataatttataaaaatccacttcagaataggatatggaaggaagcatatcctccatctcgttggacatgcatttctggagtttcagctcatgccagctaaatgccttgttactcccataagacagggatcttgtccaatcattcttgcattatgaggtatagcagtaggtctagcacttagtagacacttactgaatgttttggaataaactaaaaaatgataaagcccatcctggatcccacattgcccttaattgttgtctttttagtctcctctacactgtgccagtttcttggtctatacttgtcttacatgactttggtacattgagttctgatcaattatttctagctgagtcatttgaaaatatgtatgtcacraatcttagcttaaattttaaatttttgttaccaatctgcatttttttttttgcaaatttatctgattgtatctattagacttttagtgattttccttaaaagttagaaaagatctttgtatattaagatattaacagaaattacatttctttttttttttcgacatggagtctcgctttctcacagaggctggagtgcagtggtgtgatcttggctcaccgcagcctctacctcccaggttccagtgattctcctgcctcagcctcccaagtagctgggattccaggtgcctgccaccatgcctggctagttcttgtatttttagtagagacagggtttaccgtgttggccagacgtctcgaactcctgacctcaggtgattagcctgtcttggcctccaaaagtgctgggattacaacaggcatgagacctcatgccyggcatacacttctttaaaaatattttttctaacatgataatgtaattttatgtacacaagggtttattttggtcttatttttcttcattttatgtatatgcatgttgaatgacattttttggttatatcttccatcacttttaaacatgagaaatcctttcatctataaattagaaatatctgcatatattttartcttgttgttttatgtttattttagagcatttagtattttaattcatttttagtttattttattgtgctrtctttcatcacttctcagcataggaaatccatccttatctaagtgtcagaaatattcacatgtattttattccagctttttaaaaaaatatataacttgaaaaagcattcactacgaattatagtacrtactcttaatwcatctgtagtttatttttagcaggatatgaggctaagatcaaartgatgttttccaaatgatcaaccaatttttctaacatcatttattgattttatgtaatattctcattaattgacattgcctcatttttcctatattaagttcttttrtagtctaagatctctttgggggctaatttgttccactgattattttctcccattttctctcactaacagattattttagttattataaatttactatagcatgtttactttcattacttttaattttcaaaattttacctcttcctttttgccttttcatttttccattcaaacatgataatcattttgccaacttccaatacaatctcattgtttttattatttattcatttaattacttatttatttgagacagggtctcactctcttgccgaggctggagtgaagtggmacaattatagctcactgcagccttgacctccctgggctcaggtgattctcccacctcagcctccagggttgcgtgccatcacgccyagctaatttttgcattttttagacaagaggttttgccatgttgcccaggctcatcttgaactgctgggctcaagccatgtgccagcctcagcttcccaaactgctagaattataggyatttaccaccaccccagccaaaatctcattgtttttctaatattttaatttttcatatctcagtgaaattttgtatttttttcatgtagctatgacacattgcttataaagatcatgtgttcaggttctgtgtatggaatatatagatattatcttttctcattatatgtttaaatttatttttaaaggaatatagaaaagctaaacattttatgtaattatatatttttatacagctatttaactgaactcttagcctgatagttcagcamattatctttttttctttttttttcttttttttttgagacggagtttaactcttgttgctcagtctggagtgcagtggcacgaccttggctcactgcaacctctgcctcccgggttcaagcaattctcctgcctcagcctcctgaatggctgggattacaggtgcccaccaccatgcccttctaattttttgtatttttagtagagacggagattcatcatgttggccaggctggtctcaaactcctgacctcaggtgatccacccaccttggcctcccaaaatgctgggattacaggcatgagccaccgtgcctggccagcaaattatctttgtttcctcaaataatgatacattttgtcttctacttttctgtaattttttgacatcttgtttattggtcagaatttctagaacagggttaaataacaatgtggataaagattgctttaatatttaattattaagcatgtttttttgagtcagaaattatatcaagtgcattggtcagatactttaattaaaaaagcaaaaaaaaaagaaagtcaccaatttccttttgcctgttgatacttctagaggattatcagttgtgacagcccgaaacttggcatgtgaatgaataaacagttctcaccaaatgaaattgtcaagttgatgatatttaagaatagataggggtaacagtatggtgacttttaaaagtccccagatttctctgaattcttaaaatcttctttgtaattaccagcatgagactgagactaaataagaatttcacctttgatataaacacttcatggtggattgaatcaatggttctcagctccttggataatcaacttctattcagatattgagagctccaaactcaatggacacttaataaatactaaccacccccactcgaactcttaagagataatcaaatattgtcttaagaacctcaggccggaacactagaatttggcaagaaccagagaaaatttttctttaagtcatgtaaatgactttttgaattagtagtaaattcagggtttctacctctaccttagcttcctggaaatttctccctggcttcccccacactcctctccctagactgtgtagcccaagtacaaacatatcatccttttcttctctcatatcagtcagcagaggtatgtttggggcttttaaggaatgaactttctgaggagactcagagaaaattcaaacaattattaaaataataaaatcattgtaaaacatagagtgtctccattcaaacaattattaaaataataaaatcattgtaaaacatagagtgtctccattcaaacaattattaaaataataaaatcattgtaaaacatagagtgtctccatctaagaagcacagaattttaattaattctgacagcattcaatgaatggcaaatcctatgcagggcactatgaagattaaaccatggcacttgtggtcaaaaagatcattggtctaagttgtggcttctgatctgtggctactgagagagcccctcagatatggaaatatttgacaagttcccctctaattgtgtgtcaacagaaaagatggaggatgtcaggtctccagagtttggctgggatacctcttcaaacagatttttctctgtttctcccagtcccgaccttcactaagcctctaaacctgagtgctctgcaagagtagggcttgaggggaatatcagtcatgtgtattttctcttcactatgctggatgagaggccagcctaaaaattattccccagttgagaatggctttgctatttctcttgctaagtatggtaattttttcctttaaaagtgggaataacatttaatgtgtgtctcttatttggcatagtactgtgaaattttgcttccatatcatggaaattgtgagaattatcaatcattcttctagaaatatgtggaaatagagggaacttattgacaggaatagaaaagcaccttaaataaaagaccaaggaatagggtgcagagggctcaagagacaatatgagcagaggaggtagtggaagcctggttctttattttttttttttttgcgatggagtcttgctctgtcgcccaggctagagtgcagtggcccactcactgcagtctccactttctgggttcaagtgcctggtcttaaaatgtattccgtgaagccagagaggaggtgaatgctcagacccagcacaaaggacctcctgtgtgcaaaatacatgcaccagcattgggtgggaagagcagcagagggaaatcctgagcagtgagtgatagaaaataatattttatgaatcgattacccacttaagattcattaaacactaaatgttaacagtacctacaggttggtgcaaaagtaattgcagttgttgccatgctaaaaaaagagaatggtaccannnnnnnnnnnnnnnnnnnnatctactttattttagtgaaaatacaacaaatatgtacaagcccttttatagtttaattaatgacctctttctctataacctgatgtttcattataaggtcataattcctcagagttaattattttattccagtactgttcaggtacccaaccactgtccctcacgtgggttaagaatgggttactgtattttccacagtggtggaattcgctggctgtgaaaccctgttcttgcccttrtggatagaacacagagataaaatgccacaagatgtgtttacatcatctttgcttcatggtrtagtattatctgttgggtggtttctctgtccagagctaagtggcggagatttagttaggtatcatagtttaaaactacaggcctcagagccaaactgcytgtgtttgcattacattatctgttatttccaacccatttgtttggtgaagttagttgtacttctcagtgcctcagttttgtcatatgtaagtgagaatgatagtagtacctaccttataaaattgttatgtgtattaaatgagtaaatgtttcgaaatcacctaaaacagtgcttggctcgtattgtagaaggcagttatgttttaaataaagtataaatattttctcctagcttatccccttttcattttrtagcttcatacacccagcaaatattcattgagttttgataaatactacacacttcgcagattgggaaaccagacctggttattagaacaactaataccygtatgatattttcagtttatgaagcacttcttattttactttaatctttatgttaccagaaagggagggttcttggatctcccgcaagaaagaattcagggtgactgcacagaacaaagtgaaagcaagtttattaggaaagtaaagaaataaaagaatacttactccatggtcagagtagcccaagggctgctggttgcctatttttatgattatttcttgatgatatgctaaacaaggggtggattattcmtgcctccgctttttagaccatatagggtaacttcctgaggttgtcacggcatttgtagactgtcctagcactggtgggagtgtagcagtgaggatgaccggaggtgactctcagcgccatcttggttttggtgggttttagctggcgtttttactgcaagctgttttgtcagcaaggtctgtatgacctgtatcttgtgctgattttctgtctcatcctgtgacttagaatgcctaaccatctgggaatgcagcccagtacgcctcaggctccttttacccagscactactcaagatggagttgctctggttcaaacgtctctgacacaacaatactataagaaagagattacaggaattccccaaaatttgacttttaagtaaacaggctaaaagaaagggatgaatttattcaagttcatacacatcatgtaaaagctgagacaaaattctgttaaatttcattgaaaaaatgaaatgctgccagttttgtaaactgactaacagaacctccccagatgaaagaaaaatgttttcaagggcccgagaaataatggttaataaaaacaaaaaatcaaatcaaaataaagttagcaactctaaaaggtactttccctyactaaagacaaacacttattattttggtctttaaaaagtgtactgtaaatccagtagtaaatttctaaaattagcttttcaaaaaaaatttttttttggtccatggtcaggattctgctcttgatttacagataatttccattcttatgggaagcattgatggttacttctaagattcccgactgaggtttattatgtgttagtccatttgtaaatgaatcagctccaaaaatatctcgaattcattttattttctttcattcatacttctatttgacttttatctattttggggctgcaatataaagagaagaagatrtaagtgagacataatgataatagctttatcaaactcttatatgcaaaggagagttctaagttcttaacaaatgccaatttacattatccgcatcataaccctcacaggtgaatactattattatgtcttctttatacttggggaaaatgaggcacagagaggttaattagtggtccaagaaaacaaacctactaaattaccagttaaattaaaatccagccagtttagttttagagtgtacagtcttgactaactcaccatgctacttattaatgattaaaatattaagaatttaaaaagtaattgagggataatgcagcttggtttttttagcctgcgaaagagaaaaataaaagataataatgttatggacttttggcttacaaaggatgaaaagttacggtctctgagggaaattattcctggagaaacattatgttagaggcaaaaagaaaaaaaaaagttctactagtgactgtggttgaaaaattcagatgaggaaatgattcattaagcaggaagcccccatttcgtaggctttacatattcataggtctattttaagagctaaatatgacagcatatatcaaggactcgacagagtgccacttgtatagttcctttaagagtctttttaaaaggctttttttttgtcttttgataagtcagtctgtttttggactggattttcctctgggtatcaaggacaaaagtacttgccacatttatggcagtgttagggtggagaagggtttccatttatgatcatgtgtaggtaaattgaaatgactccaatattaacattgtctgtaagaaaaatgtaattctgtgtgttttctctcacattatttgcttgaaatcctctttttatattctcagtctttcttttatattggggacgatagagttttcttctgctagccttacaaattcacatcattgcagatataacaacctgtagaggtaccaaagcagacagaaggcatcagacacatttaccaagagccccatcaatgcatatgaaagaggaaagtaaattcagactgttggaattcatctatttacaattttttttctttccgtccttcctttttttttttttttttttttgagagggarcctcactctattgcccagtggcaatatcttggctcactgcaacctctgcctccccagttcaagtgattctcctgtctcagccacatgagtagctgggattacaggcatgcgccaccgcgcctggctaatttttgtatttttactaatagtaaagacagggtttcaccatattggacacgctggtctcgaactcctgacctcgtgaaccacctgcctctatctcccaaagtgctgggattacaggtgtgagccactgcacctggccaatccatctgtcgtaaatagtaagatttacatattatattttttgctaacatttatatattagctgtatactatgtgcaccatgtgtactctgatagatattttaaaattcaggaacaattatttatacacttaatttatttcataccaagcagggcccctgcattaaaaaaactgcaggggcaccatgcaccatgtccttattatatttaatattatagtatatcctctaaagcacatatgtttatattttacagatgatgaaacgggaccctaacagttaaataattcactttatatctcaccagtaatgtgtagtggatgcataaaaataagtggtattggtaacagagctttctggacatcatgttgcctttgtaatactatgtaaaacattagtacattaaacctaacataattaaatacagttgaacaaaatacacaaatatttggccttcatagcaaatccaatctatggacttaatcttttgggcttccaagtgtagacttgcacaatgcttttaaatactgccaacaaattttacatagataaatagactctcattgacaaggttaggttttgtgtccccaccsaaaactcctcttgaattctaatccccataatccccgccgcccatgtcaagggagagaccaggtggaggtaattgagtcatgggggcagttttccccatgctgttctcctgatagtgagttctcacaagatctgatggttttataaggggctctacccgcttcactcggcacttctccttcctgccgcctcgtaaagaaggttcattgcttccccttcgccatcctccctggttgtaagtttcctgaggcttctgcagccatgtaaactcttgagtcaattcaacctctttcctttataaattacccagtcttgggcagttctttagagcaatatgaaaatggagtaacacactcatcatctttataaaaaattgaatcacctgccagtactttacctccattcccaaaacggcaattgagtaaggctatttaatttgtcatcagtttcaccatttcttacagcagacttatagtgtagtccttggtcagcagcaccagcttcacctgggaacttgttagaactatatgtatatattttggctgggcgtggtggctcacacctgtaatcccagcactttgggaggccaaggcgggcggatcgtgaggtcaggagatcgagaccatcctggctaacacggtgaaacaccgtctctactaaaaatacaaaaaattagccaggcgtggtggtgggtgcctgtagtcccagctactcgggaggctgaagcaggagaatggcgtgaacccgggaggtggaacttgcagtgagccgagatcgcgccactgcactcgggcctgggcaaaagagtgagactccatctcaaaaaaaagaaatatatatatatattttttgccctgtattggacttacttaatcggaaacttcggaggaggggaccagcagtcacctatgacccctaggtgattctgaggcataacagaatttgataaccactgcctaatggttttataaagtacccacttcattattgatattatctgcctcgcctctgaaggcatttggggttttgatctatttagaaaccctctaaattgccaactttgcaaatagagaaatttgtgtatgtgcatttaactaacaaataatgtttcttggaggataatatgttaaataaaaaagtatatacaagtttattctgtataaaatacctaaaggagactttcacttcattatttatatttcataaagaaacaaaggtcttatggaatcctgagagttactgcattagttaccatgggtttagaaaagcaaagccactttgggctgaacattttggtcccctggctggatctgttttcttgaatgcacaccccacccctgaggggctcatttgtgccttaaactacaaatctactacttcttaaaagcctttggtcatttccagagagctaaagtcacaaatgttacatatgtaaattttaagaatttactgtttattatatggaatattatttgtgagatgctmtttaatgtttactataagaaaaataaatcaatggtaaaatttgtttctcagttattgggagaagtctggttagtcatttgtaaccaagatactctcaatactctttagaggctaatgtcattgtacattcctagaagaacattatttttatcaatgtatccctaaaatagtaattggcacatgatatacattcattacatatttgttgaatgaataggcaataaagtatcactgacagcttttaagaactgtcctgtaatgtcagttacattagagaaacacactatcatataatattgtacatagttgtctaacgaaatccagaatttacaaatttagtaccactggagtagatcctcaaggtcagagatgcttattttttaaacactcagatcaccagtacctagcattatgcctggcacatgaaaggcactcattaaagatttattgaaaaagtgaataactgggaagatggatggaaggatggatgaatggatgagtgggtaggcagatgtacagctagctggataggcatctgttggtatgaatattacaaatgtgtgcaatttaagccagaagtatggattttattttttaaaactgaaagagaaaagtttacataatttagggatgaaatatttggagagaagagaaagttacttttttaaaaaaggaaattataaaagaaaaaatatatttggctagaatttatgcattataacattgttgaaaatctatttgttacagaacaaaaaattgaaaaaaggaagactttaaaaacaaactgaaatagtttaataattgaattttactttttcaatcttaaggaaatgacaaaaaatagagacaaaggcaaattattgttttaatgagccacattgatgcataagaaagggaaccactgattgtgctcatttctccaccagactaaaacatctgcataaagggtgaaaaatctctggaacctcgcaagcactttttgttgttttattaatttttcagaccaagtttctgattattggaaacagttcatggtggctgctttgtaaatattggtttccagatggctgtagttggcattatttagaataaacatctagaggactctagcctggtgtaaggcaaagatggttacttagggtcctggggtctcagatttttccaagtgactttgaaaacattattttgcctttttgagtctcagtttctctttttataaaactgaaggatttggactaaactatacttaaaagttccttgcagttccatagccatccagcttttaccccaatattttaatagggattttgtagacattgctttcttttgtttgacatttttgacagatgccacctctccttggaaaaggactccttaggaagcctttctaaaaggccagttaggcttcaagcacttcagcaggcttaaagtaatcaacgtgtgggtagcagccgcccagccagaccatgcataggaaaaatcaccacacccctggatgggcttcaccctagagacccacgctaaactgtgaccctatttaactttgctgtgtatctggcactgatgagacataggagactttcatgaaaggggaaagctctgacttttaagatgagacctggaggtcaggcctattgagccataaaaaagatgctaggagggaaagtccttaaagaactgatcgtggcttctttgaagttaccactgatattaatactatatttgggaatccagtaagctgctttatttttttaaaaagaagaaaaacatgtttggattaagatggaaaagagaaggcaatcttggttattgagacaactcttccactctttcgcaaaagaaaaattctaattcattttacttttttctaaatcctttgacgtttacattagcaagatcacacattcgtgtgctaagacttattcctgatttcatatccagtgctgttcagatacctggtgtaggtttcctgaaacctacagtctctgttttgccagaaacctggtgtygaaygccttagcctttctgaaggtggcagccaccacagataatggaagaaactttgaactaatttgatagcttttcaccatatttcagcagtagaccaactatgaacctttctaattaaagtcttcaggtttgtgcccccacctgctggcaatgatgactactcgcagaattgtattcatggggtaaggtatgttaaattttattctcatcattattatttatatccactgaatgcctactcttctgaagcacttgagataacatgaaacatatggcaagtccttgtcatcaggatggagacaagacatacttaaatagaaataattacagaagcatcaattgtgggtttgtgagtatatatatatatatattttaatttctaggtaatgtcacatggatttttttccttttcttcctcacagcaacttcttgaggcaacccaagcaaggatcatcattgctattattataaatgaggcttttgacaggaggggggcaatggagtggcttgctgaagtttcaaaaatgaaagacagacccaggtcatctgtcttcttactattaaaatgtgcaaaattaatggtaatagaaaygataatgagcatccagacatctatggatatagggataaagggacagtcatcagcatccagacatctgtggatatagggataaagggatatgatttagtctcatcatgtaagaataaataaataaatgtcactgaataaatgctattgaatattttgacaatttttcggttctgaaaactacatttaaactctctcaggtattctgaatatgaagttttcacagtggacttttggaatggaaagaaataccttattttttggcataagaagtggcattcactccaggggaaatgtggctaaaaataacatcagcatccttaatctccattgcctgagaggagcctgtgttgacagacactgggagggccagtcttctttggtttccctcgcttctgtttgtctaactagcccttccttaaatgccaagtcagaaaagtgactgcattgaatcttcccagctattgaaatgaatggcaattatcttggctttctcaaggcaggctttggtcaaaacatattcatatgtgttttggagaaggatgagtggcataggatccagtagtttcttcctgtgtctgtcacagtgacactaagatttctgcatgtatttctgtaatatcctgggccattacggtgtaagaagtttgccgatggctgtattataaggaaagatagaaatacttgttctgacctgaaagagtgaataatttagaaaggagtacaacagtcttaagtggggcatacataaatacatcaacaagcacttacagttcattccctcttatgcctatatctaacttaaactgcagcattaagtagtggagttagcaaggcacttatctttttatccttttttgagtcagggtcttgctgtgttgcccaggctgaagtacagtggcacaatcatagctcattgcaacctcaaattcctgggctcaaggaatcttctgtcctcagcctcccaagtagctaagattacaggtgcttgccaccatgcccagctaatttttaaattttttatagagacagtggtcttgctatgttgcccaagctggtctcaaactgctcgcctcaagcaatcctccctcctcagcctcccaaagttttgggattacaagaaggagccactacacctggcctacttatctaagccttgattttctcatctgtaaaaatgggactattaacacctgatttataatgatgttaaaaggattaaatacaatacatgcattttaagtgcttagcaaggtggcacaatacatgataaccatgattttgttattattattattttgtagaaatgtgcatctagatgcaagagagattgaattagtggcaaatgtgagtgattagttcatcaaggtagaccacaatgatgggtgaaataagttaaaatcgatgttaaaatagaagcaatctttgccaagtagaacaatacttccttacaaagtttcatataattcttgaccaactgcttgtgaaacctttcataataagaggatgaattcataaggaactacagaatcggtcactgtgacttcagccacctgacaattcatgagaagggtaatctaaacaccttttttccattgacgtgctcagatctgttgtacttgggctagtatttctgtgtatatacagagacatatgtgtctatggcattagcaagttctctttgccattgaagcacttttctgccctcttggggccagttttcaccattccaatgtcctgagtaatttggctttaatcaaaaagtcaggatcattcaagtcaaagagaaaaacctttcaggaaatagattgtagaggttttcttgtgaatccacaaacaaagtgtttgctccttctccaagactaactaacaagggctgcagcatcagccatactyagcaactcggcacatgcataatacattgtggcttaggggtgtggctcgatggcaaacacataacggtactgctggtggtgaatgtgctgaagagaaatccagagaagaatttctgctaaaatccatttcccattatgcaagctgtcttcaggacttgcttttgttattgtcaggagtcaaatatatttaccacrctgttactggctccatatagtcaacagttcttttgcatccatgtgtatgctctttggcctctggaaataatacctttttgaaatattttttgggggatgattcccaaacttttgtaactggggaagcaacagtattatttttttttccctgagagagcagctgaggtggcttaaatttatattactaaatagaatttcactgccccagtcatggctaatttatgaagaacaaagaaatgacattgctgtatgtatcatgtatctctggttctctgaacaaaattcttcaggatatggagagacctttcctgactgacaggacagctggaaagggactaaggaacaaatgggaggaaacacagagaagatgcagcagctcccataatagagatatgcatgtatctatctaaaggtacattaagatattggcagctcatgataaaaacattcatagaagaacaacattttctactgaattaaccacattgattcagtggactcatacttgaatggctaccttagatctatctggaatggctgtgaccaatagattgagggaaatttggtagaaattctaagaagacaaagtataggactctggaatggccaaagctgcccaaagctagaatgggctgttttggaaggtagtgaatgtcctgttgctgaatgcgtgcaagaaggkggtcaygggacaattgacagaactctgcagaagatscaagtaccagaggagagagtggggtttggccagatgactcttaagaacttttcagtctcagattcaacggaaaaaagcaatgagactacattaaacatatgttggagttttaatttgcaaacttggcattattattattattttttctaaccagtttagatcacaattggcattcatttcacaaatcacatgccagattaaaaaataaaataagcaggccrggtgcagtggctcatgcctgtaatcccagtactttgggaggccgaggcgggtggatcacctgaggtcaggagttcaagacagcatggccaacrtggtgaaaccctgtctctactaaaattacaaaaaattagctgggygtggtggagggcgcctgtaatcccagctrcctgggaggttgaggcaggagaatcgcttgaacccaggaggtggaggttgcagtgcgccgagatcacaccattgtactccagcctgggcaacaagagtgaaactccatctcaaaaataaataaataaataaaaataaaaattaggatttggtgttaatattcccattatacacatgaggcaattaaggtaaaacaaattaggatttatcacataccaaaacaagaagaatggaaaatcccatcagtgatatatgttgtggatgttttctccttccaggataaggaagccacagataataaagaggcaaaacagcaagctaaagagcaaggacatttaatagaggtctaccctcatgcctgaactttacgggaaatagtcaagaagtagaatgcaagcacccccaccctccaacgcagatacacacacatgcacatrcacacacacatgcacacaygcacaaatttctccacccaaatgtcccctaactgcttacttccagtggaccatttatctccagtcctatccttgggcagagcttcagtccaggcagggtgtagcaattatgatcttgtctcaagcagccctccaagggcactggttcaaccttagcttggtcagggaataaccaaaagattgaagtaatctctgccctctttaggacagttccaggctgagtgcaatgatgctgagataaatcatatcctaccaatatcagcttgggaaaatcagaaatgctggacctactcttggggaggtattttatcttgaggagtagttcaaggttggtcgaaagaagatgattgagggagacaaaaaaagttcatgccagactcctgggtcagtgctatttctaccatagaacgctggtattggcatgaagggaaaaccgtgggttggaatcagttattcttcagtgagtaaacagagccaagggggctctgagtaaggcttgttakacactgaagcatgcttttacattttttcacaatttagtttctaaagtggattaagcagattatactatttaagcctttaattcttagaatttatagaaactaaagagataaacataggaaactggaagtcatcttaaaaatcatgtgtcctaggctagatgcagtggctcatgcctgtaatctcaggaaagtaggcaacatagtgaggtttcgtgtcagcaaataatttttaaaaattagccaagcatgatggtgcacacctgtggtcccagctactcaggagtctgaggtgagatcacttgagcccaggagttgccggttgcagtgagctatgatcagccctgcactccatcctcagtgtcagagtgagactctgtctctaaacattaaaaaataataatgaaataaaatcatctggcccaacccttcattttacagatgaagcagcagattcagagatattgaatggtttgcttaaggtcactcgacaggttgccagcagagccaaaactagaattcctctcttctgatgtctggtcttacacattccctcttaccaaggctccctccttcctcacaagtctagtaaggaagtttytgtggctctgaaggcaccagccggggagtatggaaagagtcatacagagcagaatgataaagaggcttccatgctaaggccagggaattagagaagccacgaggccaccaagagcggcaaagaagacagtgagcttttcattatgactcaagccccagaagatgtgggctcaagattggtgtctatgttcactcaaatacaaccacaatgtgaatgaaatctctcctccttcctaatgtcccatttctctccagtcgtcagtctcagatgcagccaattggagcttctttcccagtacatagcctgcactttctaggcagcctgctttcatcagttacgattgctttacctagaagataaccttttcaccttaagctgccaaaccctatccatctgtcaaggttgatcctaggtgtctgctcctttaggtagagccttacttctctctcctaaatgatatgcttctcacgtagccatacctgtggatcacctatctacttttctctcagaaggggtgaaattatttgcatcaaaataggagaaagaaatatcaatgacaagaaatcctgtaactttacaaagacttgaaatagttattcattccttcattcaatcttttagttcaacaagcctgggctgagccctgcttctcatattcaaatcacatcttttcctccaggatcagcacaaatgttacattcttcatgaatcattccctaattcctcacctgtaagcaataaatacttctcataaatcaactatttattgtccatattttgccaccaaatttttttttctcgctagtagacagcaaatgcccagagagtaattttcttcrggaaaaatatcaagaaaacattacacctacttttttcctacttaaaaaaaaataagatcaaagctaacatttactgatactctactcacaccaaattcttgatctcagtgtaatatttcatatgcagaaatgatgaagtgatgatttaattacatcttaattgattttcttctctcgtggaggattttcaagctattagcatttggcagccaggaccattccacttactctctggacctgkaaaagatatttgaaaactgagcctcaggcaaagccagggttgttaaaatcaccatttccctaaaggatgttaaaagtcctaagggaaaatatttacaaggaaaatctgttttctctttggaatttacagatttttatttgtctatttttctcttcttacatgtctcacccttgccctgtcctatgtggcaggaagacacatccacttgtccttccacagatgtatccatcatccagtagctgactgaattctacaccttttagtaaatgcctttcagcttatcaaagtttgctaacagatcttcaactgtcattggtttatttctatttttaactctttagaataacttactagttccagtttaactaaagttcttttgaaaaacagctatcaggagactgctatagtttgtaaccagctgccataatttttaaaacttggtggtataataaattgagttaggtgtcctttctatgtgttctcacatcattctcctttgcacttgactcatcacctgatcattgtcatgtgtatttactgtgtagccctcccaatgctataatctcttattatattcatatcaatatatatcgaagagcacatccatgccctgtgtgcctatcacgcatagttggtaactagtccacagtagcccatccagggctctcagtcagtgtttgatgcgtgaacaaccatatgaacagcttttcttacagtccttattgagagcccaaggtgtgccaagaagagttagtcactgggaatacaacgatcaatcggaggcacatagagacacagctttttatgagctaagcggactttcaagtttaaagagagaaactagttctgttttttatacagatgagtttttattttgacttacaaaatctcttaatcttctgtatactggtaaacagtgtcttcagaactctgyccccagagagccactggggggaatacagacataacagtggatgattataatactaccagagaggcaccacgaggggaagtccagaagtggatgggatcatatgggatttagttgttcatggaagacgtagcagaggaaatgatgtttaagctagtcactacagatgagtgagaaataatcagtcaaagatttggaaggagaattgcccaagaagaggaacactagaaacccagaggggagactgagtggaactgagacaaaattcatcaggaccgtattttagaaaacagcagagaataatgagatttaagtctgagcaggtaaaccacgagcagtcaggcaagagcttgtgagtcatgtttaggaatttgaactttatccttagaccagtggggagcctttggaagttttaaatcagagagggataagatcagatttgcattttagaaagatcactctggctgcagtgtggtaaatagattaaggacagcaggaattcacaagaaaatttcctacagctgttttcctttgtacatttaaatatgtcccccgccccccactacacacacacacacacacacacacacmcctttacctacacacaggcacacacctttttgaaatttcacttgtcttatataaactatataaattaaattgactggtggcataatttgtcccaatttcaagatgaagccctttcatgcttgaaatatttatttaggaaatcatgactaagctctacctttgcttcctttctcattctacttccattcctgtttcttcatataccacacatatgtttgtttttaaaattagaaaacaagaaaaaaattagaagtagtcaattattaagtctcatttctccatgtggatatcatgaccattaacatttgatgtataacatttttctagtgaatttatgttacatgagtagaatcatattatccagaatgtcatacaatctgcttttttcattcgagagtatatcatgagcatgtttgcattctaattattctcagtgggcatataatactctaccatatgattgtgttgtaagttaatctatgcccattagaaattttgcttttaatttaatcagaccatagtttatctggagtcttaaaaaatctgcttgacgaaattaagatgacattccccaggcagctctttctgtcgggtgctctggtatttggggttttcagcacttttcagtaactttaccagctaatcaaaataatatcagaaaastatcttccctttgggaagctttctgcattaggaaaactgtttacttccaataaaataagtggagatgcttaaaggaagagggtcttgatcaaacttattttttaggataaaccaaaatggaaggtttaaggaccataaataaaaacaaatgtatcactccagaatgcttacaaaaatcatttttcttgaattgtttagtcttattctgagaaagtataaaagaaaagcagacattttcatttttgcatgaaactctattttttttttttttttggagatggagtcttgctctgttgccaggctgcagtgcagtggcgcaatctcggctcactgcaagctccgcctcctgggttcaagcaattctcctctcagcctcctgagtagctgggactacaggtgcgtgccaccatgcccagttaattgtttgtatttttagtagagactaaaggggtttcaccaagttggccaggatcgtctcaatctcttgacctcctgatctgcctgctttggcctcccaaggaactatattttttcttaactttgtttcccattctgttttaatgtcgtaatgagtctaccaaggtcactttttgatacctttgtagaaagaacactggattaaaagttagaatactttagttgccagcattgtcattgatcatgctgggaggatatagtagagcttaagggtgtgatttccggtgtaagacagaaatgagtttaaagtcagattaaattactatttttgaatttctcaattgcaaatgaagctactgatgccaaacttgttattttcagcatatattagtttgctagggcagccatcacaaaaaccacagactgggtaggttaaacagcagacatttaccttctgactgttctagaggccwgaagcccaaagtcaaggagtcaggtttggtttttcctgtggcctctctccttggcttgcagattgttgccctcttattgtgtctttatgtagtgtttcctctgtttgtgctcgttcycctggtgtctctctctgtgtcctaatctcctcttctcaaaaacaaacaaataacaaaccaaaaaaccaccagattggattagggcccacccttatggcctcattttaactcagtttcttctttagaggtttcatctccaaatacagccatattctaaaatactagttgttagtacataagaattttgggagacaccatttagcgcaaaacacgtggtaatacatttatttcaggtctctggtgtattacatgtttaataatagtggcaactattattacctgacctctctgaacttcattcttcttatttgcaaaattgggatatgaatatctgcccagtctacacatgatgatgacttaagattatttatattaacattctttgtaaattaaatggtagaatacycttgtgtattttaggcatacacgcatatactcaccatcttctctttgagaatatgcaagttgcatccaggcatttgctgttagcttctttttacattaaagctggaagttggaagggtgggacttaggctcctagtcatcttccttttatttctatagggtcttagcgtcctcagctcctagacacacagatttaataagtttcaagtcatatascctttcccacagtacttcctctactcacatggggcaaggagcaaagattaatgaaagtggaacagaatctctctgcttcactgtctccatgtagaggcaaatgagatttcctctagtgcctcatgggagtgtttccaaataaaaaagaacaaaagctgcttatattatttcataataaaaccacatgtttttctgggtagaaagagtagagatggcaactctcagatggaaggctatattcattttaatgacttggctaaaatttctctctggcttaaaattgggtttgctgtggagtcttcaaaatatgaaacgttttaaatgaacagaaagtgagtcttccagaaatgtgaaatgtggaagtgtagtaccttattgggatgccctaccaacggaactgctggagtgtgagtatgcaggttgattccataacactcagcattcagggccaggtggagaactggttggaaggagtagggtatactgccacgcattgctcagtaagattgatctaatccagctctctcgtagaccatcctatgctactcgaacaaactaacaacatagactttctcctctctcagatggagatgtttctggaaggaaatttttagagctacaaatcactcagttgctttacaagtttcatgttctccccaaaataaaacctaatatgtgcttaactttcaaaccccaccccactttggcatcagactaccatgttagtattctttgctctttcaaaccccactcccaacacttgtactcctagaaaactaactctcaaatatagatgacgcttttcctctgtgtcttactcatggtgaaatgcccttcccagcacctctgcctgttgaaatctcatctatccatcaaggtctgttacagatgccatatttgtagtaagatccccatgaagacttttcagatccatctattcagaagttctttctcctactttgaatacttatagaatttctttttacttctcttaagggcccttacttaaccctaaattataggtatttgcctgatttcccaccccaccccccagattcactactaaaacacaggaattatctcagatttctccccactgttcccacctacccaatggccagtacaggcccctcattaaatgttgctcgggtggaatggaaagatgaagtaaagcagcctgagctttagaacctctagaaatagaaagctcatagtcctctctgcagacaaagcaggactccatatgtggaagtgcatagtggcagtcttttcttagcacagaccaaacatgcagctgctacactctgccacactataacatttcaaggggaagggagccaatgtaaacccacagtatatacaaaattggaatcagaaaccctcagtttttttaaccaccgaatataatttcacagtctatttgatataatttttctaggctgtggttcaattcaagccagtctcttcatttaaacacaatcctatagttatcttctatacttactagcagtcactttgcaactttaatttgcgttattctgggtggcatggagaaactgatgtctgccaccgacttttggagagatacattttgggtctgacatttttatatgcactgattaaaaatggtagactcttaatttccctgctgaagaaggaagattgtccacttagtctcaggcacagcgaactatactaaaaaattattaactttggaattaaaagaccaggtttcagctcttctgtcagaacccacgtgaccctgagaagaacacttttcactctatacttatcttattcatgtaagtatattagggaagcagatgtcacagcagatgaagagctatttcaatatctgcattcgggattctgggatcacttaggtcattattttataattaaagtcattcatcaacgttactgaagtttactatatatatatatatatatatatrtrtrtrtrtgtgtgtgtgtgtgtcaacaaatagagtctcaggcagctgattagttttttgagccagtctgaagcagactagaaggtttttggccgaaagagtttgaaaaatgtgaaatacagtgtcccatttacacagattaactgttacagtagtacataaaaaaaaaaaatctgaacgctgtatcctaaagaaatgtgtttaactcttactacagttcatcataccctttgttaattataaaagcatttttataagtcttatgaacatctagggcaatacatttcttagcaaggtaagggctgacaaacatcaaaataaacatttttttttctgtccttcttggttgctctaacttatttataataatagattgctccttcatttaggaaactcttctctctggctttctgtctgggaaaagacctcaagtatgtctcaagtgaagactttgctcgatatttggttgatcagatctcttgtcaagatgcttgacttctaggaagatgtacttatttggatgccttttcattatatcaaacacaaactagctcaaagtgaaatgaaaaatttctccaacccacaaccaaaatttgtagccacctaaaaaatactatttccattgctattaccaccatattccaagttaactagttttgaaattttaagcatgcctttagctttgcatttccctttgaccaacttacttctctgttatatgagaaagagaagtacaagggtttccccaaaattttgcctcttctccagtatccctttactcccacttagtcctacaacaaccaggctaatgtttccacaactaaaaggatattataaagtttatcataggcctccagtcttacactctcctccctgccaatgaggaagttctccctgccaataagtgaaattttacctcacgtattttagtttttacttttcacagccctttttggaataagagagatatatttttatgactacattcacaaacatgcacatatagataatgcatagatatatctatctgtttccccttttccgggaataaaaagcaaaacaactcaccttagtatcaaagatccccataatccagtcctgttccaccttgtttcccattactctggaatcgaaaccttccacatgagccacgttatccaaaacactatcttataaatagatctgagacatttctgctgtaacattactattctgcagctgggacatccacatgttttctgtttttcaagaccctcagtcctactttctcagtgagtcctttcctgaaccttccaggttactgtgatttcacatttctcctaatttttacagcattatattgcctgccacccacccactctgccctaaaagcttgtaaattcccagttcttgatatcaatagtctgtgtatgtcttcttgtcctaactgggctatatttactaaaagattaggatcctgtcacatttattttgtatcctcagacacttgtcatctatcacagttctatgactgaagtgaccagcaaacctgttacataaacaagacatgcacaaactcacctctactttgaaatagtggtgactaaaatcccaagtgtctrtttgtgaatgtttgttttaatcgaagaggtagcttctaattatacttctgctgctaatattctaggcaggttctttatccacctgtaaaatgaaacagtgggactatatgatataaatagtctatccagccctagtcttctatagacttaattgcaattagtatttataagatcaatgcaagtgccacaaaaataacaggactgatgctactcgatatgtttagtcagtaagtagatctctcccaaactttagctttctctagaatttacatggactagaactttctttctaatatagtctcttggctgaggtacaaagaaaatgtttgagtttatatttaacctggatatatggtagggatatttcatatactgtacagcctgaaggttattgctgtggctggatacttataaaagtgcaggtgtgatgccagaggaatgtatgaaacattgaaatgaaagaactctatcatgaaaaccatctctttagtaagagcatgtggcctgtcaggttaggagtacccattagtgagcttgatgggtgacatacctgcagagaccttagtctcctcttaaagattcctccaggaggggtctttggaataaaattccccttggcttgcagccacgatgcattcctttgcatgagctgaaatgagtgtttggaaataayttttgaagtaaatcttcccactcctataaaagcaagagtttatatttcacagaagaacgtggcgtatttataccaaaaaggtacaagtggaaaggcttttgatttacttgtttgcttttcttgcattgctcacagtaaagcgatttgagtggaatgttaagtttgtttcataaacacaaaatggaagggagaccaagcatgttggaaattrtaatgacagaatttatttgtacattcactaaaccctaaaagcctcctcaaataatcaaatttgccaagctattttcagtgttatcctagcattgttacaatttaaaacaggccagggcccaaatgattacttcttctccctgatctatatgcccccatgcagtctactcaggaaacatgtggacttacaggagaaacactaaataaacccatactttgattcccagtgcttgtgacaagcatttgatgtctgaggctttgtcatttcacaaaacaatgttgcagacacagcaacaaacttttgaaattttttttcatattctcaagatcagaaaaatcattcccaggcttgcattaagctatttcactgctgattttcaaaaagctatcttagaaacagaaatccatagttaattgccattttgctatcataattgacaaattcaaatgatttgtgacatatgatttttgacaaatgatttgtgacaagtgatttgtgacaaattcaaatgattgtgacatacagtttgaggaaaaaatgtgatctggctgctattggttgtagagacataactgtggtagtgaacaattaggaagctgacttttagctgtagtaaattgatggccagctaaaattttttttttaattgagtcactcgggaaagacaacgtttttccccctttattataatgaaaaccaggcaaaatatgagtcaagtgttatcacaacaaaatttgtttttgtatcctaaagttcattaaggggaactctgtccctggacaagttttgacttggtgctataaattattgttcgtggccaggcgyggtggctcacacctgtaatcccagcactttgggaggccgaggcgggcggatcacraggtcaggagatcgagaccatcccggctaagayggtgaaaccccgtctctactaaaaatacaaaaaattagccgggcgtrgwggcgggcgcctgtagtcccagctactcgggaggctgaggcaggagaatggcgtgaacccgggaggcggagcttgcagtgagccgagatcccgccactgcactccagcctgggcgacagagcgagactccgtctcgaaataaataaacaaataaattatcgtttgtatcataacgtacccttgtcaataattaccagccactttctgcgctggtcctgaagtagaggtaagggctcatctagctttttgaagctgtcctcttgggcagacaaactcaataaatggccatttttatttctcttatttttattactaatattataaaatgctttgccaactatataaaacatacaacctatatgacaaatgcaatttttattattggcaacctcacaagttagattgtgctcaccaatacagaggtcatgtataagaggagtagagttctgtactcacatagagaaacattggatttctatttatttatttttcaaaatctgacatgaactagattcttgagatgttaaagtaatgactactaccatagtcatgggatgctggcaaagctaaggtatgaaattaatgacaactaccttcagaataaactttgaaaaggattaaagcwgattccaaaaacagtagcaggaaacaaatgtcagcaaggtcttggcccacactgcttttcggtaaccattagtcatcatctgacacctcaagggagagtgctggacaamcactgcagaggttaagatccctgcccagttattcagtcttaccctgtcctagcatttagaaccaaaaacaacagtaacataccaatagaccatgcacactaacttcattcgacccgaggcagagacgacttgtctaccttccatcactaagataatgtgctctccttcttacccagcagccattcaaattttggctgttcccttggtaggaagttagacaatacacagatgacttgagcgattttgtctaattcaaagcacacacttatttctggctaatacttagatagttttttttttttttttaacatcaagggcatttcatttttaatagtctctaatcggaaatagtatgtttaaaagttctgtgtcttcactttaatgttttccttacccagaaagatggtttctatttagataagaaatcttctagaaagctgatggaatctgttgtttcacggagctcctaagagtatcctcatttggccatggctattcaccattagtgtttaacactaaaatgtaaacatcaagactaaaacttcactagagtgtttaaaaaagcaggagtctattaatcagaatcaggaccataagtaattgagggaaagagcataagcagtttggcaaaagaaagcactttaagaaagcatgttcattcttcctttccaacttactccacagaggaaatattactcttcagaaacgtcatttccatttaatccttaccaaattgcattttgaaaacgataaatagttacttatacctatgactgtattttagagtgacattycataaatgcaaagataagttcattttctacattagcatggccacctaacttgtgaattaacatgtgttcttcaaagctagaaattttaaaatgttctgccttgagatgtagaaaaggaatatattgtataaaaatctcccttactatgggagtatatattttaaataggttgtaccttttgtatgtccctgagtttccttgctaaggcaactatttgtatagttagatttttgaaatggaaacaaaaacactcaaagaaaaaagtgaaatatgccagctttagtttgacacattagaaacccaacataatgccgggcacggtggctcacgcctgtaatcccagcactttggtaggccaaggtgggcggatcacgagatcaggagttcaagactggcttggccaacacggtgaaactcyatctctactaaaaatacaaaaattagccgggtgtgttggcgcgtgcctgtaatcccagctgcttgggaggctgaggcaggagaattgctcgaacccaggaggcagagattgcagtgagctgagaccatgccattgcactccagcctggcaacagagcgagattccaactcaaaaaaaaaaaaagaaaagaaaaaagaaagaaagaaacccaacataatataatatagttactgtaaatgacagtgaatgcaattctgagcttcccagtagtcaaggcaaaaggtgcaacagaatatattaggtagttctctatggatgtwaaaattaattttataaatttgtcaggagatataaactgttttttcttataactgaattgtgaaaatttcaaatatggatctttttacaagttatattaatgtattaacatcatcagtaactgtgaaataaaatgcaaagttatttgctatatggctattattttactccaaaaatctgactctgctatatagaaatgtttaggaatgtcctaaaataagattaaattctcattcataagcccatactttacatttaaatactgtaatttacaggatttcgtttaattcagtaggttgaacaaactgcttccaaattttatttcaaaatttgatgttttgtaaattttaagaatattcttttaatatattattcatattgtaagaaatgtatttatttatttggttctatgaagaaaaattaactcaagttggcaaaaattcgagtaaatttggagactttttagcaagtaatgaaatgtctacaaatgtgccttgtgacatgtgtatgtatatgagtgtatacacacacacatcttacaggttcatcaaaggatgaatttggttgtttagtgtgatatacatgctgtaatttgatgacttcctttctctctagctgttgtgcttatgctgctagctagagcttagaacttgygctgtggcttagaaacaggatgtcttcagtgtcagcttacatgcttgtcacttgggagttaaaaatctctaaagttactatattgtgaaatttaagtaaaaaaacgaaggcaaaaaccatagcacttcattaaaatgtaatggataaattcccaaagttagggtgacgaaagtagaaaaagaattcattcatttattgaaaatgttgatgtttgagaataatggaaattacttattttacgcttgatgttttactctgtacaaaaaaccttcaaaagagtaaaaagtgctgccaaatattctatttgagaagtacatagtggtatttccatgttttaatgtgctttagaattattagccccttttctttgttgcacgtgccttacaagttgttcttaatttcgtattcaaaatatttgagctacatatcctaattcagaaaatagggaacttacatattttccacacaaaatctttggaaattttagaagcgtttccttttgtgttacgtgtttgccttctgaattgagaaacattgttakagcaaggatgggcaaaatagacgaagagaaaggaatcgaggcaggmaatggaaggaaagtaaaacaggcaactgacttacgctgtgctgcattattttgcaaagtaaaarcatcatctctgactgattactgcagtgctcttctrccctctaggaagatctgttttccacaaagaagtttgaattatcattttaaaatgtgtatcagatctgattatatccctccttaacattttttactgtttccttgtgcacttagaatgacatttaaactctaccatagcctatacaaatgatccgtccttctctaacttctaaaatctccctccttgatctctgctctgctttgaaaacacatcaagcctttttccacttcaggcacctttcacttgactttctttggcctggaatgcccttcctcttgttcggttcatgcctggcttctcaacttttaggtctcagctcaaaaattacattgaagagaaatctttgatgaatgaatctaaaggagttctccttccagcccagtcccagtcagtgctcacaactttgttcattatttcttcatagcacttaatacaatctgaaattactttccttacttatttatttacttgggatttgtccccttctatgagaatgtcaacatttgttatagaraggagggcctttgtctgtcttgaccacgtaggtattctgtttagtgtctgatacagagttggtgcaaaataaatatttgctgaataagtaaatgggtgaactaatgaactggggcatgactggagaattggacctatgtgtgtgttcttgaataggcgggtggtaagttttaaaacttagagaagttcagtttctctggaaagagttggtataatggcagagaggaagaagtgatgccaggaaaaacagagccaaatcccagagttcttgaatgtcatgatgtggagtgtctgaaatctgttttctagtcaatggatgactactggagatttttgaatagtcaatgtgtgctttagcaatccgtcctttattactagctatggaaaactctttctgtgtcagaggaacctcattcactcacaggttcaaggacagtgtaacttctgaacgtcagcaggctgttgatttagtcaatgttcatttctttgtccatacagtatgactaccacgtagtcatgcttctgggctggcaagagaaaatgtttgccttagttcttcacagcttgagaggaaatggccctaagcttcttgaaggcatttttaccagtatttctgacatctcagtggcctcccctaaacgtcaataccatcttcatgtcagattattccccttttctccattgttctttatttcacagtttatttttctaatgcatagagttacccccatattagacttactcgctcctgtggtttgttttaattaggtcttaaaggaagtccagtttggagcctttaactgtagtgtgctgttggtttgtttcattggaggagtgggtaggtccttccttagctgaaacctagtactgactatgccttgtaataacctccatccaatcatatgacattatatgtagcatgcacatgtttatgtggacttttcttaccactttggatgtgtgtatttatacaatggaagacagaggtatcaagcttccagttaaaacagtggtttattttatagaccctggcagcaaattctagtttcctaaactggttcacaataatttaaaagccagggccagttcatgaagttttatggttcagcctttagtcatggaatctttttttatagattgtagtatcttcaattctggactataaaggaggaaagcaccaaataagcaaaacgtcaaatttgagaaaaggacccagtttgttgacattgactgttttcaagagctacggaatcacattcatcgtgataaccacattggaagctctcagtatgaatgatgatttcagagaagtttttattaaatgtacaaacttttagtaccttataggaggggtccccaacccctgggccatggatcagtacagtcctgttaggagcggggctgcacagcagaaggtgaaccttaccacctgagctctgtctcctgtcagatcagtggaggtcttaggttctcataggagtgccaaccctctggtgaagtgtgcaagtgagggatctaggttgtgtgctccttatgagaatcttgcgtgatgatcttaggtggaacagtttaattctgaaactatccctgcaacccatccatggaaaaattgtcttccatgaaactggaccctggtgccaaaaagactggggaccactgccttataattcatgaagcatattcacatgtaatatacctttgaacttattacaagttacttcttacaagtttttttctcttttctaagacatagcatagatatactctgtatgtaaataggtagaaaataaaaagattaatataccatatgatccatgtccacagaaagctctaatgggagaagcagatatactgatgcatatataaggtacagaatggtaagtaccagtaaaggaacaggttgagagtatattgtggtacccaactatggctacaggaatgggaaagggtctcttagagaaggcaggatttaagcttggccttataggacatgacatatttcagtaagaaaagacagagggacaaagattctctaagtcagtggaatatcctgagccaaagcataaagtaggaaaattaagaacataaatatttatttgtgttccattaactttaacgtctagtgctgtagaatcagagtatgtcagtactaatctgttgtactcatagcttgtagactggctattgcccagagaaaattttcaccaaccagaagcacctactctatcctcttatattatgtgttcatgggagctataaactctactcttcattaatgggagcagattcacctccttgaaacagatcatttatatattgtatgctattatttatctttttctagtgctctagtgactgctgaacacattcatatgtatttcacagttgaatccttccaaaatcctccacagtaaatgatggtgtatagttcttttgagcattttttctttagggaaaattaaarcaccagtgtttaaacaactttttccaggttcacttggccaataaatgcaaaccacacayaattttgaacccattctttatacctatntagttattactatgtagatgcatacaattcatatttatctktattgatatgtaagagattgrgaagattaaagttgagaaagaygaaatccaaaattagtgattttgacagtcaaaataattctgagtgcacagaattgaggacaaaggtaaaagtggcaggaagagctcatttcaggcaagatttaatggaaggaaagacagtagctaaaaatgtgcaattacatttgaaaagggaaagctttactattatgggatgttaggtcttaaaacagggcagtttatgtttttgtgttaagagttgattatatttcacaagactgcagggactgggcacttgtgagtctactacttctagttttyaataattgagtggcaaaatggtcaaaagcagatacagttgaatcttacatgccattctgtgattttatattgttcagcaacaattagttttcatttcttcacactaaaatggattgagcatattttagattccaccatgaaaacgataactaatgtgaatttttatttttctgatgtgaggtaaatggatctctctattgaaattctccatgactaaagcatatgtaaayatgtgaagtgggcggatcacaaggtcaggagatcgagaccatcctggccaacatggtgaaaccccatctctactaaaaatacaaaaattagccgggcatggtggtgtgtgcccatagtcccagctacttcrgaggctgaggcaggagaatcgcttgaaccctggaggcagagattgcagtgagccaagatcrcgccattgcactccagcctggcaacagagcragactccgtctcaaaaataattttaaaaatgtgttaaaatgggtaaattaattccattttttaaaaatatatcattgcttgttacatggagatcattgtattaagtggtttaggagacagttggcagtgtctgtgtagtggtggttcaaaattcttttttattaatgagaatcaaagttgtaagtttggaatcaaatatctcaaagctgtgtggtaaagcattttatgtgctgttcttagcatctttatgcattggaataatttatccttttaatttttttaaaagttttgtcttatttttaattgmcataataagtatacataattacgggtacagtgtgatgtttccatatgtgtattcattgtatgatgattaaatcagggtaatcagcaaatctgttgcctaaaacacttatcatttatgttggtgacatcattaaaaatgctttcttctagctattctgaaatatacaatacataattgttagctattgttatcctactgtgcaakagaacaccagaaattattcttcttctttaactataactttgtactctttgaccaacctcttcctgtctctccctttcctacattttccagcctctggcaatcaccgttccactctacttctatgagatcaactgtttcagattccatataagaatgagatcatgtggtatttgtccttctgtgtctggcttatttcacttaacataatatcctccagattcatccatgttgttgcaaatgatgggatttcattattttttatggctgaataatatttcattgtgtatatgtaccacattttctttatccattcatctgctgatgggcacttaggttgatttcatgtcctggctattgtgaatagtgctacaataaacatgggagtacagatatagcttcaacatactgacttcatttcctttggatatatacccagcagtgagattgctggatcttatggtagttctacttttaattttttaaggaaactccatactgttttycataatggtcttgctaatttatattcctaccaacagtgtataagggtgcccttttctccacttccttgtcaacacttgttatcttttatctttttgttaataaccattctaactggaatgaagttgtatttcattgtgattttgacttgcatttccctggtgattagtgatgtggagcattttttcacacacctgttggccaattgtatatcttcttttgagaaatgtcatttcagatcttttgcccattttttaatctttcttttcttgctatagagttttttcagctttttatatatcttatagatcctagatattaaccccttttggatatggawatatagtttacaagtattttcttgcattctgtaggttgtatcttcacctgttgattgctttctttgctgtgcagaagttttttactttgttataatcccatttattttgtttttattgcctgtctgataaaaaaaaaaaaaaaacccaaggctcctagtttcattcttaaactgtgagattttggattgatctttgtatttctctgagtgtgatttggaaatatttgccttcattttggtcatttttttttctcttyagcttaaccagctcgaaaaagcagtggargcagctcacacatttttcgtggctaaccctgagcacatggaaatgcagcagaacattgagaattacagggcgacagctggtgttgaagcattgcagttggtagayagagaagccaagccacacatggtaagctctgtggscccctgccctcaccacagggagctaagtgctcctaagtttcatctgagtcacagcaaatttctatgaatgaatatctcataaagtttattctcaaattttagtaacatttttggactttcagaattctcagaatataatgatcaggtctgaaaaaattgaggttttttaaaattttaattaaaattttaaaagttgaaataaaaaaactaaaaaattaaaaatttttaaattaagagaaaataaaaattaacttagaaaatyrgcataatgtgataaaaactagaacatcatataattctctataatcctctctgaacctttcygatactcttattttatacctaggagstgaggccagtgtaaattgttcaggattatactgtgattttccagctcccagtccagtggtttgcccattgtacctgtatgtttcaaactggggttttaaaaagtgatgtagttctttatatagactaaacattacttgaaatcacatkttgaaagccttttttttttttaatttttgacatcaccattcycaacatgtagcctccaaaattatcacagaaaaggataaggaaagattttagaaaatattaaaaaaaaaaacaaaaaacacaggcagggcctaaaagtggatgtcacttccacccacatctgttgtcctgcacttgttacatggccctacctataggcaaatgatttcaaaaacacagtcttgcatgtgctaaggaaaaaaacgacattgactgatcacatagcaatctatttgctcagtaagacccctctcacttacaagcatttgaagccaggaatgttgttctttatctcccagtgcaacccttctttatccctccgcagcagaagcatccagtaccccatctacctagatgatcctgagtcaacaaaaacccttctctttgaaaataagggtttttttgtttktttgtttgtttgtttgtttgtttgttttttcyygtctgtttcattacaggagagttacaatgcaggagttaaacattatgaggctgatgactttgagatggctatcaggcayttcgaacaagccttaagagaatatttcgttgaagatacagaatgccggaccctatgtgaggggcctcagagatttgaagaatatgagtatttagggtataaggctggtctgtatgaagctattgcaggtaaaagcttaatttttcattttatttctttcttgattataaaaatactacttgcaatttgtaaaaaactattccagcaaaatagaagaatatactgtaaaaataaaagactctcatgtgtctatcccagcctatctcctgtagagaaatgtatgtagttaaaattttggtgactgtcttcccaaactttttcaggtccttatgtaaatatttatgtatttatttatagttattatttcattttttataaaataggacaatactatatatawtgtttttcaacttttgttgttttattttatgcttaacaatatattgtggacttcttctcacgtaagtacgtagagccattttattgtatttaatggttgggtaatgctctgttatataaacgcatcataatttaattgactagtcctttagtgatgagtgtttaagaggctgaaatttttcattattataaacaatgtagtagtgaacacttttgtgtagtcttcaactacttaaaatgttttattayttaataagaatttaatatattacaaagcggcatttaaaatactaggtaatgcacattatagaataatttgggagattggctagttaaccacttatgaggagaaagtgggktctctgctgtatgccttacacaaaaataaattgtatttgtaataacaatataagtgtaaaatataaaactgttagaacaaaatgagggaaaatatttgtataatattaggagaagaaaagctctttttttttttttttttgagacagagtttcgctcttgttgcccaggctggagtgcaatggcgtgatcttggctcactgcaacctctgcctcccggattcaagcaattcttctttctcagcctcccragtagctgggattacaggcatgcaccaccagacccaactaattttgtatttttcatggagacggggtttctccatgttggccaggctggtctcgawctcctgacctcaggtaatccgcccacctcggcttcccaaagtactgggattacgggcgtgagccagcacgcccagcagaaaagctcttctaagtatgacaaaagacaagaaaaataaagaacaagttaaactttacctaagatttataagtacagatttatacgataaaccaagctgatctacaaacacaaatagaaagtattgcaaaatattttataggcaaagtgttaatatatttcatattcaaagagagcctgtaaattattattgttcatagtaatttacttcttaattatcagtagtaataataaccaacacatatgtagcaattgtaacatacaaagcacttaacatatttttatctatttaatgctttaagcaactcttatagatactrttgttacttactctcctctcccttttgtaaatgaggaatttatctgaaaaagattaagtgatgtgattagagtgaagctggaactcatatttggacttttctgaatctagaatctatacttttaaggtctacataattgaaaagtaggcaaaggataatttattaataaaattttcacaaatattttgagcacacwtttttttctgagttacccatatatgaaaagcaacrttcaacttcatttacttactgaaatgccagtgaataaaatcagtttgctctccccaacttccagtgctttcagtcttcctaaaaagcactactcatccgggcgcggtggctcatgcctgtaatcctagcactttgggattctgagacaggtggatcacatgagctcaggagtttgagactagcctggccaacatggtgaaaccccatctctactaaaaatataaaaaattagccaggtgtkgtggtgggcgcctgtaatcccagctacttaggaggctgaggcaagagaatcacttgaaccttggaggccgaggttgcagtgagccgagatggtgccattgcactccagcctaggcaataagagcgaaactccatctcaaaggaaaaacaaacaaacaaacaaaaagcactactcacmtaataactcaaaccaagttacctttcaatccaacatcttccttaattcctattcccatatgattttttaccaaacttggatagaggttatctcctaatagcactgaacacttcctaactccctccaccccttttgctaccaccctggctcaaagcaacagtgattgcctccttgttgctcttcatgtcctgttctggttttgctccaaatgcccacagagcagtctctaaaaaaacaaaattctgctcacagatctggtttaaacaccccaaatggtttacactccacttggaataaaatccaattctttaataagaactttcatgattgggcacttgtgtatgttttcattcattctctctctccctctcactctctctcctgctttttgattccttaaatatgccatgcttatttccacttacagatcttcaaagtgttgttttcttctatctctcggctaaagccttgtcctgtttagtgctcaatcttcagtgcctaagaagagtgagtggcaaatagtagatacttacttagtaaatactggttaaatgaatgggttgattaatgaatgaatgaaggaaggagatgatatatccatctatctcatagcagggattaaaatggttaaatactccatgtttatgagaatgtaggtttaggattattgttaagaattatttttaaggtttcttatagagacaattagggtatagctatcaaaaattagactaggaagtagactgaaaattaatrtgacgaatgaccaatttgtgacacacccagwtacccaaaatcaactcagttcacctaaattcaatacagcaatctcaattattgaggatattttcctgaaagttttatttttttggatctctgccagatccagttgcctaaatttttggaatgtcagttttatgtgtggttcacattttaattgctatttctctacacttgatcttgyatttgggaatggcagattcttcctttattatagttaactgtgttgtggttgtggggagatatgcatcctgctttcacgcccacattcgcctctacacctgcttccaccaatggccactgaacagttttggccaatgtcctagatctggtttaggaaaatggaccgacgatttcccacagatgaatatttagtgatttgctcaagrtcaccacagcatgtcggtagctggaaaagaatagagatctcataactcaggttctttaatttttaagactcaaacttattaaaaacatattaattgcacaatgtcatttaagatagaaaggaggcaagggatatacctaataaaagtaatatgacagctctcactatgtaaattcttgtctgcttcaaaattgtcctaaattaggwataaaactggctttttaaatagcaaatgtattagaaaatcagaatatttgaattttagagttagacattaacagttcgggaaaaatacaaatggctgctgaatgcagttatttattactagctctgctatgaaaccctaaaggatacctttctgtcactcctattttgctgctatttgtatccgctttgaaaaaatatttccattcagattttgagttctcggtgggtatctttygcctttaccttttgcttgtcacttggaattaaaaggaatgtgtattagaaagtaaatagaaatgcaaatggtaagttgagtaggagaaaacagttgaaggttgtttatttttgttttcttaagaaatgaaacagctggttatttatttctaacatgctaatcaaataaatagaactcattcttccttcacatcccctgactggggttaataaccaatgggctttagggattctattagctgtgctataaatgattcagttagccaagttatacaaaactggcacattcccccacaccagaaaatgcacgtttccttcctgttgtgttttggggtccctctgcaaaatcaccaagatccaagccaaactcagactaaacagagaacctttwraaaaaaaggcagttgtggtaaattaaattgcacagctatgagatcaaatgattttatcatcattctcaaaagaacccactcagcgcagccatgaatgaayctttcttgctggaaaatacatmcatcttcattgtaaaaatcagtcaaggtgaaacgtaggaggcattttcttctctgggacattcaccacttgtgtttcctcatctcaggctttgataaaatagagtccagagccaaaggtggcatgaagaccctaacacttcaggactctcaagcaagaagaatgggagcaatagaaaggggagtgaagagaaataggaaataagatgctcattcctttagtttacatccttctgcctgttttaccagtctctggtaaagaatatacaatgtacttagtattagaatatactatgtctaggcgatagactaatttataactggatagaataggtttctgaccaataggtktaaaaaaaaagagtttttatttctcttttaggacaatttggcttgaaaatgttaagaaagaaaaasagcacttttgcttcacttctcagcctgaattttccatgcccatggtggtttctttttccaaactgttccttaacatttactagcatctgaacttccattcccgattccagggcacttcgagccatccaagatatccaaagagagaccccaaagttgttaaatatgaaaactgacattcagctgggtgtaggtggggtaaagtggactgtggrgtataaaaagtgtacatgggaagggaaaagtgaggtgtagagaacagactgtgagctggaggattcggaatctactgtcgttctagtgatcgctgaccaggagaccttggcaagtcacctactttctttgtaaaaaggttttgcagtccggaagtgaggattataataatttggtcttccagtgtggtgaggtgaggaatgacctgtgtaactgtggctgtgacgttgacgtttgggcactcagcaacctggaggaacacacgtattggctcttgtcttccagatcactacatgcaggtgcttgtttgtcagcatgaatgtgtgagggaacttgccacccgccctggccgcctctctcccatcgagaattttcttcctctgcactatgattacctacagtttgcctactatcgaggtaaagcgtggatcatccgtgaagacttcttgggrggttgtggttcatcattacagacatcacatttttgtaattgagttttctgacttcttcagtttattatgaaagcaataggaatttatgcatttcttctctcctgagctgcaggacaagaagagcagaaggggatatcaccaatgggcaaagtacaaaatttaatgctgtgataatttactgaaaattatactagattgacattttgcatggttttttagacttaatttttttagaactgaatttaaaaggaactttgcaaaatcctcttcctttccaaaaacaaaacattatttattatcctggcgttgatggcacacagtgaatcacgtgctcaagtcataaacagtgaatcaaagatgagagagttgcttaatttttatcattccttttaaaaatcagagtcatctcagagtatatatatatgtgtgtgtgtgtgtrtatgtatttattatacacacatacatgcacacacacactatatatatacacacatacgtatattgtaaatttccattagaagaaatacaatgttgtgamctatttgaaaacaaggcatacagacatttaaaatttcccttgtaatagctaaatatttctataatgaaaagtttatattggaaacatccttgttagttccttttagtagtttgctactgtaggatgtgctataattgtatagtgaaggatttaaggggcttcctccagaacatctgggactctatgaaggactttgcattgaagtaccagtttaccacaaactgcagcaatgaaaaataacattttaaaagcacttatgttactcatacattatatataaaatggtacattactgttgcaaagatcaccttcaggatgtttacttaacccaaactcggtacaaaaatcagaattaactcatagaattctgctgtttatatgtgttaaataataaaagttgtcaacaaacatcttcagatagaaacttgacgatttgcacaaaacaactagtaccaaagcagaccaaaggtaataacttttgaatacttgaaatcatgtctttccttttatctgtgactgtttctgctttctctgctgagcctcaatttatcttccctcttattcatgtttaatgctgacctytgtagacacgttgatggcctccctttaaaatcctttggacagacctaggctgactctaatgctgcaactcctttgtctttcagttggtgagtatgtgaargccctggagtgtgccaaagcctatcttctatgccatccagatgatgaggatgtcctagacaatgtggattactatgagagtctgctggatgatagcattgacccggcatccattgaggccagagaggtgagaccaatgttttgaaaagaaattctttttttttttttttttttaagacagagtttcgctcttgttgcccaggctggagtgcaatggcacaatcttggctcaccgcaacctccgcctcccgggttcaagcgattctcctgcctcagcctccctagtagctgggattacaggcacatgccaccacacccggctaattttgtattttttttttagtagagacggggtttctccatgttggtcaggctrgtctcgaactcccgacctcaggtgatctgcccgcctcgkcctcccaaagtsctgggattacaggcgtgagccaccgcrcctggcctgaaaagaaattcttgattctgcatgtgttcgggggagagttgataaaaatatgacactggtcttaaagatgtctaacaatttagcaaaggttgttgaactcggttctttcaaactttatttatgcctgaagcacatttttattcatacatgctagcgtgtgaaagtatgttgagatggggccaagtcttgcagttctgaatatttgttagctcatttgtgactatctaatgaaaatattgccacctgaacatttatcatatctcttacctgctatttaaataaaaaatgtctttctttacttctttttctctaggatttaacaatgtttgtgaaacgtcataagctggagtctgagctgataaaatcagctgcagaaggtctggrgttttcatacactgaaccggtaagaggaaagaggaaacgtttattaaaataatgattcagtggaatcctttttatgtttttattacctgcctccatttttgccatttacctcaaaaagctaagatttcgatgccctccttgaggtaaaaattgggggtgggagatatttactcaatatatgtgatgaactttatctatttatttatttatttattttgagatggagtctcgctcttgtcgcccaggctggagtgcagtggcgtgatctcggctcactgcaacctccgcctcctggattcaagcaattctcctgcctcagcctcccgagtagctgggattacaggcacaygccacaatgcccagctaatttttttttgtatttttagtagagatggggtttcaccatgttggtcaggctagtctcggactcctgacctcaggtgatccgcccgcctcagcctccccaagtgctgggattacaggcttgagccgccgcacccggccatctgatgaactttaaaagactaatggatttccacatcagtcattccatattaacaaggtctaaagtcaaaagcaaatctattgggtaaaagtattttgtgtatgactcatttgccccgggagtgttttattttcctaaattccggatgtggtgttttaaatttttctattaatgcttttatgttacctaaacattaaagagaattcaaaatatcatcagtcacaatgctatcacacccatcatgctgacttcactccgcttttccatgttgtcttctaatcattgtttatatgaagacatagcttttgcagaaacatatactatggtataaagagatttgtattcttttaagaagataccataagaaatttctacatttgtatagctttaaaaggtatttttagctacattttagtctctaaaaagttggtagaatttagaattttagataggtagaattgacatacaataaataaatgaactcttctgctgaacatttgaattatttctgatttttgaattatacataatgtattaagcattttttctctattgaattatgtcctgaaaataaattcttaagagtggaattattctgtcatcaaaggatataaggttttaaacttcttgaaactaaattgcttttctaagagaattctcttagaaattatttattattaatttatttataattatatataattatatatgattactaagagaataattctcttggaattatttatttgcacactattttaatactaacactatctcatgtgggaagatttagtgactactctaaagtctcatagctcacaacrgattgaacaggcatttgaatcctagtaatgcataaaagtaccattttaccacaaatttatcagcgataagaaataacatttgaaaatcacttttattatttatatattatgtatgaaataatacatcattttaacttgtaatttttttgatgaccagcaagaataaaccttttcacatattaactatttttcctcttcttttaattacttgggcatgggttttattcatttatccattggttactatgtaagttcttcaaatgatatacaagttaatacatttataaaattatttataatatgtccatttacaaccttttttcatttcttatgccgtgtttttataggcacactttttaaaatgggttaattttaatgtactatttctaatataacaccttctaatatattaatatttatatcgggccttacttattattcttttaaaattatgttatccaagagacsttaaaatatgttatttactaatttcatgatctatacagatgattactaaagctcaattttgtttgcttgttttattcagcaaacataaagaagttgaactgaatgatctttcaaatgtttttctgccaccaaattccaagtcactttcttggacaaaaggatggatatctaggctaattccatagtatttgaaaactcgacttgtatttcattttktccttgccaaatctccactaactttagccttccttttcattaatctataaaatataaatatattgtatctttacacaatatgcaaaattcctaaattatagatcttttgaatgttttgtgcatattttattttatcttaattctgtaagtgatgttttagtgacaaaattactgcattttttttttactcgattcaaaacagaattattggatcagatatggaggacgacaggatragaatcggtaagtccattcagaatgcaaactggttttttatgaggagaaatacttagtgtcataacctatcatagagaaatgtagctctatgaaataggcaaggagatataataaaataattctaagctctgaattaggagctctrcatccaggtcccagctcttcctgccacgtttttgtaaccttaggtaatatatcttctgctttctggatctcattttttccaggaaaaaaagggttaaatcaggtgctttctatctgctaacgttccatgattccgaatctgagaaggttggatactggttttgatttattaacagaaaaactgtgaaatgggtttttgatggtgaattcccttattgtatttacctaaaataatgaagttcagaaagttatactaaaatagctaaaatattaggtgtcactaactgaatcagaaatcaagaaagctcatttttttttaaattttattattattatacttwaagttttagggtacatgtgcacaacgtgcaggtttgttacatatgtatacatgtgccgtgttggtgtgctgcacccattaacttgtcatttagcattaggtatatctcctaatgctatccctctcccctycccccaagaaagctcattatttaaaaatgacaaaagtcaatttacatcttttwaaaggactgaaactcagaaggttagaaacacctgcttgagatcacatggtccagcttattcattttcaaattgggaacctgaggccctgacaaggcaagcaacttgcttagagtctcatcacaaaggaaggacagatccagatcttcttatttagaatcttgaagtctttcacgaggcttcaaaaactcaacccttgggtggcataaaattatttcgagagatccaaraatgtatatacacatttggatttgtttgatttttacgtatataaagaacagcctgctatcatttgtgtgtttgcatatgacaaacctgtgtcttcttttcacaatagtcaagaactactacattatgacataatttatttcaattcaacagttgttcaatgatgcactccatgttccaggccccattggacactctgagcattataaagatgctcatgataatttttttcctacttgagattagagtctaatctgaagagagttatgttatgcatacaattaattgtaataaaggttgctaagaagatttagaggagtgaaataaggcaaactcaccgaggaaatagagaacttactagaggcagtgacatttaatttgactttaaaagacaggtgaacttgtttacaataaaatacacaatatagagtcacagactaccttggtaaagtattctttgcctttgaacatcgttattcaatgacaaattgccattttaaattttttgaatgggcagggtcccttcaggagtgaacgtagagggagcagaagttcatggattctcaatgggaaaaaagctatcacccaagatagatcgagacctaagagaaggtaagtagctgtgcacttttaccctataaaggaggggaaggggaagatggggcttgaccagttcttttccagatcaaggaagaacccactttctctagaaaataaagaataagactaagctactacactccctaatagtctgaaagcaagacttaaaaaaaaaagtcttagatttgtgtattattaccatgggtttcaaaaaaaaagaaaaaaagaaaaagcctccaaattcactccctcatctgtttcccaaggaaacttgcatggtcatcaccattctcagaataccggaggcttagcaatttcctatggtttacttctgttacacagtcagtaagagctaggtagtgtgggacagactgtatatcagaggaacttggagaggagaccagccacatgggatattagattagttaaccttagatgcttgaagcacatagatctgagcagggcctttagagaaagcagaatgtagtaggatgcatggatgtagagggaaccattctagtggttaaaagaaacggagcaaaggcacagagacgaagcgagcggaacattatgtgcctacttatgtaagatgaaaattagtagagacaacaggtggagtgttgccaaaaacagtttttaagtagagccaagcattgttatattaataaaaactattagcaatagtaatactaacagcagtggttaattcttaacaattattatttctatatgttttatgatttcccagcaaatttgcacacaatttatttgcatactattttaatactaacagcatctcatgtgggaagatttaatgacttctctgaagtctcagaagctcagaacaggttgaacaggcatttgaacccagacatttgacccgaaatcccattttctcttcttcacctgctgcatgaaacatagaattgtgtagatatcaaaaatatatcacctattgatgaaagaattgcaagacaagaggctttcaaagtgctgcattgggaagctgtacagtacttctttccccaggagaycttgtcagcacattcctctgatttgaaaacttttggctctctacagctstcacatttcccatccctttccttccttagcttccaagtcagttttgaaccagtaaacaggataatatgctcatctaatctgacctggacctcagtttgcagccacaaagcccaagctgttttacaaatgccagagagcttcatggtcagccagagttcatgttgccttttaggctgagaaatcacccaggaagttcatgccaataagccaacacattgctgtaaatgtttgggaaactccaggacagttgccaaatttcaaagcatttttttcccctggctaccagggaatctggtgtccagcaactgactagaaggttaatagaagagcagaacagaagactacgtgtgatagagaaggatcatgattaattgggctacacaaatctaccatttccacagaattgtctaggacgaagtggctaatgggttgtaggatggaatgttttctgggaacctactggtctgaaggaaaaaaaaaatttttttttacctaccgtactctcatattcattcaatacagaatacttctgtggccagatgtgtgtgaggttttacccacatgcaccagtaattctccagtggatagcaactgagggtgaactaatccaattcagttctgacactgtctgtctggaaatagtgtcagatcccacaggttaagggcttagcccacaactggcatttcagatgccaattgcaagtataagttgttacctatacttctgaccaacccctcattgaccagcyacaaaccagtgttcccatgatcctgactttgggttaggttaatttgctagagcatcccacagaactcaggaaactcttgtgtttactggtttattataaaggatacagatgaacagctagatgaagaggtacatagggcaaggtatggggggatggcaggaggagcttccatgccctccatgggcaaaccaccctcccagcatctccacgtgctcagcaacctagaagctcatcamatcttgttgttcaagagtttttatagagcttaatytgcaggccccaaactcctttcccagaggtctgtgggtggggctaaaagtttcactttcctaatcacttggtctttctggtgaccagccccattctgaatctttttaggggccctaccctaattcatctcatcagcataaacttaagtgtgatcaaaaggatctcattataagtaaaaaaggacactcttatcccttgggaaattccaagggatttgggagctctgtgctagaaacaagggataaaaaccagtatatttcttattatatcataactaaaaagcctgttgtccagtcgtcagatacctaattaggatctaaattaagaacagttgtagatagatacaaagtttccaaccagaaaacactttcatatctctttttytttttttttgagatggagtctcgctctgtcccccaggctggagtgcagtggcgtgatctcagctcactgcaacgtccgcctcctgggttcaagcgattcttctgcctcagcctcctgagtagctaggactacaggcacatgccaccatacccggctaatttttgcatttttagtagagacgagatttcaccatattggccaggctggcctcgaactcctgaccttgtgatcctcccgccacggcctcccaaagtgctgagattacaggcatgagccaccacgcccagcaacattttcatatcttaatctgactaaaaggggatgtcagggaggcatgtgtcgcagaatagagtatacttcagcttttctcatcttccccaaagagactgtcatctactctggatgcctatcagtgtttagtatttygtattattcctactggacagctcctaagcattaagatggggtgacccagggctacttacatcccacagtggcttcagtccatgaaacatgcgtgatatggaaactcactaaaaaacattgctgtcacttgtccattctcctttcactcaccagattttttttttatttttattttttgagacaagagtctcactctgtcacccaggcgggagtacagtggtgcgatctcagctcactgcaatctctgcctcctggattccagtgattctcctgtctcagcctcccgagtagctgggactacaggtgcatgccaccatgccaggctaatttcttcatttttttttttagtagagacggggtttcaccatctcggtcaggctggtcttgaactcccgacctcagttgatccacccgccttgggctctcaaagtgctgggattacaggcctgagccactgtgctcagcccacccaccagatttttaaaggttgtgctggatatgattccagagtcagtagggggatagtagaaacaatgttggggaataaacttggaatcaggaggcttagtctctgggattatcttattctgatatgctccacagtgatgaagatctagtgactcaatttttctgggccctatgatttttatctataaaagaaggatagtaactgttttaagatggtaaacataaaaagttcttctttttttttattttagagccagagcctcactctgttgcccaagctggagtacagtggcacgatcttggctcactgcaacctctgcctcctgggttcaagtgattctcctgcctcagcctcccaagtagctaggattacaggcatgcatcaccatgcccagcgaattttttttttgtrttttagtagagatggggtttcactgtgttgcccaggctggtcttgaactcctgagctcaggcagtctgctcgcctcagcctcccaaagtgctaggattacaggtgtgagccaccgtgccttgccctttttttgtttttttaactgtaaaaggctgtactcatatagggattgttagcctgcctacaccatcatgctttgtatgacactatcgaatttctgataaagtgattcttcttgccatgagccagacagtgagtacaagggagtactttcttagatgatcccttcttgttgcaaccagagagtcagagccaggcacatactttataaacgagggaagaattaacttgtttgactaaatcttcttgggctgtggttaagaattggctgaagccatcaaatcaggccccagaaaccacaatttattggactacatttttatttttattttaatgttttcctctgtctggtgtgctactagtcattaagctaccagcttaagactggtagtcatatggaggctggttgacttgcctgttgaatgatagggtttcatttgtctttttttttttcctttggttagttgatgggtgatgggtcgtttttgttaaatgtacgtgtggaaaatatctgtgtaaaattctacacttagtaatattaatgattatgttagctacatgaaaggcatatttctaatgcagattctcccggaacccaagattcagatrttgaagactccatgttacattcttccttcacttgatctttgcatgttacttgtggaatgctaggagaattgtcaatatcccagtagccttctcttaaggctctatgcttattaaggtgtctcaatcagaacttaacacartattccaggtgtagcttattaattcaacaataacgatagtaatgataatacatacttataatggagcttaagactggtagacattttcctaaatatttcatttttgctaactttcaaaatcatattttgaaaataagctaattatgtttaaaataatacatcttcaatgtagaaaaagagaaaaacttggcaaagtataaaccaacttaattcactaaatctctcatctgtctttcatttctatttgagtttttattagcagatgcttttcagtgaatctacaagtatcttatctttcttcttgaaggaacatttctttttatacttctaaattggaatggaatatacagttcacttttccaaatattcgagggaatgcctgtctcaatttgactacaaactttaatcagctacatagattagaacagccttttccaaattgcgttctatgctaagacgtttaggggggatttttaaaagactacttggctgggcgtggtggctcatgcctcgaatccaagcactttgggaggctgaggagggaggatggcttgagtccaggagttgaagaccagcctgggcaagaccctgaaaataaaaaaataacaagaccctgacaaaaaaaaaaataaactaggcatggtggtgcgtgcctatagtcccagctacttgggagtctgaggtgggaggattgcttgaggataggaggtcaaggctgcagtgagccatgatggtggtgccactgcactccagcctgagtgacagtgagaccctgtcaaataaattttttaaagactactttttttattgctgtgaaaacataatgaaaatatagcagcttatgaaaatatccatttattatctcatagtttctgtggggtaagagtctgcagagaacataactgtgtctttggcttcaggatctctcaccggtttcagtcaagttgttgaccagggctgagaattcagttcccaaaaagttgttggactatggccttttagttcctagttggttgttggctggaggacgccctctattccttgccatgtgatcctctccagtacagccgcttgcttcattacagcatggcagcggagaaggcaagagactgagaaggcaagagagaagttgcaatttcatgtaacatagtcacagaaatgacaccttatcacctttgccatattctactgtttagaartaagttccaggttccactcgcacttgtgggaagcaaattgcacagctgtatgaatgttgggaggcaatgatcattgcagcccatcgtaaagtctctgctgcaggaaggaagttgggggagtcggggagggagagaattgtattcaattaaggctaaaaactgctgcatattatgttactacttaggacattaataaggcctgttcacatattaaaagttctgagacgtcctcttatcttttatttaacccagtactttcccagaactttcaatgcaacacaatttgagaaatagtgaattgtagaaaagcatatttttctattcaactaaaagatgtgatactgaaacgaggcttatggatatattcttgggatccaaaaattccatatttataaattttaatcacaattttcaaaaattaagagaagcaattaggggttatctaagggatcaacttctagccaggtggtgtcatgggattccacagttcaatgggcacagttatggtcatattaacgccaactaataatacttcaatgattaaagactagaaataaatgaaatacgatgcacttataaataatgtattaggcttagatgaaagctgatatggtttagctgtgtccccacccacatctcaccttgaattgtaataatccccatatgtcaagggcagggccaggtggagatarttgaatcatgggggtggtttgttctcctggtagtgaataagtctcacaagatctgatggttttataaacgggagtttccctgcacaagctctcttgcctgccaccatgtaagacatgactttctccttctttgccttccaccatgattgtgaggcctccccagatgtggaactgtgagtccgttaaatctctttttctttataattwcccagtctcaggtatgtgtttattagcagcaagaaaatggactgatacaaaggccaaaattaatcgtggtacaktaagattgtgtagtagtttaactagagaaaagttgtggtagaatagtaattacacaccaacagtactataaggaatcctggctcaaaagaacccagaccagatcagtgagtagaatattcatgtggaaggtagmtttttattttcagaaaaataacgttaaccattccatttgttgattggaatttagttcattttatggtcttgcttttatttagtcttgtaaattggtttgggtactgtatgaaactactaaaataaataatgtgaacatagttttatgattgcatatatagaagtaaaattagagtgaaaataatttgtcagcactggagctccttagggaacttctgctttaacagataaccgaacattactctagattgagaaacactgcctcatgcttttaatattccattaatcatgagctgtagtgagtcttttatcctagctagactaataaacatttagacagtgctcttccctaggctgactaatctattttataaagtagacatcaatttcaattgtctcttcttcctctgttggagtgttttaggccaacgtgttggtgacctttgctagacctggggtggcagggrgttgtgccttccctatccctgctgtcttatcttcggctgttgctatggacaagcacgcaccaggccccttgggagtgttataaatggttagaagcagtgttttcttttctgttccattttctggttcaaaatgtttgcactatgctacaccagaagatttcctctctatcagaggctttgtccttcagtcctactctatgaaaaaaagtctttgtcaggtctggattttgtaatttcacaacctaaaatgtgaccccaaagcatcaccctctgaagagcctatctggagttaattttataaacttgtggtctctctctgggaagagagtaggtgcctaagggaaaccctcctgtgtggaaatagaaacgtgatgattttgcctggagaacagagaaaaacactccaaaagcaagacaacctagggtcagttgtgtggtaggaagaagactgaggcagagtcaagtgacttgggtgtgactacctgaatcacctagtgaaggtgttactctagacaccagtgaaactgaggtgtgcatgtcatacctggggacccaaacatgcaatctgtggtgttgcgacagaggtatgaatgaggggctgtgaacaagggtggactttctcagaagagagtcctatgagatgcccagtcgactttttgggatcagcattagaaacaaatgcaaaagtagttctatctctcccaaaataatgtacncatgtaacattattatgacattatgaggaaacccgatagacatctttctcctgaatctatattgtgtttatcaagcttcctaatttgcaatttgtctttgcatttctaaatattcatgaagaaatggactcaytcgaattgcacattgaaagctgtttggtattctgtgcttcctttcgggggacagaggtaacagggaagacaatgtgctctgttcctgtaggtggtcctctactctatgagaacatcacattcgtctacaactcggagcagctraacgggactcagcgggttctcctggataacgtcctgtcggaagaacagtgccgggagctccacagcgtggccagwgtgaggwtccggagaaggaggggagctcactgcgctggcctgccaagaagctggaactgctttggtcctggtctcatctggagccagacaacaagccctgaaatattgctttcttgaggagaaagacataaattatttttgaggaacttttatagcctttgggttgggattattttagttttcccgggtgggatctggaatagctactggcatatttcctagcccaacagccatctagcaaggtccctgcctatcatataaagttgctggagaaatccttttattttaattaattattaggcaatatatcaataatttacattctttttatttccataaaaagtgacagtatttgataataaaaatgtagartgaagattaaataaagatatctcttttaattaaaagaatagttataccagcatcctggaataaaatggggatggttcttagcattgactagagttctcagctttctggcasccaaagcagaaaaagacctgatgaattcatagttatcattgatgacgtatcttcttgtatttgcttccagggaatcatgcttgttggtgatggatacagaggaaaaacttcaccccatacacccartgaaaagtttgaaggtgcaactgtcctgaaagcactcaaagtaaagtcttaacttcttttgggtttgagttccttagtgtcagcctaaggcttctgtaaatggcagatataagaaagaaaaaagtggccaggcacagtggctcacgcctgtaatcccagcactttgggaggctgaggcaggcagatcacgaggtcaggagatcgagaccaccctggctaacatggtgaaaccccgtctytactaaaaatacaaaaaaattagccaggcatggtagtgggtgcctgtagtcccagctactcgggaggctgaggcaggagaatggcgtgaacctgggaggcagaggttkcggtgagccgagatcgcgccmctgcactccagcctggcctgggcgagagcgagactccgtcttaaaaaaaaaaaaaaaaaaaaaaaaaaaaaaraaagaaagaaagaaagaaaaaagttttgaatatatacctatcaggacagctgaaagaagcaagagtgaaatgaaaccttcattgtagttaatcattcctccgttcagccatcaacttaycaaactttacatttcctgacaaaaamtacatacaatccctctttgtaaaatcatgatctaatagtgaaaacatattcaaacaagtaattattctctactgcaggaagggttgttagagaggatggtagaacatattataatagaagagaagaggaaccaagtagcttttagctttccatctgttattgggaagagtttattccaatggcacaatgtcctaaccgaaatccacaaatatgtagtagccttccccattagtcaatacagacatgacaatcctatattggctcaatgcaagctagtgcctgtttttcttacgwcctccaatgaacccatttgtttctcatgttttgtkttkttttttcagtctggttatgaaggtcgagtcccactgaagagcgctcgtctgttttatgacatcagcgaaaaggctcgaaggattgtagaatcttaytttatgctgaactcaactctgtatttttcctatacacacatggtctgccgaacagccctgtctggtgagattgcagtctgaaatggttcccttttacccacaatacattgggaaatgaaacaaggcaaaacaaagctcaacagcatggtagattaatattttagaygaattctagatttccaaaacaaaagtagcttatgaactcttattctgcttctttctttttcttccttttgttcttctgaagttccagaaaaccctcgttctgaacattttcccttccaaatcaattttccccaattgctgaagtcttgggaaaaaaaaatgcttttctgctgtaggtttcccattttgaggaatcaggaacatggaaatcatagtcaccatgatgtctaccagcattaagtggaagcatagaagatgaagggatgattgaaagaaatactcttaaaaagaccgggaccttctcggtccctgctcakcattatttctcctctatgtcttatgcccctctgaatggggcggggggaataatgatgtcataggagtagacttttacacttgggaagttttagctgaattaaatctygtttttttaaaaaattttcatttccttcccattgttttgctgccctatgtgaagtacaacccatgaaaygcatggaatttgttcatgtatgtttatatcagaaataacttttatagctgaagagacaggtgtgacatgctcaaggtttcacatccagttcatatcagaaccagaccagaatctcaactacttgtccactgttcttttatctgttctttcctgttgtctgcctcygcccatttgcaaagatcatcaggactgggagaagagagattgtcagttactttggtggaagttgctgcacttcatttctcgttcttccctattcccttttctggcaggtcagcaggatagaagaaatgacctcagtcatcccatccatgctgacaactgtttgttggatccagaggccaacgaatgctggaaggagcctcctgcttacacayttmgagactataggtatagctagaacctgcttcaaaacaaagcttttacctaacagttttcaagcagtgaaaactggaaaggtgctctgttttgcttgacgtygtgttcatatctccaaggcagaaattctcaaataatcttctgaagtagctgccataaccaataagtggcattatcatctcacttttatcttaaaaattgtgcacagtttgcatcccatttcacaaaatgtccattttgttttaatatgaaaagtaaattttatgttcttttaaaaaaattcctgttctccctggaacatattccttgtggtatatgtatttcagtcagaatacaagggcatggagtcttggcctacataaggactttatcacatcaattatctttattcatacccaagaagaactatgtctgcattttataaataagacactagaaactcaggagaaaagaatgtcctwacctattgagagagatttcagtgtgtaaggaatcaggagttatagtcaccatgtgttcatccttactacactgtactcgattccaaaacatttattaagcacccgctatctgcaaggcgtggctaggccacaaggaactcttcagcaagttaaagagaaaaacaacaacaagaacaaagcaaacaaacaaacaaaaatcctttagagttatwtaagggaaaaagagagttgtaattagggtgggcacgttcaaagggctagattaaattaaaactagttaggttttctgtggaggaagtgaaatgtgagacaagctttgacatatgattacaattttagtaaaggtggaataagtaaactcttcagaggtataactcaaactctatctgatcttctctttaagagtttggaggaccaattatatcaatgtctagttcaaaggaaacttactaatggaggctggacagtacatcaccagtcttcagtattctatgaccatgctctcataagcatataataatacaaatagttttctcttcattcttatagtgctctcctatatatgaatgatgactttgaaggaggagaattcatattcacagagatggatgctaagactgtgactgtaagtaaacctattcttgaatacttatttagtatkttttagctcagtattgccatttttctaagtacttacagatggttagatttcaaatacttctgagctcaagatttcaagaggttaagagagtttcagtaaatgtatagatcataaactgttagaagtatccataaaaatctagtacgttgtaaagatgagtaaattaaagaattgaratattaatcattttatcatgatcatatagctagttagtgttagacttggaaccaaaacctaggtcttctaattctttgtcaagtaatctgatggaaacgtaagaacgtcagttcctaagtcacccaagtctagaataagtcaaatgattctacaaggtgtctttcaagtaacctggtgttctacgtacttggactgagcattggccttcaaatatatagttaccaaaattatcatatatgtgtgtatgtatgtgtatgtgtatatatacctataggtatgtgtgtatatatattatatatataaaaaatatatatataatatatatacacacatataaatatgcccactgcagcttcctttcccatgcagacatggcctcatatatatatatatatatatatatatatatatatatatatatatatktgcatatatatatgcatagagagatatatgattgtgactgtatgtaataaactcatacctgaaaattgatmcacacacacacacacacacacaaatatgtaaacaaagagtaaatcaaaagttcaattcaacgaccatcttcctaagtaaacccgtgcctttggaaagaagcctacttaaagaccatatagttagcatcctttggtcttcaagccaaagagcatacacaatggtagaaaaatatattttcgactgctgccgctctttggcccacttcattcccttagtcccgagtgctcgcccactgcagcttcctttcctgtgcggacatggcctcaagcaccaccaccactgccatgaagattggaataattggtggaacaggcctggatgatccagaaattttagaaggaagaactgaaaaatatgtggatactccatttggcaagccatttgatgtcttaattttggggaagataaaaaatgttgattgtgtcctccttgcaaggcatgggaggcagcacaccatcctggcttccaaggtcaactaccaggcgaccatctgggctttgaaggaagagggctgtacacatgtcatagggaccacagcttgtggctccttgagggaggagattcaacctggcgatattgtcattattgatcagttcattgacaggaccagtatgagacctcagtccctctatgatggaagtcattgttgtgctagaggagtgtgycatattccaatgggggccaagcccccaaacgagagacgttcttatagagactgctaagaagctaggactctggtgacattcaaaggggacaatggtcacaactgagggacctcgttttatctcttgagcagaaagcttcatgttctgcacctggggggtggatgttatcaacatgaccacagttccagaggtggttctcactaaagaggctggaatttgttatgcgagtattgccatggtgacagattatgactgctggaaggagcacgaggaagcagttttggtggaccgggacttacagaccccgaaagaaaatgctagtaaagccaaaagtttactgctcactgccatacctcagataggatccatggaatggtcaaaaaccctccatggcctgaagaatatagcccagttttctgttttaaaatttttgcaatctatccttttgacaaagggctaatatctagaatctacagagaactttaacaaatttacaagaaaaacaaacaaacaaccccatcaaaaagtgggagaaggatatgaacagacacttctcaaaagaagacatttatgaggccaacaaacatatgaaaaaaagctcatcatcactggtcattagagacatgcaaatcaaaaccacaatgagataccatctcacgccagttagaatggcgatcattaaaaagtcaggaaacaacagatgctggagaggatgtggagaaataggaatgcttttatactgttggtgggagtgtaaattagttcaaccattgtggaagacagtgtggcaattcctcaaggatctagaaccagaaataccatttgacccagcaatcccattactaggtatatacccaaaggattataaatcattctactataaagacatatgcacatstatgtttattgcggcactgttcacaatagcaaagacttggtaccaacccaaatgctcatcaatgatagactggataaagaaaatgtagcasatatataccatggaagactatgcagccataaaaaaggatgagttcatgtccttttcagggacatggatgaagctggaaaccatcattctcaacaaacaaacacaggaacagaaaaccaaacaccacatgttctcactcataagtgggagctgaacaatgagaacacatggacacggagggyaacatcacacaccagggcctgtcagggggataacattaggagaaatacttaatgtagataatggtttgatggggtgcagcaaaccaccatggcacatgtacacctatgtaacaaacctgcacattctgcacatgtacactagaacttaaaagtataataataataaaaaaatttccaattgagaaagtaagyagattatagatgaccaggtatctctcaccaccatacaaaatctaagtagttgggacatgtatgtgataaacttcaaagttttggcattatagaagctatttctaaacttttcttgaattttatgcttgtccctcatagcttacatgcttttctcattagtgaaacatatctgtcatttatgacacacatatgttattcatcacacagtactgtgatataagcaggtaatatcaaaaagtatgtattactgggttaaaaggtgattcctatgaggattctcgttaaaattgtctagaaacattgtaataactaagaaaaaatatttcatgtgacttcatacaataatatatgttaaaaagtcatgatgcctcactttttgggtaaaaagcttaaatgttaatatgggagtactttaatactccgtaatctgataaattaaatcaagattgacgatctgtattggagtttaaagtccagaaggttttttgcacttctgggaaagcttgagtgtaggaagcattttatttctgatctctgctaacactgaaactgaggtacaaaaatactggcatttcgcagtttcaaagaaagtcagacaggtggttgaaaagatttctttgcttctcctccatctagtggccgtatttggaaatgcttgatgcttaaagcaagggatgcctgtttcattaatttttgaatgtcaagttaactggaattctactttttaaagatgtgaaagcagataatattctcctttcagagtgctacaattttaattaaaatctataactatttttaaaaaccmagaatctaacctcccctaaaaaaactaaaactgatttaaacaaatttttaatccaaaagctcctgtttgagaacatttatttcctcaaatacttcatattaatgcatacagtggcattttagggaataacgtagataactaaaattcttacgtaaggcagttcttatctttccccacaggaagtttattctagtaccagcaacaacaacaacagcaacagaaatgggtatttttctgttttagtttccctttgactgtggagggacaaatggagcagagaaatggcataacttgaggccacataaggaagtaacgtcttctgagtcctttactttggaaaaatctggaagttgtgtaattatctgaaaggtggctgaaattttacttttattaaagacaattacagcacaaacgcttttctaaatcaatcatcagttagacggaaagcaaaaggattattttaaattatgcttagtatacttggaagatatgtggattcttttcaatagcggcatttgtttgtgagacttgggaattcaaggatgttggtttctctgtgcaggttcaaagaagataaaatttaatgagttccatttgtttcatgaaaaattaaattcagtataaacggggctgtgttacaaaagtatgtttataatcatttatccaaasttcataacatatttttgctgtagaaacaatgtcacacatggaagcaggttcactaaagcttgtttattcctccaaatacctgacatgtaacagatgatgttcgctgtgtgatgagatgggtcttagagatccttgtgaatccacggctataatcagttccarccgcctcatacagttcacagcttcttttcctaaactttcccaaagttattcatgtttaaaattactttcaattccagaagaaagaaaatactaatttgtccccacatcctttctttagtcttataagatgttaccaagacttggtaatcacatagaaacattggcaaatgcgtgtttgagtgagtcctgaccagcaccagggagtgggcagcccagaaaacctgaaattccaacatcccaaggccatttactcagaaggcttttytttctttctttctttctttctttctttctttctttctttctttctttctttctttctttctttctttctttctttctttcttttttctttctttctttctttcttcctttctttccttctttctctttctttctttctttcttttctttctttctctctctctttttctttctttctctccctctcttctttcttttctttctttctttttttttttttctgtcacccagactggagtgcagtagcacgatctcagctcactgcaacttccgtctcccaggttcaagcgattctcctgcctcagcctcctgagtagctgggatcacaggcacccaccaacacatctggctaatttttgtatttttagtagagacggggtttcaccatgttggccaggctggtctcaaactcctgacctcaggtgatccacctgccttggcctcctaaagtgctgggattataggcgtgagccaccacgcccggcctcagaagtcttttctatcctacttcacaggttttacctttcacttattttgctgcttctatgtggaaatgtacaaattccttctccagaaaaacagaatcacattgatactgaggacacgactaactcgtgaactctctagatttacatcagaacagttgccttggtaaagctgtttaggaaaagcaattccagcaaagacaaatcactcttcagttattgtgagtagaagagtaaaaagaaactgactgctttttttctgctcttccctttaacactcacacacaagtcacatatacacacacatgcagactcacacagacataaacacacacacatgcccacataaacacatatgcacccacctgtctctctggctttccgactcctccacctacctcttaccttccatatgtagtcacgtagtcygggagtacctatgttatgtagcaaccaaggactttaggaaatttttcaaatattcttcctgaagctagcagtgaaaaaccagccagctcattttatgcagaaggaaaccaaagatttacgggcatatgtcaactcaagtcaattcagaaaatggctagtgagaaccagtccatgttctcacctagtaaaatggctagtgccacttttttttggttttactttacttttctgaactatacagaggaatgaataaagtttctgtatttcccaagaaagacaaaatggattctactcacatgagacacttctttaaacacagaagcaaggcctctaatattcagttgcttaagctcattcaatttgaagaggcagcttgtttgatcttctaccctggctcagtgagcccagcagtatttctttttctctcactacactcttctacctaaacgctgtggacagctccacctgagcagtgcataagctgcgaaggactgtgtcagtcttaaaacacttaagggtgatggcgaataggccactccaaggggtgtcgtgttctcaccactagagatgttcaaacaatgcctaaacgaccactgggaaacaatagtgtaaaggaaatgaaatatcatacagaattatgacttttaaaaatgtttgtattgtgaaaagcacataaaccatgaatgtacaatttaaaaattagaaagcgtatacgctcatgtaaccactacctagatcaataacaacttttccagcactgcagatgtcctgtttgtttgtttgttaattacacaagtatggaatggacacctaccttgtatccggatgctttgctagtgcaaaagctacagaaatgaattatgagaggaaaactttgccttctttgaatttgcaggctatcatatatatagcatgtattgaatgattactatgtatgtggactttgctacacgttttacttgaacatctttttattttctgaggtatatattattttgaccttacctttgttttacgggtgagaaaattgagataatttacatcatcttcaatcccaggattcctttattcttcgcctcaggccttaactcaaataatctcatagccagagaagcaggagttgtggaaatgtttatgatacaacaattgaaagtctaatttttgctttctttctcaggcctctataaaaccaaaatgtgggcgcatgatcagcttctcatctggaggagagaaccctcatggggtgaaggcagtcaccaagggaaagaggtgtgctgtggctctgtggttcaccttggacccactttatagagaattggtgagtttctcacccgcccagaaagccaattaggcttgcttcatgaactgctttatctgagaagtcctttaaattgcttcgtctgaggaaaagaagagggtaaaggcagttcttaatcagatatgttctagtaagtgaagatgtttgtagaaatagctgtgtcaatgatatttgatagtcactaatctstcttgagcttattaacaaattgtaaggctgggcgtggtggctcactcctataaccccagaactttgggaggccraggtgggcagatcacttgaggtcgggagttcgagaccagcctgatcaacatgctgaaaccccatctctactaaaaatacaaaattagctggatgtggtggcatgcgcctgtagttccagttactcgggaagctgaggcaggagaatcgcttgaacctgggaggcgtaaattgcagtaagccgagatcgcaccactgcacttcagcctgggcaacagggcaagactctgtctcaaaacaaaaacaaaaacmaracaacyctgtggcatcagggaggaatcactttttattggtcacccagaagacggatttgttttctcgcaaatcataagaaatagtattgaatcatttatgaaacgtatttgaaagagggcaaggaaacctaaaagattattattacttattamtgttattacattaagtatttcaatattattatatgcaaactagctgaggacacttagctaggaggagaccatgatctcatcgttttggaagcccgtgggcagatgtcatagtctccacctgtggagctgcagmggtatgaattaagaccaatgggtagaagccctggagggaaaatttgggctccacacaaggaataactttcaaatagtcaccacagtttggcagaattgtctgctttggaagcactgattggatggctccaatcaaagcccaggcaactgcttagcatggaacgctgaaatggaatctaaaacatcgtagcagaggcttaactggatgacctccaaatcttctccagccctaagtattgatgaagctatgaaattctattcttaaaactggcattctatccagttttccttgttaggttcctaagttgaatccaatttcatcagaaactatttaaaaataatgcgtttttctcatatacttttcaccatcaaatctaacttacaaagtgtttccccacattccctaagccattctttcacatattttacaaaagacctattgtgaccttttattgtacagaagagctattattatctgccttggaaactctgctagataggccctaggggtagaagggtgaacagaacaaggtcctggactatgaggagcttggacagaacagctagtaaatacgctgtaagaagagaacagtatatgttttgtagcagggaatcaaggaagacttctataagctcagacctagaagcaaagacgatagccaggcatagaaaaaatggccctggctgggcgtggtggctcacgcctataatcccygcacttttggaggcctwggtgggtggatcacctgaggtcaggagttggagaccagcctggccaacatggtgaaaccccatctctactaaaaatacaaaaattagcctggcgtggtggcacgcacctgtaatcccagctgctcgggagcctgaggcaggggaatcgcttgaacccaggaggtggaggctgcagttgcagtgagctgagatcactccaccacactgtaacctgggcgacaagagtgagactctgtcttaaaaaaaaaaaaaaaaaaaaaaaaaaaraagaagaagaagaaaaagaaagaaaggccctgacaaaaggaccagagcacagagtcctgaaaacctcaagggagcagcaaacaattgccttcccctatcattactttatatcctggtattttccatctccaaaatgttagcattccatcaaagcatttttttttaaactaaggaacctatgtcaatgggtagacagtgaagataaaattattgaaatattacctcactattctagtattcaattcagcagacatttaatctatttcatcattcagtatccaaactcccttttccaaggtattgttctctcaaaataagctaacacaaagtaagttctctttgctcctttgtaataggaaacatcaacgccagcgtcccttcctctgatggaaaagtactagaaaacctctccagtcttcaggccgtagcggcatctagtggccacagtgggaaatgaccagaactttttcctcagctaaattagcccaggctgtgaatcattctttgctacacgtggagatcatctattgatcgttacaaactactaacatctgtgtttcaggagttttaagagctcccyaggtgattctaacgtgcagcagcagagtttgggagttcctggcctagacgtctttttgcagattgaatctcagaaaaaaaaaatgcctacctatgaacaagtcattagagctggccgattctcatgcttattatgaattactttaaagggtctcagttctcaaggagtatttagcaacatccttttaaggatgcaaggatgttcgaagcttcatatatattggttccagctcttgaatttctttcccttaatgagaaacaagattacaatcatttcttgtggtcaacagatgtgaaagctttgtatgtgtgtcgatttgttaagtatcaggattgttttccttggccgggcacggtggctcagtcctgtaatcctagcacttggggaggccgaggcgggcagatcacctgaggtcaggggttcgaaaccagcctggccaacatggygaaaccccgtctctactaaaattacaaaaattagccaggcatggtggcatatgcctgtaatcccagctactggggaggctgaggcaggagaatcacttgaatccaggaggtggaggttgctgtaacccgagatcgcaccactgcactccaacctgggcaacagagtgagactctgtcttgaaaaaaaaaaaaaagattgttttccttatatttgtaaagtagtacttgggctttttatttagatgtggcagcaacttaattttctgttatttagtatatctagtccttttagttgcctttttgtaaacattttttattacaagctcttgcatgaaaggggctttgttttcaattcataaaatagttatttatttaacttactgtgcgcaggcactgtgttaaagaccgcctatggggaatgcacactagtaggatataattcctattttcaaggagcttgaagtcaaattggagaaataatacaaggacccaactaattaaaccacaaggcaagttttggtaagaatccttagcagcaaatgcgtggtttgagggatatcaaaaagcaatccaaaaaggcttctttgaggagatggcatttgaaaaaaagctttaraagatcaatttctttagggagaggcattttagacagagaaaggcttcatccatttacacatttactcatcaaagaaaatagaactcttgccacatgtcagtggcttttctgagcactgaaaatacagtagtgaccaagaagataagatgccctgctcttctggagcttacattctagtggaaggaaacagatcccaaaaaagtaaaaaataaataaataatcgagagatttttcacacggtgaccaatgatgtgtggaaaatggaacaagacaactgattctggagtgaaagggtaggagcggcaaattgtgaggcctcgccaaacaagtggcatgtgagctgaaacctaataaattagaagtccactaggataaatgtctggaggagagtattccaggcagaggacaagctgcaaaggcccagagacaataagatgtttggagtcaccaagaaacaaagaaagccagagcatctggaatatggcagacaagagggagagtggcttcagtagaggacgtggaggcggcaggagycggattccacaggctgattgggaaatgcgaattgtattctaactagtggaaagtcatgtagtccccacaccccaacacacacacacacacacacacacacawctcctccagtcctggagagttacaggatacagaagattactttagctaacatgtggtcttggactggagtagtaatagagaaggtaaaaagagatggaagatttgagatacaatttggaggtagaccagctgcacctgctgatggattaatgtgaggaataaaagaaagcgtagaatataatgggagcatccagagaaacacttaattcagaatcggattagggaattcttttgaaagtgttacattcagggagcttgaggtaagttaagaagttggaatataaggtgaggagaagggaggcaaaataaacctaaagaagagagaaaggtatgaataagaagagagaacaaacaccacatattctcactcataggtgggaattgaacaatgagaacacatggacacaggaaggggaatatcacactctggggactgttgtgggtgggggggaggggggagggatagcattgggagatatacctaatgctagatgacgagttagtgggtgcagcacaccagcatggcacatgtatacatatgtaactaacctgcacattgtgcacatgtaccctaaaacttaaagtataataataaaaaataaataaataaaagaaaaaaaaagaagagagacaggtrtaaagcaacttcttataagcacaccaagaaaagtagacctgaaacttcaagcagtagggacccattgaagagctgtgagtaggaaagagatataatcagatataagccagtaggattcattagaagcatgtgagggtgagtagtgaaacagcgagagcaatttggaggctgcggcagtaattaagagatgatgagggcttacaatggtggctctcaagagggagcgattggccgggtgcagtggctcactcctgtaatcccagcactttgggagggcgaggcgggtggatcacctgaggtcgggagtttgagaccaagcctggtcaacatggtaaaaatataaaaaattagccgggcatggtggtgagcgcctgtaaacccaggtacttgggaggctgaggcaggagaatcgcttgaacccgggaggcagaggttgcagtgagctatgatcagccctgcactccatcctcagtgtcagagtgagactctgtctctaaacattaaaaaataataatgaaataaaatcatctggcccaacccttcattttacagatgaagcagcagattcagagatattgaatggtttgcttaaggtcactcgacaggttgccagcagagccaaaactagaattcctctcttctgatgnnnnnnnnnnnnnnnnnnnncgtgtggttttgttctctatatactcagaacgacgatatcaggcgaatgcgcagtgaggtgcgagtacgagacgacgcacgcgtgagtcggcatggatagaacaaaaacgacgtatgacacgcatgcgttgaagatggccgcacgatcgccgccaccgcctaccacgcacgccccacccgctctcctcctcttataaaatactctggtgtgtaatacaatgcctagcgcgccggcgcagtagagcgcccgagcggccgtcgcccagcgcgcggcgggggatccagctggggaacaaccctgtgtagattccctacccggccaggggtagggggcaggtttaccctttgccggtagcctcagggtcgacgcgcagttagtgggccgcgtgccccagccgcgtacatgtacgcataggcggcaccctgcccactgggcacatgtcccctaaagttagaagtgtaatagtgaggaataaatggatgaatgaaagaaaaaggaaagaagggctcgggtgtaaagcagcttttataagcacaccaagaaaagtagtcctgaaacttcaagcagtagggacccattgaagagctgtgagtaggaaagagatatagtcagatataagccagtaggattcattagaagcatgtgagggtgagtagtgaaacagcgagagcaatttggaggctgcggcagtaattaagagatgatgagggcttacaatggtggctctcaagagggagcgattggccgggtgcagtggctcactcctgtaatcccagcactttgggagggcgaggcgggtggatcacctgaggtcgggagtttgagaccaagcctggtcaacatggtaaaaatataaaaaattagccgggcatggtggtgagcgcctgtaaacccaggtacttgggaggctgaggcaggagaatcgcttgaacccgggaggcagaggttgcagtgagccgagatcgcgtcactggactccagcctgggcaacaagagcaaaattccatctcaaaaaaaaaaaaaaaaaaaaagagggagcaatgttgccctctagtggacatttggcaatatctgggggttggtgggggaggttgttactgacacctgtggtaggtagagaggacggggtgtcgctgagcatcctgcagggcacagggcagcaccaccctccaccccccaacaaataattatctggtctaaaaatgtcaatcagaccaaaattgagaaaccctgacctaaactccggcaacaatagtgcattgaggagaaaggggcagagacagcagatagaacagaataggtgacttatcagatgcaggaaaccatggtcgggcttttaaggcaaataggtgagcgatgttggtctttaccgagagagagcctacgtgaagaacagagcaggttcttggggagaaaatggtgaattcagcttgaccactgaactgagttggagatggctatggggccatgaattagaaagagtaggaagcagttgaacatacagtcgttctttgcaggagagaaaatcttagaaagtaattgcttaggacccaggaatgttaggagaaggcatctgtctggggatgaagaggaggtgttcaatgcttaactggatatagcatcaacccatgtacagatggatgccaggaagtgtttgggaagcgtctgctgatgagactgattattatgcttgtaacagaaatgtgtaaattgtcttttttgcaggagcgaatacaggctgatgaagtgattgcaattctggatcaagaacagcaagggaagcatgaactgaatatcaaccctaaagatgagctataaaaatgagaaagaatgttctatcaaatatttatttaaattgttaatcttatgagaacctttttatttttgtacagagccatggtataaattaacaggttaatgtcagtcatcagatcttccttctcttcctaaggatgcttgtgttgcctcaatctatcaatctatctttcttgttttgggttgttttctctctctctctctctctctctcttcttagagacatggtctaaccatgttgtctaggatatagggcagtggctattcacagatgtgatgatagcacactggagcctcaaactcttaggctcaggcgatccttcaagcctcccggggagctgggaccacaggcacgtgccaccacacccagctctctttcttggtttttcatcatttcatgtatctatcaaagcccagttcacctcctcccccaaamacacacacacacacacacacacacacacacacaattaagttgctgcaaattcaaaagcttagagagaataagcttcttggtggtgaaactacaactctcacgtgtgctccagttctaaaattaacctgtgcctggtctctgaagccctttcttgctctgtgcctttcagccacatccttaggtgctaacggccatgagctccgactctccaaagtgagctccactttgggtctgaggagcccctggyagagtccacgctgcctcaggtatcatgggcgtaatgatcacccaggctccgggagatctcatggatgattactgtatgagacagaggggacttcagtctttccagggccttgktggaatttttggctctggtgttttcgccagacaataaacttacactggaagctttgattcaccctccacagtactccagaaaggactgtcctataagttgtacactttaaaaggtcatgtagaggttgtagtagaatggcttttcaccctggtgactttggaagaaactcttgaatactgcctgcatccgggcaccatggccaggttgcctaggagtggggtccactgatgaaaagaggtgttttgtacttacataagaaaaataaatttctgattgattttaaccgtcatctgcttatattttgggggcccctcctcattgctgctatccagcacacagatttgtgcttgtgtctgatttgtttaataaagggaggcttattttaatatctggcatttatttttgttctcccaaatgtttgctttatcttcacagaatggttttgtaattacataggagcttttgggaccactttaggggcaacattgggacatgactagtgttgctggtgcagtggcctcaggaaaggtggggacactgctcttgaagaacagagatggagaccaaactgggcattgatccagagaatgcttggttccaggtcccacttctaagaaagacactacaaaggcatagttcatgggggatggggttcttctaacctaggggagactttatcattcgcccgtgggagatcacatgcttttatgacgggcagtggtggagggaagatttactttctgccgtttacaatctggtgagtggtaagaacattcatccattgaaattgaaaatttgagttagtgatgtatgaaccatctgttttttactgaaccttctggttgtattttaatcatgggagagtggaaagagcattggattatcctcccagttctatcaaatatgccctgctgtgtgatatggaactactctctttccctttccagactttagttcccttctctgaaaatgacataattgattgtaacaaggccctccctcctactcaaaatacaaacaaagcaaaaagaaaaaaaagaaaccaaaaccattttagaaatagtcacaaccaaatttatttctgctaacatttagagagttgtgaatggttttgttttgttttgttttgtttttgagacggagtctcactgtcgcccaggctggagtgaagtggtgtgatctcagctcactgcagcctccaccacctcccgggttcaagcaattctcctgcctcggcctcctgagtagctgggattacagacgcctgccataatgcccagctaatttttgtatttttagtagagatggggtttcactatgttggccaggctagtctcgaactcctgacctcaggtgatccactcgccttggcctcccaaagtgctgagattacaggtgtgagctactgtgcccggccgtgaatgggttttttatgtgtgtacctgatttttaaaaacgtaaacccaaatttagacctaaaagttcttgagctttgcaaaggtagattgctatttgtcctcccactgtgaagagcttgttggcactcagatttgctgattggaggatctgggtgaggatctgatttctgttttctggcaacaaggcatcaacatagaaacagtctttgtttggctccttaaagttcccacttcctgggtgcgatgggcactaggggaggggcagggacttcatcactgattcttatattcagtcccacagaaagtgggtgaaggccgaatagatgttgtgttagagccacatcttgtgccatttgctgacaacacagggtagttattcttgttttgccggttaaccatgttgctttacacctgaaacatcatgtatacactaaagcatttacttcttaatctgctccacatcaaaccatacataatttcattcaaatatttagggagtgtcatcagacaacttaaaaaaaagtgaagcttagaaattgcagttcgtatggcacataatcccttgtgtagaaggatggaaaagcccattaggacatttgttgcttttacagctgaaggagggcgtagaaatcacagttcaatttcatctttctttttgggtagaaagtgaggcttagaggtggtaaagatgatcccatggttacagaatttgagcaacagagccagagctaaagccaggactgttgaacttggttatgcaagaatgcctgtgggagtgtacatgggggctggaaccctggcacagggctttgtccagctggtggaagggatgtcttattctatttgcccagagatggtacttgcttaccaatctatggacctgcagggctatatctttccagaaagggtgtcttttctaattctcacgaagtgctgaatgtgcttgagtcagcctaggttaaatagtccaatgtgtatgaatagtacatctcatctgtgttatctgaggaattaccattggtcttggtgatgatccttcccttgtgtgaaaagtctgcagctcacaaagcttttattttcacctatattattgttttgaatgcttatgacacagagcatgttcacacactgggaaccccaggaggtattctgggcatggatcgtgatgtccattttgcagatgaggacatggagagcagtggagagaggtgattacctggggtcacgtggctcagagtgtccaggtctgagctagaagcacagtcttttgggtcagaagggagaaaagagcaccagggttgttgctcccctggccgtgcttctaggcatattaaatataaaataataaatgtgaataaaaaagtctgattttaccaaatcaagaaaacctttttctcctcttttattttcctgctgagggatgtatgttggcatacttcctcttctctcctctgtgatatattgaatacgagttgtattattcaatttgattcagccctatttttaaagacataccttgagccttgaactgcttttatgaagctcacaaaagggaagaggattctagtcaggtatcatttttctctccctcaaaggcaaaaagaatcttgaacttaaatttcttctttagaaaaatctgacacaggacagagtgatactgtggatgggcgaagtgctttcttcacagccccgaacctacattgtttgacaaggaaatctcagttttaacgcactcttaagacttttaatgcactcttcatcattgacatcataacatttttggcacttcctcagctgaggagaagccatggaatgagtcagtgctatttaataatatatacctgtgaattttaattgaagtacaaatgctgaattatttcacacaagagaaccacagggaatgactccctcactgacgtcaagaaaggaggtaatgggggccgcctcaccagttccttatgccaaagcattgaacattctgagctgactgacagtggtatggctgagaagtgggaaaatgttgacctgttcccacatccagagcactttagggaaacaggagccattggcaaaaactccagaccacaagtccgtgttacaagccctctctgcctcctgccaagaaggctgtgatgtgaaatgacgtctcacatagttccaactgcccacccacaaatcctctactccctgataatttgatgtttccaacaggaggcatatagacttttttttttttttttttctcctgaacctggttgatttcttcaaacacatcaaaacaagtaacatcaaccactcattgagctcactgctgggttggagctgcagactcattctgtcagagcttcccctttacctcctcctccttgtaattcacagtgttttctgtgcccactgctgacctccgaggctgggcaaagccaagttgggaacaatctgactattgattctgtttcactctacaatggatggcatcagctgtaaaaagttgggttaatgaggcacctctggcttcaactatcttattaagggcccgcaataaaaataaccaaacaagatgttcctatcattttttttccagacatgttgctggggaggaaaatctaaatgaatgcttcgtttagtcaacatatgacacacgttttctagtcattttatatggtacatttaggagaagggagaacaaaaggtgaataagacatgctgtaccccctctctttattttggtagaatggccacagaggagagccagggtagcctagagtttgacagtctttctaccttaacagtcccttttataattatctgatatcttctgcttttgaaggacgaatcaatttcgaatagataaggccacgtgccttcttgatttgagcctcatttcaacagtgaattgagtgttacctatatatatgggaatcttgccctgggcctctctcatcagacctaggtgccttcccgcatgacggcagcgtgatgacatcggtcctaataatcttatccagacccgaggtaaaccctcctctcttattccaagtttatgtttttacctctgagttactacctggtggtgggtggaggtagaaatagggaatggacaataagcattacctggtatgtctcatctctttccacttgttaatcgtatattccattgtttcaaaggttgtaatcgtggttggctttataaagcttttttatggtcttgaagcacgtagcaatcatatgtaactacataattatcttgagagacacgtcaatgccatcttcattgtgtaaatgggaaaaaacaaacaggcacagagaaggtgatgtcgtaaagccctggtcatgtatgaattcatttcacagagagtttttgagtggccgtgccgttgtaggcttagggaggcatttaaagatgaataaaatgttatcccttcttttaaggaactcaaagtggaaaaaaacagatgtaaacaaatgatcaacttaaagtaaggtgaatgttacggcagaggattgtgataggggtaggaggaaaggtcatgcaagtgggaaaggagtggttagtggtagggaaaagttggagagaaggtgacaggtgagctggatctggcctgactgatctgccaccaatacgtgggaatgagccacttaacctctcattgcatcacagtgtcctcagctgaaaagtgttgcatttgaactgaatgatttcttgggttctaaaggattgagccttcggagaaaatgagagttcagaaagttggtgttttggggtggagtggaatgagatagccttcggaaagcagtttaatgaatgctgtgaaaatcttaataaataccagttaaagagtaagttttattgtattcacttgcaagggaggtattattcaagtgggtagtgtgaaagccctgaaggactgagcttccttctgaaaagcagaggagtagctactatcagaaatagctgacgtgaattcatcgttgagactaaagtcaatgggctctaccagcagcatattcctctgcccataagtccatgaaactttctaccctacatgacctggaactaatctacttcactcaaattattagactttcgtatcagaaatgggaataatgacaatattgcagcacacaggtatgttgtctgaaaagcctagcatttggtaaactcagtcagtcttttaataaaacccgaaagccatgtaatgctttactaatgacatcttttccaatgtcaaacaaggaacagaaggaatcattgaaagaaaaccatctccaacaggagttaattggagcaatttacctcatttaaaaccaaagggtcaaataggacataaagcaacaagcatccaatcaccctttttgttctctgtacctgttttttggtgtgttaaactttgcaaatgcctttgaaggtcttaggcaatcagactacttagatttagaataaattatagagtccctgaggctcagaagctgacttcaaggcttccggtcactggagtaatattctggtctatcacgatagtccagtgtttagcaacatttactgaatagatgctagaatttttattatatttcaagttcagaatttcaggacttttttttcacaaggtaatatgaaccagaattatatttctttgaagttaacattggttaattaaataaagactacttggagattttcaacccttcagcatcccagataaaggtgtaaacatcttttaggacagctggattctcagtggtcttaatctgcaatttattctaactttagctacttagtattaagtaaagaacaggcatgggcggtattgttgaagctcccttgcctagacagagtaaagatttctgggaaagtagtccacttcatcgtttagcattgggttcactaagtttttcacgacatcccaatagatgtgatgattattctcatatagtggaaaaaataaaacaccagaatagataaataatttgacagaagtcaaagtcagtagatgtcagttcctcgagttaaaaaaaagttgctgaactctctaagaagattttgcagttttgatgttttgaataactaggaagcagtaggaattattatgagcttatctgacactagatctcacccactcccccacactccagtgcaaatccagaaggaggcgacatcttcagcaagatggctgctgccactgctctgagttggttagacatgattaaagctctgtctaaacatgcc

SEQ ID NO: 96714 - DNA, 188684 bp, Homo sapiens
  misc_feature (1)...(188684): n = A,T,C or G
tttgcagaggtggtgactgaagccactgagtgtcggtgctttactcatggtcatccagttgatccctcagtggcagaaccaggcctgggagcctgtttctggctgcctggtccagtgcgctttgggaggtcacaacccaaacctagtctggggcaagacctccctttgggagatggcctctgatatttttggagcaccaggtcttccttagtgtttgagaccgtctcggagctgactggctttcacatgagaaacagttgggtctgtgttacatgtgtgtctattattttatgggataatagttcagggccgtcagggggaaactcagtccaggtagctcacagagggacccactgtacataagcgagcatgacctgtgcaggctgcactcctttgcagagttgtctgatgtcctgtgggccatgctgatgcgcgtgggcctccgcgttgacaccacctatggcgtcttgctactgctcccggttatcgcgctctttgcagttttgaccattttcatccttctgatcatggaagggctttctgcgtttcttcacgccatacgcctccactggtgagtttgaaacctagccttggagctgttatttaaaaaacatacccgcccccccactgccccgcccaaccaaatatacacagcccctgcaaaatctaatgctgaatttaggccagttcttcccttcccttgggatctgtgttcatatcctctgagttaaaattgtattttgggccgggtgcggtggctcatgccggtaatcctggcactttgggaggccaaggcaggtggatcacgtgaggtcaggagttcaagaccagcctggacaacatgatgaaaccctgtctctactaataatacaaaaattagctgggtgtggtgtcgtgcgcctataataccagcttcttgggagactgaggcaggagaattgcttgaacccagcaggcagaggttgcagtgagccgagatcatgccattttactccagcctgggggacgagcgaaactctgtgtcaaaaaaaaaaaatgtattttgattctgaactattatcactgacaagtaaaagtaagtttaagtttgcagaatactaacgtatgtttcatactcctaattcactttgggtctgacaggttgctctgtcttattgcaagataaatccttcttatgtatttcttaatgttttatggtgtaggtcagattactgctctgtgcctccagtgactcaagtggcaggagagggtctcgttacttgtgcacgtgcttttgtgtgttgggcagtgagagacagcggatgtgtcagagtttctgttcacactgggaaagccagcacggggttgggggtgcggggcagtgtttagctaagtaaaaatatatgtgccaagaacatattttggaatgaagcaatttcagcacaggaatttttttttttaacttataaatgttgttttaaggaatgtgatttcataatcttccattaatacatggctttttttttttttagggtagaatttcagaacaaattctacgttggtgcaggcaccaaatttgttcctttctcattcagtctactttcatcaaagttcaataacgacgacagtgtggcatgatcatattgctgtaaccaacaagctttcagatttatggagaatgaccatgttatagactttcacttatgtcagatttatgataggaaaaattccatcttcattactgccttatgacatagccaaataattctgtaagatatacctcttcctcatatgttaaatattttgtaaagtttaccaatttgagatataaaaatttcttttggttttttatgatgagcaaatataagttaatgccaaacgttatgttaaagttattttttcaaatacaggatttggggagagaagccaattttgcatggctagttgaaaatggtattagatacttatttcctttaaactttatttaaaacaaacaacagagttaatctgtcacctgaagttgccagataatattttccaacagctgaagtagggatagttttttaaaaaatttaatgatgggtaatcaaaacattcacatttattctgctggatttaaaaatatgtactttttttttttttttgagatgaagtcttgctgtgtcacgtaggctggagtgcaatggcacgatcgtgtctcattgcaacttccgcctcctggattcaggtgattctcctgtctcagcctcccgagtaactgggattacaggcatgcgccaccgtgaccagctaatttttttgtatttttgtagagatggggtttcaccatgttggccaggctggtctcgaacttctgacctcaagtgatccacctgcctcggcctccctaagtgctgggattacaggcgtgagccaccatgcctggccaaaatatgcaaatattttttatcctgtgctacctagaattacaagtagaggattgtttttacaattttgtcttgttttagtaattggggacaatgggataaaatgacatacaacaaatggttatcccacttgtatatttttttaaagactcttatcctgttacccttacataaaaccagttatgataattgtatgtttggaagataaattgtatgctgagccttaaaacccagtgtgactgtagaagatataatgcggacatgatttgaatttagtgacagcttggctgatgtcactgaaccagaagggtttatactgagtgaaggaaaggtaaaaagtagtattttgtatatttttgtaacaaaatataaatgaagatattttaccatgaagagattgcacttatccttgagaacagtctaaatataaatgaagatattttaccatgaagagattgcacttatccttgagaacagtctaatgatactttttttactttcagactgtttctagctaaagttctgataaaagtattgagttaatttaaactttcaaacactgtttagatcagttgaaaactaattcttaatagccattgttttataatctttagtttaaattcatctgtttgacatttggttttttgtgaacttgagtcagtcctattgaacattttgacctatattcttgcaaattatgttaatttttcatattttagtttgattttagacaattattttcaaaaagaaacctgactttttttcaccttcttgacattgtgagtgatacacgttaaaaggctatttgcccgcatcctcctctatcctgtttcgaggtagagagcttggcacttctgttacaagctgagagtctggaggtgctgagtttaacgtggctgtgcaggtgatttcaaggcatgagctgaacagcgttgacacagccgtgacttacaattaaaccctttcaattacagtacagattctgtgtgctacttgatgagatgttacccaaggccagtttggacttactgctttttgtccctcatattaaattatcaaatgatgccgatgaaatgcttgaaaatgattctgctctcaaagttatgcttccctagaaaggtgtcatgtcgggcacttgtgttgggtgactatgacatcccagcagtgctggtcaggtctcagagttgctttcacctagagctgatgcttccacaaggggacatttgtgttactttgctccaggggtctgtcataaaaacaatggtaactacttcatccctaggaagcccaagacttcagggcactgttagctgattggtaaataagggacacgatattcacgggaattgtttactgctccccactagtaattctcatggggccacttttttaactctttctaattaacacctcttctcagcatagagcagaggatgcagtcatttctctgttgaaatctatgtagtatttatgtagaatgtcattatatgaaaagcgaattcagaatcctaactctgggaaagcgctctctggaaatgtagtttgataatagtgtcttataggggccacgggaatttgtttctctataaagcgatgggctccagtgtcatgttaccagagttatcgctcagttttgtttgttaaggcttttgctagaacctattatgtatccagtttttaaaacatacttcattcccttgatagcagagatccagagcacagatggcaagttgtgtggatgatactgaatatgtttattttcctaaagataaatgtcacgacacgacatttctcagtttttatttagatgtttattaccatgtgttaacagaatcttaaaacccaagggatttcttcagtaaactagactttgattcaacctgctgggctggagactgtaattgccgtggtcagttaaggagtgcaaagggtgttctgtctgataggatctgggtgagccctgcggactttccagcagcgaaaggacttggaactcctctttcgctgaatgctgctctgtttctggaatggatattttataacaacattctggtgtcagcatcccctcagcagttgtttatttaaaaatttttttattttttttgagacagtgtctcactctgtcacctaggctgaagtgcagtggtgcagtctcggctcactgcaacctctgcctcctgggtttaagcaattctcctgccctagcctcccgagtagctgggattacaggcgcctgccacagtgcccggctaatttttgtatttttagtagagacagggtttcaccatgttggccaggctggtctcaaactcctgacctcaggtgatctacccaccttggcctcccaaagtgctgggattacaggcgtgagccaccgcgcctggccctctgcagttgtttaataaggcacagaatacctgtagcataggtcagccttacgatgtccatgaattacatattcagacgttttagagcctgatacattttggaaaagaaaaacaacttctacacctattctacagtccgcatttaaaacaataaattcctctattaaaaacgtaaagccgggtttgcttgcgtgccacagggaatatatccaggaaggttattatgaagctgtcaaatcaagatgatggaaataaggcagtttgaacgaacagtcttcccacagtcaggccatttttgctgatttggtttagaattttcagaaatacttagtacactccacctgttctttgatgggaatatctaagaaggctaggtaggttcttagggttagcctgagtcatctaggggctcaactccttgtgaggggaaatgacagtgaacaagttagtactttgctccacaaatgcatgaaaggacaaatttgcatcttctatcagtatttaacttccttttgctaatgacaaataaatatatctatatttttaaacgtgggtgttttgctttattatgctctagtttggcaagaaagctaaagaactctgctccttccctgattttgtaggccatgaggaactcgtgctttctcggcttatttcctcctcgtctggcctctaatcccgcctctgccaccgccgaggtgctgtgaccttcgtctcgccaactctctagccccagcttcatctgcaaggtgggcgggctgcttgcaaaccggtcggcgtggggtggggtcgcaccctcggctgcagcggcccgagggcggctcctggcggcgagggtcccgctccgcatccaggggcgtgcgcgctgccggggccagggagcaaccagcctacctcggcggcccgggggcctggtgcgcgcctccgagatcccggggccggggcgtgggctgcggatcgcgggttcgggatcgaggggccgggcgcggggcactgccgagcttgcagcccccagacgccgggccgtcggcggggcgagctgcggccgtttccggggcgcccattgctagggccgccgttgccacggacgcccgccctgcgcccggctccctctgcactgcgcggcgccatggacgacctgcgggtgctgtggatgcgcgaccgcgtgtatgcggctttcggcatcaccgacccccagcttttcgaggacctgctcaaccgcgacgacggccagggcgaggacctcatcttgcacttcctcaaccaggcgagcgaggaggaggggccctcggcgctcttcatctaccgcactatggtgccggaggaggtggaggtggagattggtgagcctcgacgcgccgctcccttccccgggcttccctcctgcccgtcccggcctctccggcgggcgccggggctgctagagcctgcccatcgtccggccccggcctcaggtgctgtccacaaacgctgccgcccgccacgtgcaggccccgggcgaacccagcaatcacagccgtccctgccctcctgggcccacagcccacttgaaagtcaggccttgattgaaaaatcacagcaaacactgacttagcccgcaccccgtgccaggtgcggttccaacgcttgtatcaactccttaaccctacgaggcgggtgtatcctcatccctattttacagatgagcaaactggcacggagggggttaagtaacctgcccaaggcccacggggcgtcaagatccactgtgcaataatccgaacggctgggtagagccatgcccaggtgtggcagggacccaggtcactgtcactctccttgacggtcgcagcctctcacggagggtccgaagagcacccctttctacttctggaggctccttatatcctaaaaagtaaaataaggctaggacaaagtttaaaaactacagtagactttaaatgtttatgttgaacaaattagcatcgcaaatacaaaaagacagtgaccagggtcccagaaccctctgtggaggcggatccccagccccacctactctctgataggccagggacactgagagggcagggaggggccagcacaggtgagaggaggaggcaggacaactcgcttcagaaacagctagaaggagactgggacctcgaaagccgcctcctcgcaggagcaccagctggagcacagctaccgggacctcctgcctggctgtccagtctcctgggctacttttccagccccttaaggacttggggatcccttgcagggcctctcactgggttcgggtggcagggccggcagacctttgattttttttttaaaggtaccaggcagattcatttattgtattctattttttaactttttttttttttttttttgagatagggtctcactttgtcacccaggctggagtgcagtggtgcgatcttgactcactgcaacctctgcctccagggctcaagtgattctcccacctcagcttcctgagtagctgggactacaggtatgcgtcaccatgcctggctaatttttatatttttggtagagacaggtttcaccatgttgcccagggtggtctcaaactactgaggtcaagtgatcctcccgcctcggcctcccaaagtgctgggattccaggtgttagccatctggcacctggccacttcttttttttttttttgagacagagtctagctctgtcgccaaggctggagtgcagtggtgcaatctcggctcactgcaacctccacctccctggttcaagcaattctcctgactcagcctcccaagtagctgggattacaggcacccatcaccatgcctggctgatttttgtatttctagtagagacagggtttcaccatgttggccgggctgctcttgaactcctgacctaaagtgatctgcccacctcggcctcccgaagtgctgggattacaggtgtgaaccatcgcgcttggccaccttcatttattttaaatattcattatttgcttgcacaaaataaaacgccttcatcataaatccaaaaccataaataaacaacaataacaaatccctagtgccatctggagagaggaccacgtgatcacgttttggaatttaaccttccagcctattatttttttctccctggcagacctttggacctgaacattagattataactggacctcggatgtaggcactttcattggcaccaagtgaaattatggaaaccaaaaacacactcgcaggattgaccgtttaacatgtaccaccactgcaggaactcgggtttcgtttacattaaaaaaaaattacaagaccctaaaacaatggatgtgacttggatttcttgcagaagccctccaagggcctctgttaacggtggggtggctgttgtctgctgtgtttactagcacgtgtttagcccaaatgtcatccagtgtggaagcagagttcagtctcacctcagagggtccccctggttaattcctggaccctccaaagggagctcagaactcccccaccccgccccctgacccgtttctgggctgtctctgtccctggtcttcccttccattcccgtcccttctccactatcacctcatggtgaaaagctgatggattcctcgccgaagatgctgtctctggaaactctcaaagctgccgattctggaggtgccagatggcgtcgggtgttgggggttctggccaggtggggagaagagacctcatccccaactccacacgttgtcactcactctctgcttgttaaacctacaggctcatataacccttgaacagtttccctagattatttttgggggacaggtggttctggtctgttcagaggacctgcagagagcccagcgtgtcctttgtttccttttttttcctctttctgccccccttccccggtcaagatttctctctgctcctggttaaaaatgataggaatggagacaagcagatactggggcaggtggtggtaataaaggcgaggtgtccttccgggcagcagatacccaagatactgatgcagtaggtacatgtgttccttctggaaaaaacaaaacggaatcrtactgtacatatcatttagtaacttccttacatttaaagaaattacacaaatactgccataacacatgttctcttatgaattcacagaacatagaattacatataaaaagaaaaagcaacgcttctccatcccttaagccccagtcctgctcttattcctaggggtaaccactattattagtttggtgtgtttctggttggctcttttgtcaaattatcagtcaatcaatcagccaatcacctaccaaccgactgatctgtctccctaccttcctatgcatctatcwayactwtatctatctatctatctatctatctatctatctatctatacatacctctatctatacatctatttatctatctcctgtctacctacctacctatacatctatctctctctattatctatctaccaactgaccaatctgtgtgtctatctacctatyattcacctatcatctatccatctatcaattatctaccaatctacctacctacctatacatctatctatctctgtctatacatctatctacctacctacctatacatctatctctatctatatatctatctacctacctacctatacatctatctgtctgtctcctgtctacctacctaattacctatacatctatccctctattatctacgtgccaactgaccaatctgtgtgtctgtctacctatcacttacctatcatctatctatccatctatcaattatctaccaatttatctacctacctatacatctatctctrtctatacatctatctacacatctgtttatctgtctatacatctatctatacatctatctatctatacatctgtctgtctatctatctatacatctatctcctgtctacctacctacctatacatctatctctctctatctatacatctatctatctatgtacctacctacatgtctgtttatctatctgtctgtctgtctatctctgtctgtctaggcataaggtcagggctgttgagatcaattaatcagcctacctacctacctacctacctacctgcttgtcatctatatctgtctatccttgttccatctacagtctatatttctctctataatgataatatatggatatatagagttcctaaaactataaatatcatactatatatacatattattttgtgacttctccccccaccacatgttttggttattttttcatgccaattcctatagttctacctaacttgatagatttaaatacatagatgtaccacattctactcatccattctctaattaatggacacttagcttttcagagtattcattctacaaacaatggaataatgtctgtctatccttgcatactttgtgtatttctggaggatagatttataaaaatgaaatgcatctgtaacaagtgtggtcttttacaatttgagtgggtcctgttggtccacagccagtggtggtggatgaggcacctgtttcccaatggcctcctgacatttgatattggccattttttagatttttggcaattccatagaaaaaagtagttgtactcccttactctaatttatgtaaatgttagtgtagttgagcctctttttttcccttcagttttttcttttcttttcttttttctttttttttttttttgagacagagcctcactttgtctcccaggctggagtgcagtggtgtgatctcggctcactgcaacctccgcctcttgggctcaagtgattctcctgcatcagcctcccaagtagctgggattacaggcgcgcaccaccacacccagctaatttttttgtatttttaatagagacgaggtttcaccatgttgaccaggctggtctcgagctcccgatctcaagtgatccacccacctcggccttccaaagtgctgggattacaggcatgagccactgcgcctggcctccttcagtttttaaattgtggtaacatacacacggcctgcaatttacatcttaaccattttgaaatgtacagtttagggtgttaaatacgttcatagtgttgtgcacccaggagcctctttcttatgcttcttggttatttgtatttcttctgggctggtggtaactctgatcatttctgtatccttcgtctcttggcagaatttgcacaaacctccttggctgtcactgaaagctggctccatccagtaaggaatactgctgtaccactgtaacataacgagtctcctgtgggccacataccaaccccttggctccacagaaagcaaagatatcaggtgtttcatgcagtgaacaattacgtttaatattttcttcccatttatgtggccataaagatgagatacctgtcctgtctgaagagggagaagaggaagaagagacttattctcaaaaagtggagtccgtggataaagtgcgaggtgtggagttgggaggggtcatgggagggtggaactgagaaagcccccccgcagcgggagtagggtgctgcctgccgtgccacaatcagttgtactttcactgggtatgaaccacaaagagaaagtgctgggtcatgaatagacggatgtagtagtttcccacggctgctgtcacaagtgaccacagactgggtggctgaaaacaacacagatgtattctctcacaactctggaggccggaactccaaaatcaaggtgctggcagggctgcgctccctctgcaggaccaaggggaggatccttcctagcctcctcactgcagtctgggggtcagggtgtccttggcctgcagcatcatcactccagtctctacatccatcgtcacatggccttgtcccctctgtatctttcttctccgtgtgtcctctctcctcctcctcctcctcctcctcctttttttttgagacagggtctcgctcttgtcacccaagctggagtgtaatggcgtgatctcagctcactgcaacctccgcctcccaggttcaagtgattctcctgcctcagcctcccaagtagctgcgatctcaggcgcccaccaccacgcccagctaatttttgtattttcagtagagacggggtttcaccatgttggccaggctggtcttgaactcccgtcctcaggtgatccgccctcctcggcctcccaaagtgctgggattacaggcgtgagccaccatacccggccgtcctctctccctcttatacaggcaccagtcacattggattttgggcccactctaatccatatcacctcatctttactaattacatctgcaaagaccctgtttccaaatgaggtcacagctttaggacatgcattgtgggggacactcttcaaccgagtgtagtatgtaacatacaaacactcatgcaggcgatgtctcagccagctcagcaaacacatgctttgtactttgttttgtaggtgggcttcccactgtgcaagctacagatgccattttcttaggagaatcttcaaggcacagaacttttcatgtatttatttgtttttgagacaggacctcactctgttgcccaggctggagtggtgctgtcatagctcactttagcctctaacttctaggctcaagcaatcctcctgactcaggctcctgaggagctgggactgtagaggtgcaccaacatgcctggatgacattttgattttttgtagagatggggtctcactatgttgcccaggctggtcttgaagtcctgggctcaggcagttctcccacctcagccttccaaagtgttgggattacaggcatgagccactgcttctggccaagcatttatttttaaccaaattgtaatcccctcaagtagcaaagactgtggagagggaactacaagttagaaataaaagatggtttgagtaagccttgtttaaagtgggtttttggtttttttggagacgaagtgttgctctgtcacccaggctggagtgcaatggtgcgatctcggcttgctgcaacctcctcctcctgggttcaagcgattctcctgcctcagcctcctgagtagctgggactgcaggcacacgccacctcatccagctaatttttttttttttgagacagaatcttgctaatttttgtatttttagtagagacggggtttcaccatgttggccaggctggtctcaaactcctgacctcaggtgatccacccacctcggcctcccaaagtgttgggattacaggcgtgagccaccacgcccggcctaaagtgggttttgataaggcagatggtagttctggatgccacagcaatgtctgctgaggtatcctaggaaggcactctcggcttcggagcccagtacatccatgaagaggacaggtttgggaaggaagagctgtttaggtgggaaggtcggggaagtcctttctcataaagtaaattaacattattatatattttcttcttttctttttatggtggtaaaatggatgtcacttttaccatttttaccatttctatgtggcattaagtacattcataagtgtattttcctttttaaagatggggccttgctctgtggcccaggctggagtgctgtggtgtgatcatagtgccctgtagccttgaactcttgggctcaagcgatcctcctgcctcagccttccaagtagctgggactacagatgtgtgccaccatgcctggctaaggtttttttttttttttttaacttaaatttaattttttgggctgttgtggtggctcacgcctataatcccaggacttagggaggccaaggcaggaggatcacttgaggtcaggagttcgagactagcccagccaacatgatgaaacccatctctactaaaaacacaaaaattagccaggtagccaggcatggtggcatgtacctgtaatcccagctactcgggaggctgaggcaggagaattgcttgaactcgggaggcggaggttgcagtgagccaagatcgtgacactgcactccagcctgggtgacacagtgagatttgtctcaaaaaaaaatttttttttaaaattttttttgtagagatgaggtttcactacattgcccaggctggtctcaaactcctggcctcaaatgatcttccaccctgtagctgggactataggcggcaccatcactcctggataacattttgattttttgtagagattagagactactctaatgctgttagggaattagcaatggactacaggctatttatggcacggcacctgctcgtaagtgtgattttttttttttttttttactgtagtctattgctagttctctaataatgttggtactgctgtctatagactattcccttgccaaccacggtgccaatgcccttacccgtgctgtcatttagtcctccagaatttggctggtagatgttactgtcccattttatggatgcaaaaactaatagcagagaggattcagacccctgacattgagttgatgccaaagccacagtgactttgcacagtgcctttcaaagtaagagctgagggaaagctcccagggaaagctcctttctctaatcaccggccttgttggatgttctgagggctcagacttggtgtctgctgaggtttctgaatctgtatcaatcagagtggacttgagacaggtgcgtcatttcatttagactgtttttcttcttgtccctcacaagttttgcatctcatagtgaaaaaggagtaaatgctaacatgctagctgtaattctttttttttttttttttttgagatggagtctcgctctgccacccaggctgcagtggcacaatcttggctcattgcaacctctacctcctggcctcaagcgattctcctgcctcagcctcccgagtagctgcgattacaggcatgcatcaccatgtccggctaatttttgtatttttagtagagacagggtgttgccatgctggccaggctggtctcaaactcctgacatcaagtgatccacccacatcaacttcccaaagtgctgggattataggcatgagccactgcgcctggactgtaattcttgtctttatgataaactcccttttaagtaaaaaacctcagagaagtcacacggtcacagggtggacactgtacctgagagaacgcagacacaaacatgtaaaatttctgatggacaccctgtcaaaaacgaaacacaattcttgtcaattacaatgtgagtcaaggccacaatttgattgattggaacagaaggtatgcacagctatttgataactcgccttttgaatgaaatgtactggtgcacaaaatgcagggctgctcttgatggtaggaaacctaattttctgattattttctcttaaactgattgctgttttgcagctaagcgtgtgtcactgagaaccgaatctctaggccaacctctaaacagagaggatgaagaaatggacaaagagatttcagaaaaactcccttccaaagtaagcatggctctttgtccttgttggtggggtaatggggacccttgatgccctctaggattcagggtaactgacatagccccatccaagggatttatcatgttggaatggaaattataggatcccaaggccaccctcagattcagtgattggctggaaggactcacaggacccagaaaatctgttatattcatagttatagtttattacagggaaaggatgcaaattagactcagcaaaaaaaggaaaaaacgtgcacaggacagagaccagcagaaaataggcacaagcttccatctgttccctcccaatggagtttcatggatagcacttaattctcctggtagctatgagtgacaacatgcatgaagtaytgccaaccagagaggctcacctgagccttgctgtctggggtttttaatggggatcagtcacacaggcatggagcatccacgtggctgaccttagttactcagctccccttcatctccagccctcaccaccaccctagaggttgaactgatcctgtatgactggggccccagcaaacaaaaacaggcattcaccaaactcgcattgttagcatacaccttcaggcatggcccaaggctacaggtacacaaagactcccatattaggaagggtattccaaaagcttggaagttgtcaccctaagagccgaaggccggttctgaagacgtttggcatgtgtggggtttggacaacacagacctgctaaatgaaccctgttctgtgaaaaccccaaggttggagtttaaggctaggatgtaagcattcagcctggcctatgcttaccaaaatcgtgcttcattgcttcataagtacgtcccatctgcaaaacaaaattcaagctccatctggacctttgccaggtcagtttgtttaggtgttgctgtactggttggtcaatagaggagtcaggctgacagctcagagtctgggtgcatttagctcctgtgtttggctggtacccactgtgtggctgtggctacattgtcagaacatgagaccagccattgtgttgagaggagagcttaggtgtacttgaatattaggttctttaggtgaatggatgtatcacaagaatgaatggtttttgttccccatgtttcagagaactgcgaagcacatcatggaaaagatgcatctccacatgctctgtacccctcttcccgaggagttcctggaccaaaacgtggtgtttttcctcagaaataccaaaggtacatttctggcacgtgtgtgtgtatgtgtgttgagggggtgtggttgtgcatgcacttgttcactctcattctgttgtctttttatggttatctttcacctatgccaagctctctttcttttccatactgtactgggttcttacgtagtcttctcaaagctaatttccagtaaagaagtgttagagataaagaaatgtattcagccagtgatagtgcatgtctgcacatatttggagaaggtgtgaagactgaaacttgtgaaataatggcttcagtgggcatatttcttgtgtctcttttgtttcccagttagatcaagggaagagtccaagtaacctttaaaatgtttaccatggtgattgatttttggtcaggtagagcaaatacatatcaaataaaaccttgtttgttggaagggtagatattaccaagtaggtcttttcaaacaacccatgactcaaaatatgctttggcaatgaattgaggaagacttgctggggagtgaagacaggcaaagcccatgcccaagccagcttggatggttgtaacaaattgccataggctggggggcttcaccaacaaacatctatttctcacagctctggaggctgggaagtccaaatcaaggtgctggcagatctggcatctggtgagggccacttcctggttcacagatggcaccttctcctatcctcccatggtggagagcagagagagagagagcaagctctcctgtctcttcctatagggacaccaatccaatcgtgagactccaccctcatgacctaatcacctaccaaaggccccaccttctaataccttcaccttggggatttaagcttcaacatgtggattttggggtcattcagtccatagcagcaaagaatccagccaacatttctagacaacccaaataatttctgattttgtccagcgttagatactccaaccagatcagcaaatgtgtgcagctcttgtgcactgttcatactaatccacgaaccacagtgcattggtatccatttcagcttctcatgggccctcagatttgtttaaacacaaataggggatattctgaatctgtaaccagaacattccttgtagcagcttgggaagaaggagaagattcctgttctcttggaaatgttaactgttggctgctctctcccactgaccttacattctacacctgttcttctttagaggcaatctctgaagctaccgacatgaaggaagctatggaaattatgccagaaacactggagtatggaattataaacgctaatgtgctccattttctgaagaatattatatgtcaggtaaacatggagaaaggaagaaattctagtatttctaaagttgaggtcatgtggtttgtttattccacaaataggyagcgggcagctcttctgtctcaggtgctgttatgggcactgaggtgctgagaccagctcggttggggagaccctaacccagcggcgctagagaaattaaagacacacacacagaaatataaaggtgtgaagtgggaaatcaggtgtctcacagccttcagagctgagagccgcaaacagagatttacccacatatttattaacagcaaaccagtcattagcattgtttctatagatattaaattaactaaaagtatcccttatgggaaacgaagggatgggccgaattaaagaaataggtgggctagttaactgcagcaggagcatgtccttaaggcataaatcgctcatgctrttgcctgtggcttaagaatggctttcagcggttttccaccctgggcgggccaggtgttccttgccctcattcccgtaaacccacaaccttccagcttgggcgttggggccattatggacatgttaccatgctgcagagattttatttatggccagttttggggccagtttgtggccagattttggggtcttgctcccaacactgagggtcaagcagtggacaggacaggcaatggccctgctctccaggagcttatgtaggggaaagacatggcacacaagcacatctatgagaaaataccgacaagtggcatgaggaaaataaaccctgatatgagacagaaataggcatgtgcactgtgtgtgtgcagagggcatggtgaggaatggccttgctgaggatgtgatgtctaagctttcttttttatttttattgtttttcgagacagggtctctccgccatccagtctggagtgcagtggcccaatcacggctcactgcagcctcaactctcaagtgatccttctgcctcagcctcctgagtggctgggattacaggcatacaccaccatgcctggctcatttttgtacttattgtagagacagggtctcaccatgttgcctaggctggtctccaactcctgggctcaaacaatctgcccgccttgtcctcccaaagtgctgtgattacaggcatgagccaccatgcttggcctgagctttatagaccaaaaaaatgaaaaactcatcagcaggcctttttcatgaatgataagttattagggaaatgcactagggaaggaaggaagaggtgatattgaactgagacccaaatgaggccaaggcatcagacatgataggatgtggaggaagagcatgctgggcagagagaacagcaggtgcaaaggccctgaggtagaagcagcctcagcttggcccagtagcaggaggatggccactgtggctggagggagggctggaaatgaaggcaggtttaagcaggggaacaacaggatctggtttgcattttacctckggctattgtgggaaaacatattgctggggtggaggggaaggaaagaccaaatagaaagccatggaagagcccaggtggagggctgtattagtccattttcatgctgctgtagggaactgcccataatttataaaggaaagaggctaaattgagtcacagttctgcatggctgtggaggcctcaggaaacttaaaatcatggtggaaggggaagcaaacacatccttcttcatatgayggcaggaaggagaagtgctgagcaaagagggaaaagccgcttataaaaccatcagatctcatgagaactcactcactatcatgagaacagtggcatgggggtaacctcccccatcattcaattacctcccaccaggtctctcccatgacacgtggggattatgggaactacaattaaagatgagatttgggtggggacacggccaaaccacatcaagggtgatggttatttaggctccaatcaggggagggagggagaagcagacagtgtgaggaatgccttgaggatcaggccatgggacttgctaatgaccgggatctggaggctttgaagagtatcacaagaatagagagtaccaagaatgactcttggtcccagcactttaggagggtgaggcgggaggatcgcttgaggctaggagtttgagaacagcctgggcgatatagcaaggccccatctctaaaaaaaaatttaaaaaagaatgactcttaggatttgggcctgagaaactgggaggatggtgaagtcattactgagatggaggatggggagaaacagatatggagggaaactcaagtgttgtattttgcattctagacgggaaggttgcagagtatggtggtcatgccactgcactacagcctgggtgacagagagatattccatctctaaaaaaaaaaaaaagaaaaataaattaagataacatcaaaacatgatgtataatgttaagcacaggtggcctcttagacattcaaatcaagacgtgaagcaggatgtatgaatctggagctctgcggggaactcagggcatccgtctagcaaatattcattgagcacctactgtatttcatagcaatgaacaactgagacaaggtctctgcctcgtggagctttcattctagacaggaagatgtacattaaccaagatcaatgagaaaatatatagtgtgttagacagcaacaagagttagggagaaaaatgaagccagataggaaagaaaaaggaaacaagggggagagggaaagttgataggtggaaaggtggggcttttgcaattttagatagggtggccaggaagacttcactgagaagatttggacaaaaaagtccaaaccaacacaatatcctcttttgcttggactatcgcaggagcctccaaaaagatccctcagtttctgttcttaccctctacgctgccttctccacatgccaaccagagtgatgctttaaaacatgggcatcatcagcacagagatggtgtaaaaccaagggactgggtggaacaaccaagggagggagtagagatggaagagatgaggggagaggaaagttaggacgtgggtgatccagaagccaagagaagacaatgcttcactgaagaagggaggggcccgccgtgccacttgctgctggaagtcaagaaggcacaggcaaagaagagctggagggcttggccctgggtgacttccatgtgagcagttctggggatgggagcagacgaggtctcacggagtacaagtcatcctgtgagttaggctgtggggccctccccactgagctgcctgcacacaagggactttctacctgaagacaacctccttcatcgggatgatgtctttttctagtgtgactttggaggactcaagaacattggctaccttcttatttatttatttatttttatttacttatttttgagacagcgtctcattctgccacctaggctggagtgcagtggcgcgagcatggctcactgcagccttaacctcccaggcttaaacgatcctcccacctcagcctcctgagtagctgggaggattactaaaaattagccaggtgcacgccacaatgcctggatgatttttgtattttttttttaaagacggtgtctcagtatgttgccaaggctggtctcaaactcctgggctcaagtgatctgccctcctcggcctcccaaaatgttgggattgcaggcatgagccaccatatctggccacactggctaccttcttatgcaaactgaacttttcattctaaaataacaaaataacatcaaccccatctctaccaaaaagaaaaagaaaaatctgctgggcatggctgtgggtgtctgtagtctcagctactctggaggctgaagtgggaggattgcttgaacccaggagtttaaggttgcagtgcatggtggtcatgccactgtactacagcctgggtgacagagagatactccatctctaaaaaaaaaaatgaaaaataaataagatgacatcaaaacatgatgtataattaattcttagtggttatatgcattatgacaaccagtcatgtctaaaggacacagggctcaacttgaagaggctcatgccagccacagatgggatattttgaccttcagtaaggataaaattgcagtgggttgaagcatagaaaatatattcaaatacagccaggcgcagtgactcgtgcctgtaatcccagcactttgggaggccaaggtggatggatcacctgaggtcaggagttcgagaccagcctgatcaatatggcgaaacctccatctctactaaaattacaaaaattagctgggcatggtggcatgcacctgtagtcccagctacttgggaggctgagggaggagaattgcttgaacccaggaggtggaggttgcagtgagctgaggtcatgtcactgcactccagcctgggtgacagaaagagactccatctcaaaaaaaaaagaaaaaaaatatatatgttcaaatgcatgagttaaaaacatttttttaagagacacagttcttactctattgctcaggctatagtgcagtggcacaatcacatctcactgcagcctcaaactcccaggttcaagtgatcctcccatctcagcctccggagtagctgggtctataggtgcacaccactaagactgtctcattttttttttttgaggcggagtctcactgtgtcgcccagtctggagtgtagtagtgcgatctcagctcactgcaacctctgcctcccgggttcatgccattctcctgcctcagcctcccgagtagctgggactagagagaggcacccgccaccacacctggctaattttttgtatttttagtagagatgggttttcaccatgttagccaggatggtctcgatctcctgacctcgcgattcacccgcctcggcttcccaaagtgctgggattacaggtgtgagccaccrtgcccggcctaatttttttcttttaattgtagagatggggtctccctatgttgccccggctgttctcgaactcctgggctcaagagattttcccgccttggcctctcaaagtgctggattacaggcataagctaccatgcccagcttttcaaatccatgaatttataatgatctttaaaagtcctgatgggtcatttctggaggatgataggggaccactgtactatttcaaaaattgggcaaataaagaggagtcaagcatttatgttgccttccccatatgaaatgtacgggatcatctagcagtagctgtgagaggcgtctttatatcagcatctcagctaataaacagacattttagaacatttcaattttggaacccccacttgattaatggacctgggggtggggagagagagagagagagagagaaacaaaaccaaaaccaagaatttgattcctgatggaagatacaccctggtcaagtctctggtcccagctgccaatttgcaggaaatacacatcacagaggaacttcarctgcacagtgagtgtgtagtcagcaaaatttggattgggcasctctacaaatccaacattctgggttcttcagtatgttgcaggaaatacatatagattcaaagagtcataaaaagatgtatcaaaattttaagaaatatagacaaaactaaaaaacaaaaacaaaactcagccaaccaaccaaccaacttaatcaacccacaggcatttatagatcactttttatgtgggctgggggctaagttgtttcgtaattgtattcaggtgacttcataaatgcatgcttctctctctagctacattttgaagaaactatgtcctcaagaacttaattttcaagaacaagatggtcctgagctgatggtttaacacacagtttcttacctccctgtgccagtttcccctccctccctccctcctttytctctctctctctctctctctttctttctgagacagggtcttgctctatcgcccaggttggagtgcagtggtgcgatctcggctccctgcaaccgccgcctcctggttcaagcaattctcatgcctcagcctcccgagtagcttggaccacaggtgtgcaccaccacacccagctgatttttgtatttttagtagagatggggtttcaccatgttggccaggctggtctcgaactcctgacctcaagtgatccaccagcctcggcctcccaaagtgctgggattacaggcatgagccaccgcagccagctccctgtgccacagtttgtaacttctcagttactggtggtacacagaaataacagcactgtttttggggcagttgtgtcaggcctggttaaaattgatgcccttggatcactttaagtcaaatgtaatctctctgtctttaggtctgtgctccggtttgagtggttttcactttgcatatttgtatctcaatataaaagaatattcaggctgggtgcagtggctcacgcctgtaatcccagcactttgggaggccgggggtggatcatgaggtcaggagatcgagactagcctggccaacatggtgaatccccatctctactaaaaatacaaaaattagctgggtgtgctggtgtgtgcctgtaatcccagccacttgggaggctgaggcaggagaatcgcttgcactggtgaggtggaggttgcagtgagccaagtgcacagcactccagcctggtgacagagtgagactctgtctcaaaaaaaaaaaaaaaaaaaagaatattcaaaaccagaggcaatttgaataaagaatattcaaaaccagaggcaatttgaatacatgaattattgaaaatgacttcatatgatgtatttcataaaattggcatttcaggtttttttgccagcattgtccttcaatcagcacaggacgagtacaaccgtgggagtcacacctggagaagtctctaattcctctgagcatgaatcagacctgccgcccatgcctggggaggcagtagaatatcacagtattcaattaatacgggatgaatttttaatgaacgtgcagaaatttgcaagtaatattcaaagaaccatgcagcaacttgaaggtaaggtttcattttcctcctttttagttaagaatgattaatttactgtagttgggattacaggtgcatgccaccatgcctggctaacttttggaacatttttgtttgtttgttttgtggagacggggtctcactttgtcgctcaggctggcaaaaatcattttagcacaggattttttgttttgagacagagcctcactctgttgcccaggctggagtgcagtggtgagatctcggttcactgcaacctccgccccctgggttcaagggattctcctgcctcagccccccgagtagctgggactacaggtgtgcaccaccacacctagctaatttttgtatttttaatagagacggggttttaccatgttggccaggctggtcttaaactcctgacttcaagtgatccacctaccttggcctctcagagtgctggggttacaggtgtgagccactgtgcccagcctagcacaggatttttgaatacatttttcttcattgttttctagtagtcaacatccagtgatgagaaactgaatgttcttctaatttttctcccctccccctttacgtaagcttttaagagcatctggttatccctagtgttttggtgttaggatgatgggcctttgtgtggaattttttccattgattttttaaacactcagtgggtgttttcagtccaaagactgaaaaatcatcttgacgttttcctccactatttgttttctcttgctgaaattcctgctggatggatgtctagagattctatttcttatcttttctcttgtatttttcatctttttgtctttgtattctttcctggagtgttcttcaacttctatgttaccaacgtttgattgatagtcatatcagctattatatttttaatttttaagacctctgattctctgattgtatcttttttcatagcatcctgttcttgtttgatggatgctatatgtctcaaatctctgagacaaatagttgggctttccttttggaaatgttctccttttgccctgccctgcctcccctcccctcccctcccctcccctccccttctctcccctccccttcccttttctttcttttctttcctttctttctttctttcttttttttttttttttttgacaaggtctcactctgccgcccaggctggagtgcagtggcacaaacatagctcactgcagtctcaaccttctgggagctcaggcaatcctcccacctcagtctcccaagtagctgggattataggcacacaccaccatgcctagctaatttttgtatttttagcagagagggagttttgccacattggccaggctggtctcgaactcctgactgcaagtgatcttcctgccttggtctctcaaagtgttgagattacaggtgtgagccatcgtgcctggcctgttctccttttctttacattatttcaatttcccctgatgtcatttttcccctgatttatctttgactgactgtttcaggctggtggttatctaaaatgtctgctggctctttgttcaagtttttaaaaattgaagtcactaggttataaactcaggaacatcttaaataactaaatcattttgatcaagcttaacaccggaacaattatctaaaatgtttgaattacattctaatgaaagagaatgagatacagatattatcaggacaggggatgcgtcagaccttattatactgatgaagcttgagagacgacccagccggtgaacttgaatgtttctctttgtaatcatttttcctgaacgaatgactgactgatcgcttttattttcctaggtgagatcaagttagaaatgccaatcatcagtgtggagggagaggtgtcygacctggcagctgacccggaaaccgttgacatcttggagcagtgtgtgataaactggctgaatcagatatccacagcggttgaggcccaactgaagaagacacctcaggtagtttgtgcagggctttcagagagccccgatccaggtcatgcttaccatgctgggaaagagcccggagtctggggtctgcatcatctggcatcttttcttactgttttatgacttccttaagccatcaaaataaacacacccaaaatatcatttctgggctttctgatgttaatgtgctaccaggttactgcctggattgataaagataacactttggatcagtcaggaagcttgggctgccaaaaacaggaaacccaactcaagtcgatcaactaagaaagcaaattccttggctcacataatggaaaagtccagaggcagggttggcttcaggtccagtctgatcagggctctggctatatttctgaatctctcagttctagacccctttctaggggctggagagcttcattcctcaggctggcttccttgcagcagtttctggcctcacattctgtacacctcarttgtccggagaaaggcagagtgtgtttctagcattctcagctggagccctgagattcactatgattggaccacccagggtcaagagcccacccctgaagaccctgaaggattggagcagttggacagaaagaacggatgctggagaaaccaccataagtgtctgctccaccctaatratgagagttctttgtgtgttcatttcacctctcagggtaaaggccctctggctgaaattgaattctggagggaaagaaatgcaaccttaagtgcgctgcatgaacaaacaaagcttccaatagtcagaaaagtcttggatgtgatcaaggaatccgactccatgcttgtggctaatctgcagccagtgttcaccgagttattcaagttccacacggaggcctcagacaatgtgcgctttctctccaccgtggagcgttatttcaaggtatgctgggtgtgctgcactttgcagtcagctctgtcaaagagatttcatatgatttaatttcccttttaaaaatgttcagcatttggccaggagcagtggctcatgcctgtaatcccagcactttgggaggctgaggtgggcagatcgcttgagctcaggagttggaaaccagcctggccaacatggtaaaaccctgtctctccaaaaaatacaaaaattagctgggtatggtggtgtgcacctgtagtyccagctactcaggaggctgaggtggaaggattgcttgagcctgggagatggaggttgcagtgagccaagattgcgccactacactccagcctgggcaacatagcgagaccctgtctcaaaaaaaacctcagaatttaaaaaattgtgataaaatagacatgacatgatattatcattttaaccactattaagcatacagttcagtggcactaaatacatacacaatgctgtgtgtccattacactatttccaaaacagtttcatcttcccaaactggaattctgtgtccattaaacactaactcccccttcttccttaccctaagtccctggtaacttctgttctgctttctgtctttgtaaatctgactactctagggacttcatataaggggagtcatgcaggactgatcctgtgtgcagtctctttcactcagcaccaggttttcaaggttcacctgtgttgtagcgtggagcgtgttagtgtttcactcctttctgtggcagaatcatattccatagcatggatagactacatttggtttctctattcatcagtcggtgggcatttgagttgtttctgcattttggctattaygaagaatgctgctacgaacattcttgtacaaggatttgtgtggatgtgtgtttttaattattcatgtattatgcataggagtggaatagctgggtcatatatggtaactgtttaacctcttgaggaatttctagactgttttccaaagtggttgtcccattttacattctgaagagcaatacacgaaggttytggtttttccrtatcttcaccaccacttgttatcgtctttctgataatagccattgtggtttaatttgcatttccttaacaactagtgagactgaacaactttttatgtacttaatgtgcttattgtcaatttcatattgttggtgaaatgtctgttttaatcttttgcccgttatttatttgagttattattataagagattaaaaaaagtctgctcacctgggcaacatagtgcgacctcatctctacaaaaataaaaataaaaaattagccggtgtagtggtgcatgcctgtattctcagcttacttgggaggctgaggtgggaggatcacttgagtccgcaggggagtcgaggctgcagtaagccatgtttgtgccattgcactccagcctgggcaccagacttggtctcaaggaaaaaaaaaaaaaaaaagagtgaaacttcttgcatgcttactgttttatgaaactatttggaccccaaggctaagggctcttgcgtggctctctcctctcttggtcagaacataacgcacgggtctggcttccacgtggtcctggacaccatccccgccatgatgagtgccctgcggatggtgtggatcatctcccgacactacaacaaagacgagaggatgattccgctcatggagcgcatcgcctgggaaatcgctgagagagtctgccgagtggtcaacctgcggactttgttcaagtaagaagccatggcgttcatttttttgttttgttttgtttcactttttactttttagatcttaaacagctctattgagctataattcacatataattctcttacttaaaatgtacaattcactggctcttatggctgggcacagtggtgcacacctgtaatcccagcactttgggaggccgaggtggcggattgcttgaggccagaagttcgagaccagcctggccaacatggtgaaaccccatgcgtggtgggctgtaatcccagcttcatggaagtctgaagcatgagaattgcttgaacctgggaggcggaggttgcagtgagtggagatcacaccattacattccaacctgggcgacacagcgagattctgtctcaaaaaaaaaaaaagtacaattcattttttttttttttagtatattcacagaattgtgcagccgtaaccactatcaatgttagaacatgttcttcatccctcaaaagaaaacgtgtgccttttagcagtcagtcctcgcctctccccaattgcccaagtcctgggaaccatacagcgtgctgtcttttgcatataaatggaatcagacactatgtgacttttatcactgacttctttcacttagcagcatgttttcaaggttcatccacatcgtagtatggatcagtgcttcattcctttttatggctaaatcatattccattgtatggagatatattttgtttcagatacatatatgtgtgtgtgtgtgtgtgtgtgtgtgtttatgtatatataaacacacacacacacacacacacatatatctacatgaaattttgttttaactgcaatgttcttccccagttgtacctggagagactgaggctgaggtggaaccacctttgagggtgtagggagatgatggaggatgctaagggagacagataacttttttcactttcttaaaaaatatctatatagatgaggccgggtgcggtggctcacgcctgtaattccagcactttgggaggccaaggcaggcggatcacttgaggtcaggagttcaagaccagcctggccaacatggtgaaatcctgtctcaactgaaagtacacagaattagccgggtgtggtggtgggcgcctgtaatcccagccactcaggaggctgaggcaggagaatcgcttgaacccaggaagtggaggttgcagtgagccgagattgcacctgtctatatctgtatctatatcatcatctagcgatctatctagatagacagatctatctggatatctatgtagatctatctatatgtatctagatagatatctatatttatccatatctatacataggtatctatgtctatatccatctatacagataggtatctatgtctatctatgtatatgtatttatatagatagcatataaatggaatcagacactatatgactttttgttatctatagatagatatctatatctatatgtatccatatctatttatatacatctctctctctctctctatctacctgcatagctagatctccatttctgtctatttgcataggtgaagtaggtacccaaatggaggcattgtcctgcgccgtgttgcagctgccgctgttgacctctggcctggggccaaggccrcctgccccttctggtgtagggagcgaggtcaccaggtagccccagccctgcacgcaggttggcggctgcaacggaaacctcgcagcttgggactcccgcccttgcacatgggacagggcagccgcttgcccgctctgccttttccgatgaggccgtgaaaccagggggggcgcccgggtcagagcttcacgggacactggctccccagccggggagtgcggctcggacccggagctccgccctcctcccatcacggcatctcttggcttcgcagagaaaatcgagcgagtgcccaaagcaaaaccttggaagccaggaacaccctcaggctgtggaaaaaggcctattttgacacccgggccaagatagaggcttcggggagggaagatcggtgggagtttgaccggaagcggctgttcgagaggacggattatatggccaccatctgccaggacctctccgacgttctgcaggtaggggctgggcgaaggccggcggaatttgccccgaagaaggcagttggcttttgacagtggccccctccgtgtcaggtaggagctgggcgtcagaaagggcctggcagggagaagcccttcaaagaaagaacctacggaatatactagaatgtaccagaatggaccagagtacaccagagctttgcgactttttgttgctttctctgacattcttccctctccctgctttttggctttcctttgacctctttggccactccttctctgtgtcttttgcaaagctcccttcctctgccttccccttaagtattggaatccctcaagaggccagtctgagacctctcttcactctccctcagccaggcccagtcttcccagagctccacggatggacaaagtgcctagtggctgattgaattagccacagcacttgtctcctaaaggttcacccaccccttcattctaaatgcattcayggagaactcacsgtgtgccgggtactcagatgtcttaatgctagaggaaccatagtgagtacaaagcaggtccggctgcggtgtggcagtgcccagcccgagagggaggtgatgccctgtgctcaaagacaggaaaaaaaaatgctgtaaaaagaattcaaacaggccaggcatgatggctcacacctgtaatcccagcactttttgaggctggggtgggaggatcccttgaacccaggaatttgagactggcctgggcaacatagcaagaccctgtctattgaaaatacaaaaattagccaggtgtggtggtgcacacgtgtagtcccagccactcagaaggctgaggtggcacgttggcttgagcctgggaggttgaggcgcagtgagccgtggtcacgccagtgtaccccagcctgggcgacagagtgagaccttgcttcaaaaaaaaaaaaaaaaaaagaattaaaaatataaagctttttcggctagatgcggtggctcacgcctgtaatcccagcactttgggaggccaaggtgggcggatcacgaggtcaggagttcaagactagactgaccaacatggtgaaaccctgtctctatgaaaaatacaaaaattagctgggcgtggtggcgggcgcctgtaatcccagctatttgggaggctgaggcaggagaattgcttgaacctgggaggtggaggttgcagtgagctattgtgccactgcactccagcctgggtgacagagcaagactctgtcccaaaacaaaaacaaaaaatatttaacttctatgtggaatcaccgtagctagtgtgtgcatgggtatttcattgttaccagaacagtggaaacgctgcatagaactacctcagtggtttatcatctcacctctttgtgtgtgtgtgtgtgtgtgcatgtgagacagagtctcgctctgtcacccaggctggagtgcagtggtgcgatcttggctaactgcaacctctgccttccgggttgaagtgattctcctgcctcagcctcctgagtagctgggattacaggcatgcaccaccacacccggctaatttttgtatttttagcagagacagggtttcgccatgtttgccaggcttgtcttgaactcctggcctcaagtgatccgcccccctcagcctccctgaagcactttcaactgcaagtgcaaaggtcctgaggcagaaagggacatggccttggaggagggtgggggtggctgcaatgtggggaggaacaggcaggtgcagacctggatcttatcctatgtgccttgggcatcgtaccgaagggcttagtccgggaggaggttactgtgtgacatgattcttgcccccaggtcagtctcgatatgctatccatttgtagttctaatattcacaggaaaacccaaatgtaatctcctcattgttccgtttgattggacagrttttggaggaattttataacatatttggtccagaactaaaggcagtgacgggggaccccaagcgcattgatgatgtcctatgcagagtggacggcctagtcacccccatggaaaacctgacctttgaccccttcagcatcaagtcctcccagttctggaaatatgtgatggatgaattcaagattgaagttctggcaagtgacacgtccattgagtccatcttgggagtcgacaccatgttttctctgtgttaaatttgttgggttatttagtgatgcttagtctttttttttaaatcacaagtaawacctgcttattaattataaaaaacaaaaacaatgcagaagtgcataaggtaaaaatgaacattcctccatcttctttgtcctcacacccattctccaggtgggataagtttaagttgagctagacacagtagcatttctacaaagttttgtccaatataagttcacctatctaggagtgaagttaaaagtaaaccagatatggcaagagaatcacaaagcgccctgtgagtttttgagaattgcgttttgtcagaaggcgggggcatggagagctgattggaaacaacctttgggattgaggaagmtttggatgggggaaatggggacgaggaaggaggctgagacagcrgagggggtttcaggtgggargaacagtgtgaatgaaggtgacagacatgagaaaaacaggaattgtctgaggcagagcaaacagaggggtttggcataacacatatgggtagtagagggaaatcaagctagaaaggtgggttgggtaaataattggtgatgaacaaagaggacaggagtgaggaaggagacttacttcagtaggcaagagggygccattgaaggtggttgaccaaggaatgatatagccagaattataggtcgggtgtagcggctcatgcctgtcatgccaacactttgggaggccgaggagagaggactgcttgaacccaggagtttgagaccagcctgggcaacctagtgagatgcccatctctacaaaaaactttaaaaaattagccaggcatggtggcttcttcctgtagtcccagctactcaggagctgaggtgggaggatcccttcaacctgggaggctgaggtcacagtgagctggctgagatcacaccactgtactgcagcctgggggacagagtaagactctgtctcaaaaaaaacccaaaaaacaaaaacgtgaaaaaaaatcaaggtttatacttcaggaagatttttctggctacagtataggctgctttggactggggaacaacagagagtggggagatgatacaggaggtgatagcctgaggtgcggggaggcagagtccatcagagagaggctgcagctgagaatcagatttcacttcccacagtatgaagagtgacccattgcgctcaccttttcagtctcatgcaggaagcgtaattaggagcatccccatttatgtcttacacagttgtttttataacctcacagcatctttttatatgcacaaccctagacagttctacttggttatatagacattgccatgttaactatatctaatttattattagctgctattttaagtgttacttgctttttcagttgaacctttttttggttttcttttattattttttattttttagggacagggtcttgctctgttgctcaggctaaagtgcagtggtgtgatcctggctcactgcagcttcaaccttctgggctcaagtgatccttccgcctcagcctaccgagtagttgggaccacaagcatgtgtctggctaatttttaaaatttttaagtagagatgaggtctcactctgttgcccaggttggtcttgaactcctggcctcaagtgatcctcctacctcagcttcccaaataaattgaacttttcatcaaagtcacttaatcaagtgatactaaaggattcataataagaaaaaacagctccatgcttaactccttcctcattcttgctgtcattttccacaattttagatgtttcttttgttgttaacccctatatttttttaagaacaagccgatgtggttattttctgatttattaatttagacttctgttaacttctcagagtagatacaggctggactgtcccattcctaatcccatttgcctctctgtcatctaacacagtttcttcataacttttagttaaattaatgactagtgtttacttattatgtctatgcaaatattgttcattgctgagctgggaagaccatcataactacaatacctttcttggccaaccttcagttttcctggagttaataattgcttttgttttttatttgcctggttatttatgtacccattgttaattttttccaacttctctaatatctctgccacatacctatcaacaatagcctctaaatacttaaayatatcagtgccattatttacctagaggccttcctcccagagctcattgtcctcctactctagcttgtttaccttttttttcctttgtccttttttttttttgagacagagtttcgctcttgttgcccaggctggagtgtaatggcgtgatcttggctgactgcaacctctgcctcctgggttcaagcaattctcttgcyttggccttctgagtagctggggttacaggtgtgtgccaccacacccagctaatttttgtgttttttagtagagacagrgtttcgccatgttggccaggctggtcttgaacttctgacttcaagtgatccgcctgcctcagcctctgaaagtgctgggattacaggcatgagccaccacacccggccagcttgtttgctttttgagcctgttacaaagcagtctaggaccctaggacttcctatcttctctcatctgtgttggattttcaattttctagatctcacctcttcctctttccttgtttactccttcgttttgctggagcacatttagtagcttcctaagtaaggtttcatgagacatatattttgtgagtcttatatgtatgaattctgaaataacaggtatagaatccaaggttgaaaatcacctttctttagaaatttgaagtttttaaaattgatttctagcttccaatattagaagtctgatgttattcttgagttaatttttctagaactaaccttccactcttttatagaatggagtgggggtgggagggattgaggctgcagagtggcctggctgtgcaaggtgagaaagggattccctgtttgcccctcaccttcatgcacactgactcccttcctgggcccagtgcctccaaatgctaagccttctggagtttcttcaaggaacaaacagggactcacttgcgccccctattttcagcattaggttgtaactacctgccttagttactgtctttttttttttttttggaatggagtctcgctctgtcgcccaggctggagtgcagtggcgccatctcggctcactacagtctccacctcctgggttcacaccgttctcctgactcagcctccagagtacctgggactacaggcgcccaccaccatgcccggctaattttttgtattgttagtagagacggggtttcaccgtgttagccaggatggtctcgatctcctgacctcgtgatctgcccgtctcggcctcccaaagtactgggattacaggtgtgaggcactgcgcctggccctgccttcattactttcttactaaaaattcctgaactatttcctctgttgttgtgtcctctcctgcattttttgtttatatgagttaatactttaaaaaattcctttacctttgaactggttggggagagagatcaggaaatcaacatagccaatctcccactttaaattggataccagtttccattacttatgccatagaaatctgtcccaaaccactgattttttttttcttatttcttgccactttattttggcaggataattacaggggcatgagggttgttttgttgatttttttgcaggttattgagaaagaagcaaaacattttattgatgaatcttttaagacgcttcgatctgctgaagcagcatttgacatgcttttaaaatttaagcacattcgttcacgggaggctgttaatcgacaaatgatgatgaaatttaatgatattcttgcacagtactgtaaagaggtaattgaaaaatcgatagctgccatagcattaaaaatacacttggcaaaatgtgaacaattgaatcccactattgtctgtctttcccatctgaattcagagaaactagaattttcccaaattagcatgttacgtaatacacgtaaccygaacaaagtgggtttgtttatttagtggagaaattcaataagaattaagtatattatgatttactcacattgtggtgggccctgtgtgggttagtaataatcatggtagtaatagtaatcatagttaaccatgtccaaggatcatatatgtatttataattaactcagaacaatttatctggtgctcacatatctcaagtatggtgttaggcacagagatagagagatgaacaaaacgtggattctgcttttaaagaagtcagtatctagttggagaaatagaccaaaaaatgcttataatctgctgggcacagtgactcatgcctgtaatcctagcactttgggaggccgaggccagcggattgcttgagttcaggagtttgagaccagcctaggcaacatagcaaaactccatctctacaaaaaataygaaaattatcctggtgtggtggcgcacacctatggtctcagctacttgggaggcagaggtgggagaatcacctgggccaatggaggttgaggctgcagtgagccatgatcttgccactgtactccagcctgggcaacagagtgaaaccctgtctaaaaaaaaaaaaaaaatgctggccagtcgctgtgactcatgcctgtaatctcagcacttggggaggccgaggcaggtggatcacctgaggtcaggagttcgagaccagcctttgccaacatggtgaaaccccctctttactaaaaatacaaaaattagccaggcgtggtggtggtgtctgtaatcccagctactcaggaggctgaggcaggtgagtcgcttgaacccgggaagtggaggttgcagtgagctgagatcgcgcgattgcactccagcctgggcgacgagtgaaacttcgtctcaaaaaaaaaaaaaaaaagaaaaaagaaaaaaatgcttataatcttatgtagaagacaaaatgagaatatgtggaatgattaggtgagcataaggtagtataaaaaaaggcctaaggtggtctcctgatgtcttagtttcccaatgctgctggaactaatgaccacagatgcagtgacttagaacaacacagatttattctcttatggtactggaggtcagaagtttgccacgggtgtccctgggtttaaatcgaggtgtgagcagggctgtgttcccttcgggagtctctagggatgattcagtgctttgctttccccaaattctagaagttcctggttccctttcatcttcaaagccagtggtggccactttcacttcagatcactctgacctccttttctgcctcctccttcctgttttaggacccttgtgattacatagaacctccccagaaaattcaggataatttatctattttaagatcagctgactgacaacattaattccatctgcaaccataattcccctttgtcatgtaacattacatattttcagcttctggggattaggacgtggacatctttgggaggcgaggccatcattgtgcctgccacacctaattaccccmacgagagctcagacatgcttcttttaaaaacacagktctggtgactgtagtcaataacctaattatacatctaaaagtaactaaaagagtataattggattgtttttataacacaaaggataagtgcttgaggggatggacaccccattctccatgatgtggttattatgcatagcatgtttatatcaaaacgtgccctatagcccatgaatatgtatactttacctgcaaaaactaaaaactaaaaattaaaaaaaaaccaaaggtctgccactgtggtcatgtctagaacagatttccggatttctgataattggatcaagccaatatacacagtgtgcatgctctgtaattgtaaggcaatttggagcattgcatatgttgaagaaaagattactacagccgggctcggtggctcacgcctgtcctcgcagcactttgggaccctgaggtgggcagatcacctgaggtcaggagtttgatacctgcctggacaacatggggaaacaccatttctaccaaaaatacaaaaattagctgggcatagtggtgggcgcctgtaatcccagctacttgggaggctgaggcaagagaatcacttgagcctgggaggcggagttttcagtgagccgagatcatgccactgcactccagcctgggcaacagcgcaagactctgcctmaacaacaacaacaacaaaaagattactacagagcataagaaaaagtagtaaataataagtaaacagtgaaaacactattctgcatcttagaatattttttgacattccacttttggtttccttaaagattcaaatctcatctttcttggctaacctggcgatgtttatcacttacagaagctgtttgattgcttttcagattgacatcattaataaaatctttgtccagaaccttgaaaatccaccactgtataagaatcaccctccagtagcaggtgcaatatactgggaacgatctctgttctttcggattaagcataccatcctccgatttcaagaggtacaagagatactggacagtgatcgaggacaggaggtatgttgctcttgctagaattggctccttttgtatttgattttttttttttttttgagatggagtctcgctctgtcgcccaggctggagtgcagtggcgcaatctcggctcactgcaacctccgcctcccaggttcaagcgattctcttgcctcagcctcccaagtagctgggactacaggcatgtgccaccacgtccggctaatttttttgtatttttagtagaggtgggattttaccgtgttagccaggatggtctggatttcctgacctcgtgatctgcccacctgggcctcccaaagtgctgggattacaggcgtaagccatagcacccggccctgtatttaatgttttaatcctagactggctgccctccccgatcccatccaggagaagcattagatcaggctgctgccgccatgcagcacgctatgtagagtggcccatttgagaagcagctcaatttcagacccatgcctgtgagttagagggtctttctgttgtccttgcattcatgctcatagtaaactgccttttgcgttccttctttttcttttctttttcttttttttttttttaagacaaggtcttgctgtgttgcccaggctggagtgcagtggcacaatcacagctcactgcagccttgaccttctgggtttaagcgatcctcctgcctcagcctcccgagtagcggggcctacaggtgtgggccaccacgcctggcccatttttgtattttttgtagagatgaggttgcaccatgttgcctgcccaggctggtctcaaactcctgagctcaagcaatctgtccacctcggcctcccaaagtgttgggcttacaggcgtgagccactgcacctggcctgtgttctttctctttggcatcttaatacagaagacatcttccagaatgtggtcatgtgggcttcttcctgtattgaattttcagcttctttggaggatgcctaccatcttttcgatatgatctcaccccccacccatggatttttatatgttatatagcagaggctggtaagccatttctttgaagatcccgatagtaaatattttaggggtttggacaatttctctgcaacgactcaacctgtcgttgctgcaataaagtatcccccagataatacgttttgaacaggcgtggctgtgtccaataaaactttatttatggatgctgaatttgaatttcatatctttttcttgagttacaaagcattattattcttttgatttctttttaatcatctaaatcatttccttctcttcatgtaaaagctgttcttagttcatgggtagagaccaaggcagttcatggactgtggtttgcagaaggctgccagtcaacctagatttcaagttatcaactatattagtccattttgctataaagaaactgggtaatttataagaaaagaggtttaattggctcacagttctgcaggctgtacaggtagcatagccttcctgggaggtcccaggaaactcccaatcatggtggaaggcaaagtgggggcaggtacctcacacagtgggagcaggagcaagagagagtgaaggggcaggtgctgcccactttcacttgagcagatctcccaagaactcactcagcatcaccaggacagtcccaagagaggtggtgcaaaccattcacgagaattccgccttcgtgatccagttgcctcccagcaggccccacctccaacactggggattacaatgcagtatgagatttgggaggacagagatctgtgctatatcaccatcgcagaccaactctccaagctttgggaaaatctattgacttcctttttcaaaatgtgtttatatctaatactattttatattatattatttaatattatataactatatattatttattatattaacatttttatttattatatttataatgtatgtatacaaaattatgtagaaagatatgaaaaaatgtttatatataattatataaaaatgaccaggtgcagtggctcacacctgtaatcccagcactttgaaaggccgaggtgggcagatcacctgaggtcaggagttcaagaccagcctggccaacatggtgaaaccctgtctctactaaaatacaaaaattakctgggtgtggtggcatgtgcctgtaatcctagctacttgggaggctgaggcaggagaatcgcttgagcccgggaggcgaaggatgtagtgagctgagatcgcgctactacactccagcctgggcgacagagtgagactccgtctccaaaaaaaaaaaaaaaaaattatataatgtttataataatttatatattatatttataatttgtataaattatctgtgtagagcgagatgaaaaatgttattttcaaggacaaaatgacggttgcttgaattctttgataggtcaaacaaaaatatttggaagtaggtaggacaatgaaggagtatgaagacagaaagtatgagcagtggatggaggtgacggagcaggtgctgccagctctcatgaagaagagccttttgaccaaggtgcgctgcccacgccctcattcccgattgccgcgtgagacgatggcgtctgccacattttctcaaggcttgatttgttgacattcatgaagttgggtcagtttccagaatcaaagacaaggaagggctaggggaggaggagaaaggaaagagtggagatggcacgatgccatggctaggacgcgggctggaaacgggcagccctactgacttcttgggcaagtggctgaataccaagcctccgtttccccatttatgaaatgcgttttataaatcagatgatgtagacaagcaaagggttggttgaatcatatatgaaacagagctgacagctggccatctttaacctgcagaaaaatgccattccacctgattcatcctcttcttcagctctgggccccgcacttggtgaatgctcgataaacgaacacctgccgttagggaggaaagatgcagcctggcagttttaggtctttggttcctgaaatcctgacgtagggaccaaagcaagtggagagggccaggtgggacccctagggaacaggtgggctcagatccgaccaaagaggcaactgctccatgtcagattttccagtgtttcaagggaaggcagaaggaatttttaggtgaaattgctccattttcaaatgccggcaactgaattgattcttcaaaatctccgttcaccaaacaaaatacatattccagccagttccagccagcacccccgtctggtgaagggcccagtgttgatctttttcatgttcacttttggtgtgggttgtgttgatccaactgtctcttggactgccctggccgcgctgatggaatgtctcttccacagtcttccatcgccacagaggagccttcgactttagaaaggggagctgtttttgcaatcaacttttcaccggctctcagagagattattaatgaaacaaagtacttagagcagctggggttcactgtccctgaattagcaagaaatgttgctctccaggaagacaaattccttaggtaaaaaaattcttcttttaaattagcagtaagctttttgttcttgggacccctttacgctcttaaaaattattgaggacccctccaaaagctttcatttttgtggattttataattatgaattcttaccacattagaaattgaagctaaggcctgggcgttgtggtgctacctgtagtctcagctacttgggaggcttaggtgggaggattccttgaacctgggagattgaggctgcagtgaaccgtgattgctctatctccagcctgggagacagagcgagagcctgtatccaaaaaaaaaaaaagaagaaaaaaaaattgaagctaagaaaagtttaaaatatggggttgggtgtggtggctcacgcctgtaatcccagtactttgggaggccgaggcgggcagatcatgaggtcaggagttcaagaccagcctggccagcatggtgaaaccccatctctactaaaactacaaaaattagctgggcatggtggctcatgcctgtagtctcagctacttgggaggctgaggcaggagaattgcctgaacctggcaggcagaggttgcagtgagccgagatcgtgccactgcactccagcctaggcgacagagcgagactccatctcaaaaaaaaaaagaaaagtttaaaatagggatcaacaatagtaaacctatttcatgtaatataaataacatctttaatgagaagtaaccaatattttccaaaaaagaaagttaatgagaagagtgatgttttaaatttctgcaaatctcttgatcaaggttggtcttgattgagaccacggtcttttgtaatctcttgaccgcaaaagcttttgatgagcttaaaggtgctctcctcaggtttatgacattcctgtcatgtgcaggtacacagctgggatacagcgcatgttggatcattatcacatgctcataggaacgttaaacgatgcggagtctgtgcttctcaaagatcattcccaggaactgctccgagtgtttaggtcgggatataagaggttgaactggaactcactaggtaacgtcattcatctattgattgccttttagacttgggatgcaaagtaattcttttaggttgttttatttgaattaccattttcatatgtttatagagacaattaacaatttttgagggttaagaaatacaagttgcggaacttagaactgatctccaggctgtcgttgggatgaasataagaggggtgatattttcacactctgcagacccaaagcacatttctcccaaaagaaaatcacctttacttttatttttttaattaaaaatgtaatttggaggtaattatagattcacatgcagttgttaagaattacgacagagggagccttcgtaccctttagtcattttccctaagtagtaacttcttgcaaaactagttaagatcacaaccaagatattgacattgatacagtcgagatagagagcattttcaacaccacagcgagtactgtcaagtccacttccctcccatccttgccctctccttaatccctggcaaccatgaatctttattcaatttctgtaatgttgtcatttcagagtgttatataaatgagataacacatagcccttttttgatttggctcttcttgctcagcctaagtcttcaaagatctgcccttgttggatgtgtcaacagtctgtggattttcgaagcataccccacggtatcaatgtaccatagtttgttcagcctttcaccttttgaaggacaactaggttgtttccggttttggctcttaggaataaagctgctataaacatttgtgtacagggttttgtgtgacaggagtcttcactttttctgggataaatgcccaggagtgcagttgctgagttgcacggtagttgcatgtttagtttaaggttgttgttgttgttgttttgagatggagtttcgctcttgttgtccaggctggagtgcagtggggcaatctcagctcactgcaatctccacctcctgggttcaagcgattctcctgcctcagcctcccgagtagcttggattataggcacctgccaccacttctggctcacttttgtatttttagtagagatggggttttgccatgttggccaggctgatcttgaactcctggcctcaagtgatccatccgccttggcctttcaaagtgctgggattacaggcgtgagccaccacgtgtggcctttttttgtttttgtttttgttttactgtcatgctgtcttacagggcggctgtgccattttacatttccatcatcaatatatgagtgactcggtttctctgcatcctggccagttttgctgtcactttttttttttttttttaattttggccatctgatagctgtgtaatgatatctcatggttctgatttgacttctgtaatggctaatggtgttgagcatcttttcatgtgctaataagcacaaatatgtcatgtgtatggcctcttcagcaacacgtctttttatgtcttttgcctattttctaattagattgtttgttttctttactgttgagttttgagcatccttggtatactctagatactcgtcttttattggatgtgtggtttgcagctattttctcccactctgtcgcttgtcttttctttctcgtaggagggcctctggtagagcaaaaactgtaaatttcaactaagtccagtgtatcaatttttcctttaatgggttctacttttgctgtcaagtcgaagaatcataagtttttttctctccttgtgttttgtttctaaaaatgttatagtatgatgtttcccagtatagtctgtgatccactttggggtttttattttcataaagtgagaccgatcgtaagtacttagcccgagtttactgttcatgttcttgctgttcgtctaagctccaggccagaggaggctgcgggcaggtggtgcagagtggaggttcagggagctccagcagtgagaagacagctaggcttgatagtccctttctccccatggtgctccagccaggaccgtgctaacatttgaatagaagagatgcattgcttggttgattctgggctcaggactccttgtcccagtcccttagggttcaaagtggatctttgccagcccaaagacccaaggggttggaatgagcagggtctttcctgcaaagggatgccagtattaacatcacagacgttggtggggggatgtggaaagacagagttggaagccaaatgtctttctttctttctttcttcaaaggtatcggtgactatataactggttgcaaacaggccattgggaaatttgagtctctcgtccaccagattcataagaatgcagatgacatttcttccaggctgacattaatagaggccataaatctctttaaatatccagccgctaaaagtgaggaagaactcccaggtagatctgacttctgggttctccagttatggaattaatgagaacatatattgtatatacatacatgtgtatatatgtacctataaatatacatatgtatttgtatgttccatgaatggcatcaaaccatttctaatgctctcagtcatttacttgaaagaatcacgggtagctattactttttgtcatgttttatatattgcttagtttaacaaattcatgtttatttgtttttgttttgtttttttctgagacgagggctcactatgttgcccaggctggtcttggactcctggcctcaagtgatcctcccacctcatctgcgaaagcctgtggtactttgttgataactttgtaacagtaaagctagttgtattttttatgggctcacatttacttgctaaagaaagatactttaggcagggctcggtggctcacgcctataatcccagcactttgggaggctgaggcaggcagatcacaaggtcaggaaatcgagaccatcctggctaacacggtgaaaccctgtctctactaaaaatacaaaaaattagctgggcgtggtggtgggcacctgtagtcccagctactcgggaggctgaggcaggagaatggcgtgaacctgggaggcggagcttgcagtgagcccagatcgcaccactgcagcactccagcctgggtgacagagtgagactccgtctcaaaaaaaaaaaaaaagatactttaagtggtcttagactagtcaacaaggaattcaagatatgtcaacaatgaattgaagaaaaacaagattgcccaaaggtataaaagccactagatgtgcgtaactggttgtcatttatttgttgcttagtgtgtgttctgatattgacttatgttctgctttgggctgaggttggaggctggttttggtttttttaagacacacagctcatgtttggattgccttttgagtgctgtccttccctgtgttcgtggacagctctaacagacatctttctctccaggcgtgaaggaattttttgaacacattgagcgagaaagggccagcgacgtggaccacatggtccggtggtatcttgccattggaccactgctgaccaaagttgagggcctggtcgtccacaccaacacaggcaaggcccccaagctggcctcctactacaaatactgggaaaagaaaatttatgaggtcctgacaaagctcatcctgaagtaagttcatcttgttgcatgctttaaaatggtgtgtgtagattaaaacagttgacaaatatggacagttagagggggtggcaaggtagagaatgaaaatcagttggatggtcagaggctttctggcagaagggcactcacagaatggggggatgaccttcatgatcttgttaggcccctcaacattccaaaaaagaaaggatccctctccccacttcaactgtctgaaagccatcgtgagcctgtgttcagctggcagcagagaatcgctgtcactcaatattggctagaatcccagaggacttccttgttcatgttgagagtgacagacgtgaaggacacatggcctattccttgctgatttcaagtcagcccctagttagcgcggtctgtgcgtgttgaatgcctgtttcatgtgccagcctctgacacgccagactctgtcccttccctcctgggcctcaccctcagcagctcagccagaccagctggaagctgagtgcctggaccccatcgcattggtggcccacagactgttctggggtgtgaggctgacagtttaggatcattctaggaaaccagcctgtgaaatccatcaccgttaccgtcacgtctatattgtcaagagtagtgttcattttatcatgcagtgtcttccttatgaaggggaactccagaagaaatgactctagttccttctttgaccccagcctcacatttttctcttcttttctttttttttttttttttgtttgagacagagtctcgctctgtcgcccaggttggagtgcagtggcatgatctcggctcactgcaagctccgcctcccgggttcatgccattctcctgcctcagcctcctgagtagctgggactacaggcgcccaccactacgcctggctagttttttgtatttttagtagagatggggtttcaccgtgttagccagggtggtcttgatctcctgacctcatgatccgcccgcgttggcctcccaaagtgctgggattacaggcgtgagccactgcgcccggccaccccgcctgacatttttctttttcgttttttgctttcattttcttgtttggtttttaagtgatacggactctatggattgttaacttcatagctttccctttcacgttggctgctaggaagcttagaaccaaatttgtggcctaaatgcagcaagtgtgtaggtatctatgattcacattttagtctcatctgaacacataggaaagctcaccttgcaccatgttctgtgctggactctttccaattctcatccctgttttacagaggaggatacagaatcttggcaggttaagtgactcgtccgggaccacacagccagtaagagaaagggctgggatttgaacctgggcagtctgactccagtatcatttcctgaaatggtgtctgattagtgtcttcttcgttccttactttacctcactttgattttaggatctcttactgcagttaaagtatctttgtgagctgctaaaaatctcttttggaataatacactgaaaaataaaacaaaaacctttggtcttcttgttttctggacccagtttcgcaaacttctctaagttgatcctttaaataactctgttttctgtgtatttcatttattctctgttactacttttaatttagattcctaaagcagtcccttacatggagctacctcctatagtgtttcccttactaatatgctatgtttttttttttttttttgagacggagtcttgctctgttgcccaggctggagtgcagtggcgcaatcttggctcgctgcaacctccgccttctgggttcacaccattctcctgcctcagcctcctgagtagctgggactacaggtgcccaccatcacgcccagctaattcttttgtatttttagtagagacggagttccactgtgttagccaggatggtttcaatgtcctgacctcgtgatctgcctgccttggcctcccaaagttctgggattacaggcgtgagccaccgcgcctggccctgctatgttttcttttgatccatttattaactcattcattcatttgttcatccatccatccatcatccatccatccatccatctgttcattcactcatccatccacacattcatccccacatccatccatccatccatccatccatccatccatccatccatccatccaaggttgagtaaagcctgccctgtgctgcctgttggattagactctggtcacagacaaggcccctgtatccttgcagtttctctaacctcatagagaaggcaggacacagggaaacagacataaaagagatgagttctgtaaaagaaacaaagcagcctagtgttctggggagagaatggagatgctgctgtaattgggtggtcaagaaagaccccggaaattccacattttagtagagacctgaagatgaggagtgagctgaaacggggaagagctttctgggggaagccaaaaactgctgtgaagacccacaggtgggcctttggtcagtggaagaaacagaaagaaggaaagatgagattgaaggaggggatgaagctggagagggtggcaggggtggatcaggtcacagggagcctgggaagccacggcagggagcttgcattttatctgacagccatgggaggctgctggagtgttttcaactggagaaagaggaggagagggagggagagagaaacagggagagggatcgagagagagaggtggagagagaggcagagggggagagagagagagataaggaggggggaagagggagagaggaagggagaagcctggagagggagagagaaacaggaagagggagagagaggtgaagagagaggggagagagaggagagagaaggggagggaaaaggagaaggagggagggagagggtgagagagggaggtggggtgagagggagagggggagagaggaacagagaggaagagggagagagagaggttgagagagaggagagagagagaaggggagggaaaaggagaagggaggagggagagggtgagagaagggagttgagttagagggggagggaaaaaggttagaaaggaggttgatttagannnnnnnnnnnnnnnnnnnnagggtgagagagggaggtggagtgagagggagagggagagagagacgggaagagggagagggaggagttagatgtttttgttttgttttgttttttgagacagggtctcactctgtcaccaaggctggagtgcagtggcatgttcatggctcactgcagcctcaacctccctgtctcaagcaattctcccacttcagcctcctgaatatctgggaccacaggcgtgtgccactatgcccagctaatttatttttattttagagacagggtcttgctgtgttgcccaggctggtctcaaactcctgggctcaaatgatcctcccacctcagcctcccaaagtactgggattacagatgtgagccactgcgccccgctagatgttttaaaatagtgtctctggctgccatgtgaattactggatggggttgggccggcagggggaagcagggagactgggctggaggctgatgaagttccatccctgggtgtcacatctactttcatcctggaaaggatggagccagtagggcaggctgggtggggatgtgagtgctcctttttccttaccagagttgagcaggttttggaagtcattattgtttaactattttccaaccaaaaggtcttcagttttccaaaagtggaaatgaactgtttgtataaatttagtgcaaaaaaagagtattttaagtaagactcaccccagcctgtctaggacagcctcacagtgtgccattgcctgtacctgtgatttttgtggccctggtcatttccatcaattgcttggtgtatttcactctagtgagatacactctgagtctttctcatcaacccctcttaggaacttgcagtcttttaattctttgatccttggaaatgtccctctgttccacactgaaaccattctgacggcacctgagatcatccttcatcccaacacaaatgagatcgacaagatgtgcttccattgtgtccggaattgcgtggagatcaccaaggtgagagcggaggtgcttgtgtccttgctcagacggcatctcaggatgcctccgcctcccaaagtgctgggactataggcgtgagccactgcccaaggtggaattcttgaccttctgccttgtgactcagtcatcccccagttttccccacttcaggaaatggcaccaacatcaaaccaactgcttgacccagaaactcgtccttgtttcttcttctctcacccagccctgcccggctcacatcagtaagtcctccaaacatacttcccatctgtcctcttctctcctgtccccccagtaccttcctatcccaagtggccatcacccctctcctggactgttgcagtgacgttccatcaatccattctccaccaccggtggtcagaattaccttaaacaaatacaaatcaggccaggtgcagtggctcacgcctgttatcctagcactttgggaggctgaggtgggaggattgcttaagcccaggagttccagaccagcctgtgcaacatggtgagacccccccatctctaccaaaactaaaattaattagctaggcgtggtggtgcacacctgtgttcctagctacttgggaggctgaggcagaggattgcttgagcccaggagttcaagggtacagtgaggtatggttgcaccactgcactccagcctgggcaacagagcaagaccgtgtctctaaaacaacaacaacaacaacaacaacaacatatcatttcgtgtcatccctgttgtaaactgcccccacccaccccatgacttaattacacttggaacataatccagatatctttgtgtgctctgtgaggccgccatgctctagcccctggctgcctttctgatctcagtcctacgaggatcatgctccctcatgctgcagcttgactggctgcctggttgtgcctccagcaggcaccatgggttcctcttgcaaggatctccatagctgttccctcacctggaacattctgctcccctgaccttcttgtcctctctctccygtcacccccctcccatcttcctaccacgtaccactctccgaccttttcttatttttttccttgcttatttatctattgatcctttcaggccactagaatgtaagatccatgggaatacagaccttgagtgttttgttccctttagaatccccagcaccaagaacatctggcacatagttggttctcagtaaatgtttgttgaatgaacatctgctggcagaaaacccaaggtttatgtcttaccccaaattggaaaatagagctgtctttgtgggtatggggcatcaccccccagcacactggcatcttcctcttcacttggcttgttcagcaagtcagacatgtttccggcatttttaggggcataaaaataagtttagaaatcagaatagggaatttcatttcacagtacttaaaaattgatgaataaggccaggcgcggtggctcacgcctgtaatcccagcactttgggaggccgaggtgggyggatcatgaggtcaggagattgagaccatcctggctaacatggtgaaccctgtctctactaaaaatacacacacatacacacaaaattagctgggcgtggtggcgggcgcctgtggtcccagctgcttgggaggctgaggcaggagaatggtgtgaacccaggaggcagagcttgcagcgagccgagatcgcaccactgcactccagcctgggcgacagggtgagactccgtctcaaaaaaaaaaaatgttgaataaacggtacatgttttataatccatgctaagacagttatttattaagtctctgttacataaattctcttataggtgctgtatgttataggtgctatgtatgtttcctttgtaagggaaacagcaatttttaagaggtaaataaataggaaagttggcctataaaacattatgaatattaatcacaatattccatgccaacttaactttcctccttactaatagatggatttgaggctcttggtgaagcctgtattattttagcttcataagttttttcttttaaatgaaaataatttttacttattctcttagataaggttaaaaatgtatttcattaaaaagatcttggcaaatgaacatgcatggctaggccacttaatatggttgaactctttgatcttcaggattcctatttcgtggcaaaaaataatgagccaaagttttaactagtttctgaattttacctcctctactaagtggaaatgataataccattcaccttctagtgcgtgctgttgggaggattaaattatataacacgtgtatacagcttagtgcagtgtttggcaatcagtagctctgaataaatgttagctattagtattagtattactttttttttttttttgagatggagtcttgctctttcaccaggctgaagtgcagtgttgtgatctcagctcactgcaacctccacctcccgggtgtgagtgattctcctgcctcagcctcccgagtagctgggactacaggcatgtgccatcacacccagataatttttgtatttttatttatttttttttttgagatagagtcttgctgtttcgcctaggctggagtgcagtggtgcaatctcagctcactgcaagctccgccttccgggttcatgccattctcctgcctcagcctcccgagtagctgggactataggagcccaccaccacgcctggctaattctttgtattttttttagtggagttggggtttcaccatgttagccaggatggtctcaatctcctgaccttgtgatccgcccacctcggcctcccaaagtgctgggattacaggcgtgagccactgcgcctggcctaatttttgtatttttagtagagacagggtttcgctattttggccaggatggttttgatctcttgatgtcgtgatctgcctgcctctgcctcccaaagtgctgggattacaggtgcgagccaacgcgccccgcctagtgttagtattactgttattagtaatattggaagcagaagtattaggtcagtgcaaaagtagctgtggtttttaccattaaaagtattggcaaaactgcaactacttttgcaccaacctatagtagttgttattcacattttacagatggtgagcatattgttcagagaactaatgtgtcacatacctatggtttgctgttatgactcacgcttgattaaaacagagccttggccgggcgcagtggctcacgcctgtaatcccagtactttgggaggccgaggtgggcggatcacgaggtcaggagatcgaggccatcctggctaacacggtgaaaccccatctctactaaaaataccaaaaattatctggatgtgggggtgggtgcctatagtcccagctactcgggaggctgaggcaggagaatggtgtgaacccaggaggcagagcttgcagtgagctgagattgcgccactgcactccagcctaggcgacagagcgaaactccgtctcaaaaaaaacaacaaaacaaacaaacaaacaaaaaacagagccttaactctacagcagggagatgtcaaattagcagatttgttctgggacactaagcagtcaatttgcctgaatgtgtgttttttcctctgtaaatatggaaataaaagtttttttaattcatccatggtgtagttggcctttatgttataacaagccacttcaaaacttactggcataaaacaataatcatttagctctgggttctgtgggctgagttctgctgaacagttcttctggtcttggctgggctcactcgtgtctagcagttgatgacctcaagcacagctctgatgggtggcggctggggttctcttgtgtatggcctttcgtggtgtagtagaccagctcgagctggtggttgcaaggttctgagagcatgagagcagaagctgcagggctttcttgactccttggtttgaatttgcataataccatgtccgcccctttccattggtcaagttaagtcacaaggcttgctccggaagggaaataggctccatctcttgatgagaggaacaaaggattatggtaatttttgaatctcaaataatttattaataataaagtgattttccattactggcaagacttattactgaatactaatatgtacgttggaggcaaaatagatactaaaatactgtcttttctcctaattcttactttgccagcattttgttcgttggatgaatggcagctgcatagaatgcccacctcagaagggggaggaagaggaagttgttataataaacttttacaatgatatctctctgaaccctcagataattgaacaagctgttatgatcccccaaaatgtccacaggattctgatcaatcttatgaagtatctacaaaaatggaagcggtatcgacctctctggaaattggacaaagctattgtgatggagaaatttgctgccaagaaacctccttgtgtagcatatgatgaaaagttgcagttctattccaagatagcttatgaggttatgcgccaccctctaattaaggatgagcattgcatcagacttcagctcaggcatctggcaaacacagtgcaggaaaatgccaagtcctgggtgatttcgcttggaaaacttctcaatgagtcagcaaaagaggagctctataatctccatgaagagatggaggtactcaatcgctgtgtgtaattgaaactacttttcgtgtaagttgggtcttcatttgcgccattactgttttttctgtgtttgcttagtgttctttgtactttctgttatagcacctggccaaaaaccttaggaagatccccaatacccttgaagatctcaagtttgtccttgcaacaattgcagaaattagaagtaaatctctagtcatggaactcagatatagggacgtccaggagcgataccgtaccatggcaatgtataacctctttgtaagtcaacttgtattttcttattcatttaacaattggattgaccactaacgacccttttcagaaatgcttctcaagtatactgccattgatttgttttcaaataagtgactttaagtaatacattgtaaatgtaaagcaatgccactgttatttagaataatgaaaatatagagtatttttcaatctgtatggctcaaatggattgatctgtaactataccatttccattctcccttttcttttcttcttttttttgtgttaatttcctttaatagataaagagctcttgcaaaaatgataagaagagagtgaaagatttaagataataaaagaaactggtagaagataattcaattagtcttgctttgtttagggttgttaaatttgggttctcaggatctttcaaagtcatggatgagttttagggggtctgggttccccctgaagttgtatggaaattttacatactgtacatttttctgatgatgaaagaaagtcaagtttttggcccaggtctactgctcagcaagggcatttgtgagctccacatcctaaccactaggctgcaagggtcctggtgtttgaagcagtcaagcaatagaaatgctgaaagacaaacttcatgcaaatcctgatttattcatagcaatttgtttctcttctctagtttgtatttctcccttggccaggtagatttttttttttttttttttttttgagacggagtctcgctctgtcgcccaggctggagtgcagtggcatgatctcggctcactgcaagctccgcctcccaggttcacgccattctcctgcctcagcctcccgagtacctgggactacaggcacccgccaccacacccggctaattattttttgtatttttagtagagacagggttttactatgttagccaggatggtctcgatctcctgaccttgtgatccacccaccttggcctcccaaagtgctgggattacaggcatgagccaccgcgcccggcctagccaggtagatttttgtcagactttgcttccctggtttacgtcacagaaataatagaagaatcactgtaacaaaggattttgcactaagtgtgcaatgggtcacacacaaaaaatgaatcagaatgtcaaattccaacaacaacaacaacaaaacaacaacagttgagattttgattgtgattgcattgatcctttagattaatctgcacaaatggacatcctgtagtattgagttttcctatccatgaacatgttctctctctctttatttaggtctttaatgtctccccgtaaagatttataattttccccatagaggccttacctattttttgccagatttattcctaggtacttggtatttttagatgctcttgtaattggtatctttaatttttattttaattattttattttttattgttatatagaaagacaattgatatttgcattctacttttttatgatcagtaattatgaattttaatcatttatccacagattattttggattttctaggcacaccattttataaactgtgaatattgacagtttcattttaatttttaaatattttgtttctttttctcaccttatgactctagctaggaattcctgtacgaggctggatgaaaggggaggtaggggaaatccgtgtcttgttcttgatctcagaggaaaagcttttggcactgtatcattaaatatggtaattgctgtgtggtttattagattaactccaatacaataagagaaatatacagttgtgtatatttaacacaatggggatatattctgagaatgtgtcaatgggcaattccataattgtgcaaacatcatggaatgtacttatacaaatctagatgatatagctactacacacctaggccatatggtagaacctattgctcctaggctacaatcctgtccagcatgtactgtactgaatactataagcaatgtaatataacagtaagtatttgtgtatctaaacatagaaaaggtacagtaaaaatacagtattgtaatcttatgggaatactgtcatatatgcaatcaatttttggcccaaaacatcattttgttgctctttgatctttgacaaaagaccaatgactgtctttggtcattgtccctggttcctgacacaaagctttcaaaacacttgtaatttcctgagtgataggggtcacaggaacatcttttgttacaatattgttctttgtccctggttcctggcgcacagcctctcaaatccttggactctggagtgacaagagtgtcttttgtatgcaagtgaaatgactggtggctgggagccctaggcagcttcagcatgggggctggttgccagaaagatcaagccataaattatttagaggtttggaactttcaggygcccatcyttgccacccttggggagggaagaggggctggagattggagatcaacaaaggccagtgatctaatcagtcatgcctgtataatgaaacctccatgaacatccctaaatgatgggatttggagagcttccaggttgttaaccacaccaaggtgctgggagagtggtgtgctcagagaaggcgtggaggctctgtgcaccccccaaccccataccttagcttatgcgtctctttcgtttggctgttcctgagttgtgtcttttataataaatcagtgatgggaagtaaagtgtccttctgagttctgtgagccatttcagcaaatggtcaaatgtgaaggagacgtgtgtgggggaacccctgattttgtagccaggttggacagaagtctgtgtaccctgggcacctaatacttgcaactggcatctgaagtgaggacaaccttatgggacttacgcctgcatttctattgagtataggcctagacgtgaagttgctgggttacaggaatccacgtgttcagcttcactagattctgctaattttccaaagtgatggtacccctttacatccataccagcacgaataagggtttcagttgctccgtctccttacaaatacttagtttgttgatcttttggaaacaccaactttgggttttttttatcccttctatgtgtggatattattccatcatcttctggcctctattgttttgacggaggagttgactgttaatctttttgttgctccctttcaaggtagtccagtctaactttttttttttttttttttttggtctgcttttaagaatttttttttggtctttggttttcagcagttgtaatatgatgtaactaggttcttttgttttgttttgttcttcttttttttttcctgattgagatttgtagtacattcaaaatctgcaggctgatgtctttacctagttttggaaaattaacagtttttgccttattttttttcccttctgggactccaattccacatatgttggacctttctacaataccctgtacatcttacattcctttctgccttttctttctgtggtttattctaatactttgtcctaaactttaagttcattaattttctatttatttatgtctgatctgcttttcccggttccttaaacaatcctttgagtgcttgatttcaggtattgtcattatccattccagaatttccattttaaaaacaatttcctgtgctctaccaaaattctcaattttttgtcttttgtttccttgactctattaaataaaattattttaaattgtgtgtcttataactctgtcgtgatcatttatgttgtgtgtgaatctcttggttttgtttaagttctttcgtgtctttatatggctggcatttctaactgagttcttaacagcctgtgtgataaattggagagagaggattggaggcgttgggtgatgttatattttatcagaggagatttatttttgcttctaacagacaccataactgggtacattagcaagctaagctaaacttattctaatcagagattaagttgatttgaagctgggctttagtttatgaagggcttatctctctgtaatatctctatttctttttctctttttttttttttttttgagatggagtttcactcttgttgcctaggctgagtgcaatggcacaatcttggctcactgcaacctccgactcctgggttcaagtgattctcttgcctcggcctcctgagtagctgcaattataggcatgcgccaccaccccagctaattttgtatttttagtagatacagcatttctccacgttggtcaggctggtcttgaacgcctgacctcaggtgatccgcctgtctcagcctcccaaagtgctgggattacagacgtgagctactgcacccagcctctatctctttatttttaaaaatgattttatactgattttattttaattataaaattcaactttaatatttatttttattttactttatttttttgagatagaatcttgctctgtcaccgaggttggagtgcagtggtgtgatctcgactcactgcaacctctgcctcccaggttcaagcgattctgccacctcagcctcctgagtagctggaactacaggctcctgccaccacgcctggctaatttttgtatttttagtagagaagggatttcaccatgttgtccaggctggtctcgaactcctgacctcaggtgacccacccgcctcagcctccaaaagttctgggattataggcgtgagccactgtgcccagcctaatatttctttttaaaatttctttttctttttatatttacagagatacagtctcactgtgttgcccaggctggtctcaaactcctgagctcaagggatcctcctgcctcagccccccaaagtactgggattacagccatgagccatgtaatcccagtctggccatgtctggccttaatatttcaatcagcttttgagttggtttgaattacctagcctcctgttgccacaagcagaagtccctgggaggtaactttgaccatcaatttcaattccaaattgctcatcatttgttgtttattctgttttttgtttctcctaattagcctcctgatgcagagaaagaactggttgataagattgagagcatatggtccaatctgtttaatgattcagtgaatgtggagcatgctcttggggacataaagagaactttcacagaggtaccttttaaatttcacttcctgagtaaagacattgaaaaacgtatttgggctaaattaatgtaacctcgtttttctcagcttactcgaggcgaaataatgaactacagagttcagatagaggagtttgcaaagcgtttttacagtgaaggccctggttctgttggtgatgatcttgataaaggtaagaatgttcctgttggtcttactgagcgatctgagtagcaaatgtttgagtatgttttgcttaagagttttatggcaagtgatgatggtgccgtgattaaaatatttatttcttcctcaaatacttttttcttggctcattttagtggtcacattaaaaaaaaaaaaagctggattaatgcgactcattgattgttgagtgcctgctacccgaaggtgttgagagaagtgccaaggagcagcctccactcctgtgggggatacagaggtttctgccgcagctcagaaatcttaaacaccagcgactgcctttacaaaggcagcgtcttatccatccatctgcctctctaatgcctgttacatttattctttggattcagatgcttgtcctctgcccttcacatcacataggctaaaatggtgacaagttaaaaatactaaaattctgttttttttttttttttttttttgagacagagtctcgctctgtcacccagactggagtgcagtggcacaatctcagctcaccgcaacctccacctcctgggttcaagtgattctcctgcctcagcctcctgagtagctgagactacaggcacatgccaccatgccttgctaatttttgtatttttagtagagacagggtttcaccatgttggccaggctggtcttgaactcctgacctcaagtgatcctcccgcctcagcctcccaaagtgctgggattacaggcctgagccactgagccgagtcctaaaattcttattctaaagagaatttggtaaataccatgagacaaaaaaaataccatgagacaaaccaaagactgctgtggcttccaaagaaatgggtgacgtttatttaaggatgctcaaaaaaggcatctgggaaatgtggcatttgagtagatgattgtgagcagggacgtagtgacctagagtggtagtggtcattggaattgggggagaagcatagaactgggaagttagagtggtaagggagttatcagtaggatgatgatgttctcaagggggcggcaaaggatggtgatgtcgaccacaacatagaccacctcagattcccttaaaatagtctcctttctgaatgacctggttgtgagaattaggcacaattttctaactggaggagactgcagatgtcattggtcttttggttttacttagaatggtgccatgattctaaatttgtcttcccgtgtggtttatgaggatgaaattataattgagatacattatgcatgatttcttattcaattttgtacaccttaaaattgtatttattcactcatcggtgtatttatttactaggagtagagcttttaggtgtttatgaaagagagctggcaagacatgaaaagagccgtcaggaactggctaacgctgagaaacttttcgatcttcctattacaatgtacccagagctgctgaaagtgcagaaggaaatgagtgggctgaggatgatttacgagctctatgaaggactaaaggtgagcatctccctgaaagcgaaggactcaggctcactgaaggggatgtaggaattacttaagccctgcagactttgatgccaccataataatgagcttgggtctgacgttgtggaaacgctcattttggccgcagggaagggggatggggagtgattgcttatgggtacagggtttccatttggggtgttgaaaaagttctggaaataggctgggtgcggtggctcacgcctgtaatcccagcactttgggaggccaaggcgggtgsatcacctgcggtcaggagttcgaggtcagtctggccaacgtggtgaaaccctgtctctactaaaaatccaaaagtcagccaggtatagtggcaggtgcctgtaatcccagctactcaggaggctgaggcaggagaatcacttgaacctgggaggtggaggttgcagtgagtccagattgcgccattgcactccagcctgggcgacaagagcgaaactccatctcaaaaaaaaaaaaagttctggaaatagatagtggcgctggctgtgtgacattgtgaaagtacttgatgccacggaattgtacattttatttttatttttgagacaaagtctcgctctaacacccaagctggggtgcagtggtgtgataataactcactgcagcctcgaagtcctgggtcgaagtgatccttctgcctcagcctgcaaagcagttgggactacagaggtgcaccaccatgcccagctattctttttttagttttagtagaggcaatgtctcactgtgttacccaggctggtctggaactcctgatctcaagcgatcctcctgccttgacctcccaaagtgctgggattacaggcatgagccattgcacccagcctggaattacatattttaaaatgattaaaatgacaattttttttttatgtattttactgtcatcatagaaaagaactctctttggaggtcaagggcttggttaaggcatggggtaaactgtttagttgcaagcggagattaaaagttgccgtgtcagcctggtgtggtggctcatgcttgtaatcccagcactttgggaggctgagatgggcagattacttgaggccaggagttcgagactagcctgggcaacaaggcgaaaccccgtttctactaaaaaatacaaaaaaaagttccgggcacagtggctcacacctgtaatcccagcactttgggaggcaaggcgggtggatcacttgaggccaggagttcgagactagcctggccaacatggcaaaactccatttctactaagaaatacaaaacttagccagatatggtggcacatgcctgtgatcccagctgcttgggaggctaaggcacaagaatcgcttgaacccaggaggtggaggttgcggtgagctgagattgcgccactgcactccagcctrggtgacagagtgagactctgtctcaaaaaataaaaataaaaaagttgcaaatgtcatgtcatttgggtgcctctcattggtatgtttcccatgcaaattcatgctattcattcatttatctattgacttagttctttatagctcagtgctgtgctggttggagtgtggggtccagaaaaggagtcatgtttgcccgttcctgcccttcttgagtccccaagggagactgactatgttagtctgggttcttgagaaacagaatcaataggagatatgtgtatctatatctatatmtgtctatatctaatctgtatctataacctgtatctatacctgtatctatatctaatctacatctgtattacattatctaatctatatctatctgtatctaatctacatatctatttctaatctatatctaatgtatatctatatatctgtgtctaatctatacctatatctatgagatttgtgatgaggaattggctcctgtgattatggaggctgagaaatcccatggtctgcagttggcaagctagagaccctggagagctgatggtatagattctagtctgagtccaagtccgaatgcgggagaacactgacgtcccagcttgaagacagtcaggcacagaggttgcattccaccttcctcagccttttgttcgattcaggcctgcagtggattgagtgaggccatccatgttggggagggccacctgctttactcagtcccccaatgcaaacgctcatctcactcagtatctctcacaaaacaccagcgtccacttgacacacaggattcacctttgcaccgatatgtgaacaaataaccacgcccccaagatatgtgctggaaatgaggtggacagagtcctgagcttgcagaggaggaaggagagtggcccaytggcccagggaatgctgctgaggaggtggcctgggagtgaggctcagaaccagagcaggcttttgcctggtgcagaacaaggctttccaggcagagcgctgggcaggagcagagacaggagatttgaagttgtgtcttgtgtccataacctttcatccagactggtggctttaccaaccatggatgcaccaggaaatggggttgggatgtgcgaagcggccggtggagatgaagccgtgagaagggactccggaggcagccgggggattgcaggcagggggtcctttaggaggtcactgccccagtgctggcagaagggatgggagcttgcattttaggacaattatagagggaatagagaggagagaagattccagagatggggtggaaagtgatgagacctggtgcctgcaccaggcaaaaaattcataaagttaaaaacataccgtcagcttttaaaaggaaaggtatcatgagaactgagaacaaccacacacatgtcaaaataagtggttttaaaatgtttaatttttctgggttcatagtaggtgtctatatgggatacatagatgttttgacacgggcatgcaatgtgtaataatcacatcacggggaatgggatgtccatcccctcaagcttttatcctttgtgttacaaacaatccaattatgctcctttagttatttaaaaatatacaatttttattgactatagtcaccctgccatgctatcaaatactaggtcttattcattctttctggtttttttttctgtagcaaaataagcatttttaaaaatccaatattgagacatagcttggtccccccagcctactctggtctgtggatgttaagggacatttcatcacctagagtgacttccactctccttgaaatttattttttcctagcaattgcttttcaaagttgtgtgctgagaagagtctcagtgacacactgggtggcttctgggaggctgggcaggggactgtcatcataatcccaggggatcctggggtggcagcggtgcaggttgggaagcatgggtggattctggatctggtttgcaggtagagtcagtgggacctcctggaggtgtggatgtgggatgtaagagcaagagaacaaggaagactccaaggtttttggcctgaggagccggaagagtggagtcactcttaagggaagactccaggaaaagaaggtttggggacgatggtgaacatctggaattcagggcaaggtgatgtctgctggacgttcctgtggtgatgttgaggaagcagcacttggatgtatttgtctggagctcagaggagagctggaggtgtgaattgggagtgtccaggtgcggaaggtactgagccaccagttcagatgggctcacctggtgccttcgtttcctggggctgccagaacaaatgattatgaatacatggttgtgaatacagaccaggaggctgaaaacaacagaaatgtatctcctcacggttctggaggccaggagtgcaaaatcaaggtgtctgcagggccacgatcactcyggaggctgcagaagaggcttcttcttgcctcttccagctcctggtggcttttgactgtccctggcgttccgtggcttgcggctgtgttgctcctgtctctgcctccctcatcacattgctgtcttccctctgtgcctctgtgtctgttttctcttcttatacggacaccagtcactggatttagggcccactctaatccagtatgacctcaccctaactacctctgcaaagaccctctttccaagtgaggcttcattctgaggttctgggtggacgtgcatttttgggggacgctattcagcccggtacacttgggagtggggttggtggaggagaggagcgaggtctgagcctgggtctctccaacattaaatgccatgagaatacatccctaaaaaaggaaagacgaggaagaggaggagtggcccaggtggtaggagaacaaacaggtgagtgtgacatcttggaaacgtgtttccaggaggtaggactggccaactgcaccagatgctgctgatagatcaggtgagaagaggatggaagattgatcacagtattgcatattgtggaggccactggtgactgcaacaagaaaaaaatcaatggagtgtggccgtggaagcctaaatggagcgagtccaaggtgtttacctgagagaagagaaagcatggtccttgcagagacttctgcatgaatgttcataaacagcattgttggtaatagcccaatactagaaacaacccaaatgcccattaagtgaatggataaataagctgtggctcatccacaccacggaatactactactcagcaaggtagaggattgaaccagttctcagcgcatccacgcaacaacatgggcgactctcagaatcgtcatgctgagcgaaagaagccagatacagaggaatgcatattgtattattccattcataaaaaaccctggaaaatgcaaacgaatttatggtggcagtacacagatctgtggttaactgggggtagggacaggaggagagagatgggaggggttatgacacagggaaatggggcagcttttgagggtgatgaatgagtttgctatcttgattgtggtggtgctttcacaggcatgcacacctgtcaaaactttgcagattgtacctttagttatggacagcttattatataccagttaatcctcaataaagctgttagaaaaacaggccaggtgtggtggctcatgcctgtaatcccagcacttggaggctaaggcaggaggattgcttgagcccaggagtttgaggccagcctaggcaacctagcaagaccccctgtctctgcaaaataaaataaaaaatatccaggcctggtggtgcatgtctgtcgtctcagctactcaggaggctgagatgggaggatcacttgaggccaggaggttgaggctgcaatgaactgtgatcacaccattgcactacagcctgggtggcagcgagaccctgtctccaaaaaaaawaawaataataatttttacattaaatctcaggaaaatataacacagaaaatcttctctttacaatcatcaagtaggaacatgtttttcctcacttcttagcctcaacctgatggtttgtaaacagattcttggattagtgatctagagtgtaaatattttgtaaccttagctgctttcatcagggaaaagaagcaagctatgacagcacctgaatgaagtacatcctttaagacccacgcaactccctgatttaaaaaacacctgttaattactttatacctctcacttttgtctttagaaagggaagatgtatttctggatcccacacatcctcagatacagcattatttttgcaaaagcttacaaaaagtggaattcttttcttgttgttttagatccttgtagtcaacctcttgtttgtgaatttcaggtagttgtagatagatgggtaatactttaaaatatctgaacgtgactaagagtcaagaacttgctctccttgttgcatttccaaaggggtctttgttgatggagctgttccttgcacgtttccaggttgcaaaagaagaatggtctcagaccctttggatcaacctgaatgtgcagattctccaggaaggaattgaaggttttctcagggctctcagaaagctacctcggccagtccgtggcttatcagtgacctactacttggaagcaaaaatgaaggcattcaaagactcgattcctttacttcttgacttgaaaaacgaggcactaagagacaggtttgttttgtcctctgtccgcagatgtaaaagtgtgggaggagcttttagttaaaattgtttccctcagtacattatctttggtctgatgatgaagcacacaatttcaacaatgccgcagggctatacatgggcacgacacagttctataatgttgtttctatgtaaagtgtctgtaaaactgtcaaccacaggattcttttaaaaaagaaagatcccagcaggtgcaaagtggcgtttgcagttgcttttctcgaagatttaaaaaactatagtaagtgaccttgatcagccccatccagcagacatcaaacggaactcacatatgtaatttacagttttttagctgctacagtaaaagagtaaaaacaggtgaaattaattttaatagtatattttaattaactcaatatatcccaaacattatttcaacatgtaatcaacatgaaacatttattcatgagatattttacattcttcttaaaaaatatgtcaaagtgcaatgtgtattttatatctatagcctatttcaacctgggcttgccccgtttcaagtgctccatagacacgcgtggcttgtggccaccatactgatgggatagccagccctgtgggtgggacagagggggcatgggtctgtgtttatttggtgatggcaccacacagacacgaattaggagttacagtcctcatttgtgagttatgcttctgctcgtgttcctctattcctcggtcatgttttccaaagtgtggtcatctagtcatgccatgacatcaagtgacttcattttccctagtgagaaagtcatcccttctttggttcccttcctatccttgagttcacactgagaaagtctctcgtaagtgctggcttgttttcaacacctgttacatctgtctctccctctcaacaaggagcaggcagccctcaggccctggtgacgtggagtcttagccctcttttcrctgtctgctggcttccctggagcactcacctttacctttgcaggcttcagtttcctcatctgtaaaactaggtagaagtaggcattttctagctaaagttctcggttttataatcccataacccagtgtttctcaaactttggtcctgtctcatcatttttgtcagatctgagtatcatctatgctgtcatggctttatatttttcttcctatcagtttcttttttatggaaatgaatgttattctaaaaataaacttccaccaccactgtaaagagaaaaccaaaagctcttgccagaaatagaaagtaattattaaaaaaaaaaaaactagctcaaaacagtcgcctgtctctgagccagagaccttcgctctaagaaaggtgaatgaccctggggagggactgaggacacagcgtaagaattaaagaaagaggaaagaaacacaaaaggtggcttgccagtcaaaacaggtttattttagagaaaacaaacctgagaggggattctggccaagttaggtcagagccacactctcttagagactaagagtttttaaggatttagggtgggagagcttatctgaggcttggactgcttctgtgtctctctgttgtgcttatctgggagggagagttgtgtgtctattcccattcatttttctgcagcagcaggcatactcgccgagtctgcttttagctcccctatcttagtgcacctgaagggaaaggaatgttcttattaaggtccactgttttactgggacccattgtataagggtgaagtttggcagttacccaagagacttcctcctctcctccctctgtgcctgagctgtcttgtctatgttttcctgtctgctctttctggtggcttgtagttagaagataagtgatttccttaaaatgcatgggctggaaagggagctggaccttaaagtggtggtgtttgtccaagatgaggttgctcctgctctgtcacacagaagcacaaagaggagactttcccttcgatgtaatttactgtaattgaaaggactgggcgggaactggagagggaatcactctctcccagtgactcagggctgagttatgttgagtgtggaccctctaatccaccaccagggttatgtcacaggctggccccaggtccgctctgcccacatgcagtccatcaatcgccgtgacatgggttttgcgaaacagatttatttgcaaggccgccaagcaaggaggcaggtgagcagccctcacatctgccttcctgaagataaggcttagggatgtttaggcattaggggagtggggtggtcgaagtygagggggaaggtggttggtggtgggaaaaaggaagtaacaggttcattctgagcaagtgtagctggggttcacagcatttcacaggacataggcacagaaagtgggggcatcggcatggcctgagggtagagtgtttggccttccaacgtcaaaaaggccacctctggggcacttgcacaggcccagttgaaaggtcagtggtctcaaccagttggaactggacagaggagttggttcaacttcctgaaaaacaaccaaagtcaccatcgccatcgtggcctgtgaatgttatccatagtagccagtgaaggttaagtttcagcgttcagtggtgagaccttcagcttcatgggaaaagggggaaaaaaataaaaagcaagtgaccataagccacagagcaggcactgatgacccttacccttcagtttcagttctgacaccctccttcctgtccgtgctgtgctaggccagggggttcagagaccgatgaaccagtagggcctcctttctgaccatttccatggccgtgtgtgtgtgtgtgtgtttacaacactcagtgattcaacacttgctgctcacgtgctgggtacgtggcgttctgctgtctagcgtcatgcttagctgccttactcacacccattccatatacacagaactaaaacatgggcaaattcacaggccaaatgcaaaaccttaaaggaaggccagtcaggtgaagagcagagctgcccccgttgtgtctgtgtgcacaggagtctgccccgactgtcccgtctgaatgggccccttcatacctcctctggcacactgcagttttctcatagtactcaaaaccctatgtcattatttaatttatagatttgttgattgtttgttgtttgtctccccaagtaagtggcaggttctctgaagctaggagccttgcccttgataactctgtaccccagtccactgcctggcacggagtcagcactgaaatatttatcaaatgcacgagagctcataatttacatgaggctctcaaaaaggctgagtgattcaacagaggttgaggtcattggttgagagactatgacagaagccgttcccaataattaaaagttgtgtattttatgagaaggccgtgaagactagtgtatagtgtatacagtattttgcaagatgttgttttccggtttaactctggaggccagtgggattttggagaactttgggaatatatttctaatgatgtcctcatgttgcagaatttcattataagaagtttacaaaatgagatttgtcctgtgatttaaatgggagtaattgaactcctcactaaattcagtaagcataaagatttgaatgctgatgtgctttcaggcattggaaagaacttatggaaaaaacgtctgtcttttttgaaatgaccgaaacgttcaccttggaaaatatgtttgctatggaactgcacaaacacacagatgttctcaatgagattgtcacagcagcaatcaaggaggttgccattgagaaggtaagacttcagttaaaaacaggctggagaaaacagtctttttttaattcaaagagaaaatagggagaactcatctatactaaaaaaaaaaaaaaawtagctgagcgtggtggtatgccattactcccagcttcttgggaggctgaggtgggaggatcacttgaacctggaaggtggaggctgcagtgaactgtgatcgcaccatggcactccagcctgggtgacagggtgagaccttgtctcaaagaagaaaaacaaacaaaaaagagaaaacatatttgctctagtacctgctgtacttcagtaataaagaattatttgttgtagaaatagaatttccttaattaaattttttgttgttcccaattgtagtttcattttccattgtttaaaaaaattttttcttattgtttcttatttatttattttgccattgatttttaaatagatgtaatggatgttcatggtagaaaattgaaaaaaaattcataatcccactacctgaaaataattattaactttttagtgtatttctttgcctacttaaaaatgcatgcacacatgtatacatatgcatacacacatactactcatatatgtgcacatacacccatgcatttgtatgcactaacatacacgtacacaggtacacacatacacatatccctacacatatatgtatatagtcaggtgtcacctaatggcagggacacattctgagaaatgtgtcctgagttgattcgtgattgtgcaaacaaacctagctgggatgactactgcacacctaggctattgggtagaatctattgctctagactgcaagcctgtacagcaaggaactacaytgagtacggccagccattgtaacctaatagtacgtgtgtatctaaacatagaaaaggtacagccaaggccgggcatggtggctcacgcctgtaatcccagcactttgggaggccgaggagggtggatcacgaggtcaggagatcgagaccatcctggctaacacggtgaaaccccgtctctactaaaaatacaaaaaaaattagccgggtgtggtgccgggtgtggtggcgggtgcctgtagtcccagctactcgggaggctgaggcaggagaatggtgtgaacccaggaggcagagctgcagtgagccgagatcgcaccactgcactccagcctgggtgacagagcaagactctgtctcaaaaaaaaaaaaaaaggaaaggtacggccaaaatatggtctaataatcctatgggaccaccattatatatgaaattcatcactgaatgaaacatccttatgcagtacatgactgtacatagtacaccacacatgtatacacacgtatatgcatgtagacacatatgcatgcaaacacacaaaatatacatacagtgtgcacacagtgtacctaacatatacacataatgtatacacacatgtacatatgcacataatgtacatacagtgtacctaatatacacacgtacacataatatatatacatgtatacatatacacataatgtacacacagtgtacctaatatatacatgtacacataatgtacactatgtattcgtatacacacgatgtgcacacagtgtacctagtatgcacacgtacatataatgtacacacatatacatatacacacaatgttcaatgtacccaatatacacaggtacacatagtatatacacatgtatacatatacacacagtgtacacaatataccaaagatacgcataatatacatataatgtacacatgtacgtatgtatacacatatacatatgtatcaatacagatttttttttttttgagacagggtctccctatgttgccaaggctggtcatgaactcctgggctcaagcagtctgctcaccttgacctcctaaagtattaggattacaggcatgagccaccgcacccggcctcaatatagattttttgttttgaatatggaatcataagaggcatatcattttgtaatttggtttttgtgacagtagagtaagcacaggggcagaatctcataactgtgcagacttcgggggcagactgtggggtttagaccctgtttctggggctcagtagctgagcttcatgtctgagccccagttgccatctctgtaaaatgtgggtgataataatccctaccartatactttgaggtatttgctttgaggactgaatgagatcgtgtatgtgacatgcttacctgccacatagcgaatgcttgataagtggcaattattaccatgacagaatcccaacttttcaggaaacagacccaggactccgattgcattgttggccaaaagcaagctaaggaaggtgtttttgggttggggctcggtcctttcagttcgtgtgcctgaatcattctttttctattcctgaacaggctgtgaaggaaatcctagacacgtgggaaaatatgaaattcactgtagtcaagtattgcaaaggcacacaggagcgaggctacatcctgggttctgttgacgaaattattcagtctcttgatgacaacactttcaacctgcagagcatctcaggaagcagatttgtggggccttttctgcaaactgttcacaaatgggaaaaaacgctttctctaataggggaagtcattgaggtgagagaaaagatgaacaaaagatggattagagccagtgcatagcagtggcttttatatgaggatattttgtgcttagaacttttatatgaggatattttgtgcttagaaacaaatgatcctctttcatacttttttgtcttgwtttattttgaggacaagagtgcatgatcaaaggaattgatctgaatttttattttagtgaatgattttcatttccaagattcctaattgcttctttttcatatatctctgtttttctttgatactgtcctgttcttgttgcaaggatgcttttgcctccttgatgacactgaaaattagaaacatacttattttacattccttttcgatttctctacactttttaaaaaaatgtctgttgactctctcttgtggtggtggattttcctctgtgtgattttgatttttttttctagctcatctcacatgtagtttttttcttgtgtttgcttcactttgtcatctgtttttgcagcctctttaacctgaggcctgtcacactgggaagtagcaaggtcttatagtaggtggtttggggctttcttccttttgggcaatacttatccagacctctgtgagcaacccaggctcactgcaccatttttgtgcagttgcctttttttcctccccagaccacaggcaagcaccttgtttttggccacaatccaagccttgggtgggatgaagccaggcctggttcactggccaactgtgtgatcaggcctccatcatgcctgggcttcctttccttgcttttttgtttgtttgttttgtctatgactttgtgttagtggaagctcttatgtgggatatagcactgttttttaatttgtgagtaaaaaacaatttttttttagatggagtcttgctctgtcacccaggctggagtgcagtggtgccatctcggctcattgcaacctctgccagccggattcaagtgattctcctgcctcagcctcccgagtggctgggattacaggcatgtgccactatgcctggctagtttttgtatttttagtagagatagggtttcaccatgttggccaggctggtcttgaactcctgacctcaagtgacctgcccacctcgggctcccaaagtgttgtgattataggcatgagccactgtgttcagtcaaaaaaaattttctattgaggtaaaatttaaataacataaaactagtgattgtaaagtgcacaattcagtgacatttagtacattcacagtgttgtgcaaccaccacctctaattccagattttcatcaaaccaaaagacaagccagtaccccttaagcagtcattccctaccatctcctcccccagcacctggcaacctccagtctgttttctgtgtcaatggatttacctattttggataattcatataagcggaatgacacaatatatgatcctttacgtctggcttttgtcacttagcgtgatgttttccaggttcttccatgttgtagcatgtgtcagtgcttccgtcctttttatggcccaataatattaaatcatgtggattgatcacatgttgtttttctatccattggctgatagacatttgggttgtttccaccttttggctattgtgaacagtgctgccgtcagcattcatgtacaactacttgagtccctgttttcaattcttttgggtcaatacctaggagcggaattgctgggcacatggtacttggctcactttttgagtgtctggcatggcctgtccttcgctgttgtgggtcacaggcttcaccctcttctcataactagaagttttcctacctgtgctgggctgcatggagagctttcttttgcttttgagtgtggccgttagttatgctttccccagcattcccattcatttggagtggaggggagctggccatgcagatgctcactctgtcaccttgcctggaaggtcctcccacctgagttgatttggktctgtctcatgtcaggatggggctttgccatccacttttggaggtatctgataacccctgctgacactgaccttttgtacatttacagatttggatgttggttcagagaaaatggatgtatcttgaaagtatttttattggtggagatataagatcacaacttccggaagaggcaaaaaagtttgacaacatcgataaagtatttaaaagggcaagtgactcgcttctattttagtaatgaaagaagggcagcgatttgagatatttgtacctttttatttgcacattgtattttctccattagtagcttctctctcattttttagagacagggttttgctctgttgcccaggctggagtgcagtgatgtgatcrtggctccctgtagccttgaacttatgggctaaagagatcctcctaactcagcctcccaagcagctgggactacaggcatgtgctgccatgctcagctaattaaaacattttttatagggataggatcttgctatgttgtccaggctggtctcaarctcctagcctcaactgactctcccacattggcctcccaaagcactgggattacaggagtgggtcaccttgcctggcccactagtagcttctgaatttttcgtgtcattatttatgaccctaatctgtctagtaaaaattcccatttgatttttagctgctggcatatgacactgaatcttttttacatttattataaaagcaatatttgcttgtttaaaatattttgaaagtgtagaacagtggaaaaatgtatctctcatggttctgtcactttaatgggaccactttaacatgtcaatatattccttttatctttttcctatgtgtataagtttaaaaagcataattgtaatcatattgtgtacaactttatatcataattttctcttaatattatgagaaacagttcatattaggaagtcatctgagaaaataatttcatggctctctatattccagggagtgggctgacattagtttagttgattactctccagtaatttgacattttgtttgaacagagttctttgctttcataaataatgtacaggttcttgcctaatgctttttccatagttagagtgaatgtcttaagatagattgttagaaagcaaattgcccgtgaaagggtgtgtgtattttaaagtcatttccaaaaagggttggactggtcatcacagtgactgtagttagtgtggctgggattttaacccagctctcctgctctcaaagcccgggtattttgctacttagctttgctgctgtgttctttaattataggtggccagttcatgttttgatctcttttatccactagagtttataactgtttcatataattgttgcataagctctttttttaaacttaaaagaattgtacaacacatatcaggctggacggtgactcacgcctgtaatcccaggactttgggaggccgaggtgggcgatcacttgaagtcaggatttcgagaccagcctggccaatatgatgaaactctgtctctctctctttttttttttttgagacagagtctcgctctgtcgcccaggctggagtgcagtggcacaatcttgactctctgtaagctccacatcctgggttccggctgttctcctgcctcagcctcccgagtagctgggactacaggtgcccaacaccacgcccggctaattttttgtatttttagtagagacggcatggtggtgtgcacctgtggtcccagccactcaggcagctgaggtggcagatcacttgagtcggggaggtggaggctgcaatgagccatgattgtaccactgcgctccagcctgggcaacagagccagaccctgtctcaaaaaacaaaccaaaaaaccaactccagcagcatttcagtcttaaccctctgggttgaacctcatggcaaagggaaccagggaggaccgaaggcggttctaaggcttacacggggagcccctgcacacccagagggctgaccttgatcatgtgctcctggacgcagagtgggtcgctgctccccagaatgctaagcaactcatcgtcagaaatgaagaaaaaccttgggaaagcatttctcttcgaatctaagtagtcgttgaggcttttctggcatttctccaggccctcgctgacgtttnnnnnnnnnnnnnnnnnnnncttctattttagtaatgaaagaagggcaccgatttgagatatttgtacctttttatctgcacaatgtagtttctccattagtagcttctctctcattttttagagacagggttttgctctgtcgcccaggctggagtgcagtggcacaatcttgactctctgtaagctccacatcctgggttccggctgttctcctgcctcagcctccgagtagctgggactacaggtgcccaacaccacgcccggctaattttttgtatttttagtagagacggggtttcaccgtgttagccaggatggtctcaatctcctgacctcatgatctgcccaccttggcctccaaaagtgctgggattacagatgtgagccactgtgcccagccggtgaaactccgtctctactaaaaatacaaaaaaaaaaaaaaaattagccaggcatggtggtgcatgcctgtaatcccagctactcgggaggctgaggtgggaggatcgcttgaacccaggaggtgaaggttgcagtgaactgagatcgtgacaccactctagcctgggtgacagagtgagactctgtctcaaaaaaaaaagaaaaaagaaaaagaagaattatacaacaaatatcaattcattacagaatactttagaaattacaaaaagccaagaaaaaaaagaaaggaagaaaaaaatacctataatccccttgcccagggtaaccattttaatagttgagcatatatctttccagaacatttattcctgcataaacatacaaatagatataaataaataaataacattctacaaaatatgattgttcttttttttttttagagacgaggtcttgccttgttgcccaagctggagtgcagtggtgtgatcatagctcactgcagcctccaactcctgggctcatatgatcctcgccttggcctcccaggtagctgggactgcaggtatgcaccaccacacccggctaacttaaaaaaaaaaaaattttttttttttttttttagtagagatggagtcttgttctgttgcccagtctggtctcaaactcctggtctcaaacaatcctcctaatcctcctgtcttagtctcccaaagcactgggattacaggcttgaaaatagaatcattcttaccaatgtcactggctatttttattgaacagtttgacctatttcaataaataaacattgaaattatcactcacagcagatgattgacctgttgctggacattgaggctatttctttctttttctgctatgatgaagaatgctgcagtgaatattctgtatatacaaattgctcacagtggaattgccagcttcctttactcagcaagtgttgaatgggcgcctactgtgtgtaagcacttctgtagggtggggtggggctcatcagtgaacaaaacaaaaaaatcctttccctgcgcagctggccttcttacgggataacgaaaagaaaaaccagaaaccagttagttacatgtagtacattagaaggtgctaaggatatgcatgtttaaaaatgataaatggatcccctgaaagccaatggcactgggcagcttgtcagttttgtctcggccgtgcctgggctctggtgagtgcctgttctgggctcaagaacagtgtctccgctctccctgctcaccctgcttgacggctgtcctctgttctggtccagatcatgggygagaccttaaaagacccmgtgatcaagaggtgctgtgaagccccaaaccgcctcagtgacctacagaacgtcagcgagggcctggagaaatgccagaaaagcctcaacgactacttagattcgaagagaaatgctttcccaaggttcttcttcatttctgacgatgagttgcttagcattctggggagcagcgacccactctgcgtccaggagcacatgatcaaggtcagccctctgggtgtgcaggggctcccygtgtaagccttagaacygccttcggtcctccctggttccctttgccatgaggttcaacccagagggttaagactgaaatgctgctggagttggttttttggtttgttttttgagacagggtctggctctgttgcccaggctggagcgcagtggtacaatcatggctcattgcagcctccacctccccgactcaagtgatctgccacctcagctkcctgagtggctgggaccacaggtgcacaccaccatgcctggctartttttatatattttttggagagatgaggtctcactgtgttacctgggctggtctctaactcctgagctcaagcaatgctcccacctcggcctcccaaagtgggattacaggtgtgagccaccacactcagccctcgagttttaatttgaagtgtaagcctgatgatattcactgagtctgaaatcacaccagattcagctatttttccacagtccaaaacctttctttttataaactaaaaaaaaaraaaaaacaaaaaaaccagaaatatatgaagactaatatattaaatagggaggcattagaggatagtggtttagcacatggactctagaaccagattgctggggttcaaatctttgctctattctgagtttctgtgtgatcttcggcaagttccttgatctctctggacatcagtttcctcatctgtgaatggacataaccccaatggttacctgtttcagtggagctgttgtaaaaatgaaatgagttactatttataaagtactttgaacagtgcctacctttcaatgttggctaaataaccctctccactacccagaattggcacttgttaccatttagtcatatttggtttgtctcttttttttgtaaagttgtacaaatttgcaatactttttgtccccatccccattcatacttcctctattttcttttctattttttttttttttttttgagacagagtctcactctgtcgcccaggccggagtgcagtggcgcgatctccgctcactgcaagctccacctcccaggttcacgccattctcctgcctcagcctcccgagtagctgggactacaggcgccagccactgtcatgaatttgttatgattccttccagaccacaatttcacactttttaaataaatgtatatgtatccatgaaccatttcctgaatggcgggaaacaacagagaacactgtcccttgtgatagagaacagaggctggccagacatgatctttggcctgctaatcaaagctctttatctagcgtcagcctgggcaggggctctgagcctcggcgctgctggcatttggggctggatgactctttgctgtggctgctgtcctgtgcattacaggacattacgtagcatccctgaccacaacctactagatgccagtagcaccccctccctagttatgacaaccagaaacatctccagacattgccaatgtcccctggtggcaaaatcatccccggctgagaatgagtgttgcacggtaattcctccattccaaattaacagagcacttaggaacgagtgctttctcctattactttccctttaatcaatgctaacttccttcttaaagtaagattcatattttcgactgcatatttttcctttctcaaaggggaggcttcttcagtattctgtttccagtttttttttttttttttttttttttttcagacagggcgttgctttgttgcccaggttggagtgcagtggtgtgatcacagctcattgcagcctctacctcctgggctcaagcaatccacccgcctcagcctcccaaagtggtgggattacaggcatgagctattgtgcctggccttctgcttccactttgtaaacacatattttactgttgtagaaaaatacagtgttaggaatacttcatttactgttcgcctcttttgcaaacctctgtttttattctttaaagcctgtttgttgccttcctctcctctctgatttgtgagtgccttgtatatggtgggccctaaaggactcattgtcctaaatgttattctgattaataacaatgataatagtcaacaaatgccaagtgtttaacaacatgccagcatttgactcagattgtttcatttgattctcccaagcccaccttgttaagtgccatgattgtgtttattccaggcagagagaggaggagcaactcacccatagttgcgcaattggatagtggggaatctgggattccatcacaggtctctgttccccagcctggggtgttaatcacccttccgcctcctccacgttccactggctcctatgtccagatacctccccactccagcagggttagggacagagtctgctttttctttctcttttcaatcctccacagatctttgcacagtacagagtaaatgaaaatccccaataagtgtctttgggatgaccacacaggtgggtgaacgacatccatcttgcctgcgatctcggctcaccggttgccattgcttgcatcgtggcagctctgctggatggagcaccgctggctggtctttgattccagaactccgtgcaggtcttacagggctgcctctccctgtttgcagatgtacgacaacatagcatcactgaggtttaatgacggcgatagtggagaaaaactggtgtccgcgatgatttcagcagaaggagaagtcatggagtttcggaagatcktgcgggctgaagggcgcgtggaggactggatgacggcagttttgaatgagatgagaagaactaatagactaattaccaaagaggctatttttagatactgtgaagacagaagcaggtaaggctgcgaatgtggacatgcattgctctatccaattcatagtcataatggattaattttaaaggcttggagtagattggctgacattccaaatgaggttttgtttttttgcaataggtcattagtggacagatagatgtctttatttttatttttttgagacaggatcttgctctgtcacccaggctggaatacagtggtacaatggctcactgcagccttgacctccctggttcaagagattctcccacctcagtcttcagtgtagctgggactacagttgtgcactaccatgcctggctaattttgtacttttttgtagagagggagtctcactgtgttgcccaggttggtctcaaactcctgggctcaagtgatcctcccaccttggcctcccaaagtgctgggattacaggtgtgagccactgagcccgggcagtctttagcatatgtgctgccaaagcgagcacaagatagcagtctttcaatgatcacccgatgcagtactctcaaagtgtgccccctggtggcagcacagggcccctgggattgttagaaatgctgattcttgggtcttaccctgcacctgcccatcagaactctgggggtggggcctgaggatttgtgtttttgcaagctctcaggggattcccagcacccttagcgtgtgaacccctgacttagtgaaccaccagaaactaggcgtttagtgggattatgtgtatgtaacgttgtttctaaaatatttactgaatttccaacattctttgatttttgtggctagagaggcttcaggatatcatgctgagccctgcctgctcctagcagctgagtgcagtccaactagaaatacagaaagcctctttggctaacttattctattagattagacaggatcccccgtaaagttggagaatatttggcagggccttcgtgcagacatagaatctttcttgttattatgagaacaccattctcttgattttgtacactgcctttttgattttacaaagtgaaaacatctacttaaaaattattagcgaatagcataatatttatttgattatgatcctgctgtttccgaggtactgaggcatatcaaaaatttgtttgcatctttatgtggatatgttcagtggataaactggtaaaactggatgtctggaaaaaatttttttaaagctttgatttaaagcagttgccaatttccatggtgcaaatattcctgccatggctgatttcaaagctaaatgaaataagtggtttaacaaccagcttgcaaaattccagaatattcgacagttagtcttgtgacaggaggtggccctagcattcatttaactaatatttcttcaacccctgctctgggcgatttattatgctagatgctatttcaaaactgaactagacagaaatctctgccttctgtatgtattaatcactgaatgttttaaattatcttttctgctccaaaatactgtgaagtttacaccagcatcagttgattttattttcacgatagctaccactttgctagggcattgctatgtttggtagtgctgagttggtggaagagagtaagggaatgcagcctgatggactgaaaaagatctttttctcatccagatgctcctttgagcacgtgaacttgttgcttccaacagggagaatagttgacatgagcatgtggttttatttgagctgataggtgtggcatcactgagaagttagggccagctgtatctagtcccaggaagcacctttgccctggtcatttaatcttctctgatcctatggcctcagctgccacctctccgtttctgattctaggtttgtcgcgtcctttacaaggcccgtctttgttcatcatttcggtgtcgtcctctgggccttcgtaatctttgttgtctctctcctgatgtgtaggaatcatggatataagtgatctttaggttttcgctgcaccacacaattttaaaataaaacaacaaaggtcaatgttatttttattgcttttcctacttatttatttatttatttatttattgagacagagtctcgctctgtcacccaggctggagtgcaatggcgctatctcggcttactacaacctccgccttccaggttcaagcgattctcctgccttagacttctgagtagttgggattacaggtgcacatcaccacacccggctaacttttgtatttttagtagagacagggtttcgccatgttggccaggctggtctcgaactcccgacctcaggtgatctgccggcctcggcctcccaaagcgctgggattacaggcgtgagccaaagcattcggcctcctactcttttaaatttattttgccattaactgtaggtcatcaagataatgactatagtaatccgcagtcacttttccagtattggcattgtattactgtgttttcacactgctatacagaaatactcaagactgggtaatttataaagaaaaaggtttaattgactcacagtcacgcatggctggggaggcctcaggaaacttacagtcatggcggaagacaaaggaaaagcaagtacctttttcacaaggtggcgggaaagagagagagagaaggaggaactaacaaccacttataaaaccgtcagatctcatgagaactcactcagtatcacgagaacagcatggggaaaccgcccccatgatccagtcacctcccaccaggtccttccctcaacacctggggattatggggattacaatttgagacgagacgtgggtggggacacagagccaaaccatatcaggcatttacagctctgagtccattattttttaagtgcagtttagaaaaaaagctttgtctaaatgtgtctcaaggcaatcacaagctttgtaagttagtgcctctggagaggacatccaagtggccaataaacatgaaaagaggagaaaccccacgactcagcaggatctgtacattaagggaggatgagatgttttgtttcacttttcagactggcaaaaattcaaaagcgtgttacaacctggcctgcaaacctgggcagtgtggtcagagattatgaaattctttgttggaattttaattttctttcttgagacagggtcttgctctgttgccctggccggagtacagtgatgcgagctcggctcactgaagccttgagttcctaggttcaagcaatcctcccacctcagcctcctgaatagctgggaccacaggcatgtaccaccacatctggctaatttttgtatttttggtagagacaaggtttcgctgtgttgcccaggctggtctcaaactcctgagctcaagcaatctgccccagcttggcctcccataatgctgggattacaggtgtgagccaccgtgcccagcctggaatattgttttacttcttacataaacctcaaatactaagtaagtttgaaaacctataatcaaatattttattttattttattttttagagacagggccttgctctgtcactcaggttggagtacagtgcacaattgtagttggctgcggcctccaactcctgggctccagcgcccctggagtagctgggactacaggcatgcgtcattatgcctggctagtttttaatttattttttgtagagatagggttttgctatgttgcccaggctagtcttgaactcctggcttcaagtgatcctcttccttggcctcccaaagtgttgggtttacaggcgtgagctaccacgactggccccaaacatttaaaaagtgatctggcatctttctgtgcagtcaggtacctgcaacattttttgtggagagaggcaccctcggcctggaattttactacctagtcggagataggtaacatcttactctcacctaagtcttactcctctgacttacttaggtaaacaaatacaggcacttgcttacctaaaacctttactttgccctccctattccagatcaaagaaataaattcctgaagggactgttttgggtaccagtcccyggattgatcagagcctcttacaggtgtgcgttttctgcagagtcgactggatgctcctgtaccagggcatggtggtgctggcygctagccaggtgtggtggacctgggaggtggaagacgtcttccacaaagcgcaaaaaggggagaagcaggccatgaagaactatggcaggaaaatgcaccggcagatcgatgagttggtaaygcgcatcaccatgccgctaagcaaaaacgacaggaaaaaatacaacactgttctcatcattgatgtgcatgccagagacatagttgattctttcataagaggcaggtgagcattttccggggtcactgrcatttcaaaagggaccctttgtggtccgctgatctgtctcaacggtttccacttcctccacctttcttgccgtccagtatcctggaggcccgagagtttgamtgggaaagtcagttgcggttttattgggaccgggagccggatgagctgaacatccgccagtgcacgggaacctttggctacggctacgagtacatgggcctgaacggcaggctggtcatcacgcccctcaccgatcggatttacctgacgctcacccaggtgactgccagcctggcacttgtgkttaccacttaccttggggcggggcattttctctaagcttgaggtgtgatgactgcagtgattgaaatagcaggggagatcattgctttgaaatctcgaaaagcttttccatttgggatgtgaccagattgtcaccatttgggattggcatgtaagtgtggccgtgcttagccactggtacactggtccctaggtaatggtgtgtcaggggtattggtagaggccaatgcgaaaatgcaggaatgtcaaaggtggtgactgttagggcaagtgtgatgtggttttgcacgtcttgtgacagcttttattccagaatatatccgttcaagtgaacggccttggatgatagagatagtgtctccctccaggacagagggtaaacttgtttgttgtacaggaaatgaagataacacttccatccaggcagagcttgggaaggtttgcaagcaacccccaagactgtttgtcagatgcttgctagttttctttttttaaattagagatgaggtcttgatatgttgcccaggcttgccttgaactcctggcctcaagtgatcctcccaccttggcctcctgagtagctaggactatagcattcactgctgcacctggctacattggtggtctcttaggctcacagtttctcagctgtgactcatacccactgtggatgtggcatgcacctgggcccgtctccacatcacaccatgggatttggggggacaaggataaagggaatgagtgagaacaggaagcccctgctgcctcctgtgctgtgagtgataaagtcctttgtttttgagaaaaagagtgtcatcttatctgtattggttagggttccacagagaaatagaaccaataggacatagctagctagctggatggctgtctgtctgtctgtgtatctatctatctatctaatctatctatcttatccatccatccgtgcatccatccatctacatatccatccatccatccatccatccatccatccatccatccatccatccatccatgtatctatccatccatccatcctattatctatctatctatctatctatctatctatctatctatctatctatctatctatccatccatccatcctgtctatttatcatctcgatcatctattttatctatctatctatctatctatctatctatctatctatctatctggatatttaggaggagatttattatgaggtattgactcatgtgatgatagggtctgattactctcacaatctgccatctgcaagctggaggaccaggaaggccagtagcatttgaagttctgacagtgagagagccaatagtgtagactcgtgtctgggtctgagggcctgagaacccgaagtgccaagggtagaagcccagtgccctggctcagtcagtcaggcagcaccagtgtaacctccctccatccttctgttctgttcagtcttcaatggattagatgatcaggcagcaccaatgtaacctccctccatccttctgttctgttcagtctttaatggattagatgaggcccacccactttggggagggtcatctgcttttctcaaatgctaatctcttcctgaaacacactcatggacactcccagaaataatgtttagccagctacctgggcatcctgtggcccagtcaagttgacacatgaaagcaaacaccacattctttctctattctgcacctatagtcacagtgatgaatttggaaatgacacccacttccttctgtgcaccagaaaacatatgttttgcatttggcttataacaggcgctgtccatgtatctaggtggggcccccgccggcccagcaggaaccggcaaaaccgagaccaccaaggacctggcgaaagccttgggcttgctctgtgttgtcaccaactgtggcgaaggcatggattacarggtaaggcctggctgtcacctttggtactggctcattaggcagagagcttaaagcaggacrtggcatttcacctcctagtctttgacatgrcgacagtggaagaagctagtagaaaaccttccaccaccacagccccagaacctaagtgtgtctgcttaaagaccctgctttgttagcaggatgtagagcaagagtcccggattcactaccctagtagggtcaggtwgataatgtacgtgagtaaagcggccagcagacaagagagtggtgggatctgtggctaactggagagcaaaagtccatctaaagagggtgcccgtccagctttggttcataatcaccatttgggaaagtggacccagcattgctagattttcccacatttcaagagaagagaagagaaatggagttttacacaaaaatctggatttgtaaaatcccaagtaggagccagcccatgaggggccttggaagtcctgccagaaaaatccactagtcaagtggctggtcacctgcttctctgccaatcagtgatctcattgtttgctttaatttagaaaatatatccataaatgtgttgcttgcagttttaaagatgaaaattgcccttgtcctgacatgtctttcttcctaggccgtggggaagattttctctggcctggcacagtgcggggcttggggctgctttgatgagtttaatcgaatcgaygcttctgtgctctccgtgatctcctcccagatccagacgatccgaaatgctctgatccatcagttaaccacgttccaggtgagacacatgaagcccccgggaccatgtccctaggatggaagtttgccaagtatggtaagcttcctctgtagcgtcagtttctgggccgttgacactccagaccaggcttcctgtagaagatctgttggtttttccaattgagatgattgggtttccaaaattatcatcattgatgataaggtttgtaatagtccaaggacttcacactgactccagacacagaaccaatagttatgaatgggcgtggggcagagttctcaaataagtgatgtgcagggtcccctagaaaggaaacaatattcttggcgacttcccaagtttgagaaaacctgacttagaaagcgaatgttccttgcaatcattatcacagtgaacaagaaattttgccttcatagcttgtgaagttacggcatcataacaagcaggatttgcaaggttatcaaagtgagaaggcagaattttaaaacaattgttgagaattcaccaatttctctctgccaaagaatatgtttgcagacttgagtttgagaagtctgcattaaattacaccagattaagctggatccaaatttggagaaacatgatcttattatgtaatctaggtggcccagaaggggattctctgaaaacacaggaccagcgtgggtgggccatttccctacaccggggtcttctgggtcccttgctgtccttctgcctctgtcctcccccctccatgccctgcacacttgtcactaagccacttgctccacagtcataccatgccttgtgacaccacatgtgtccccatctgagtggaattgtcccttcttcccttcactggaaaactcctatacatcctttagagccccattccaggatgaaaattcagcttgagctggtggccctgtcatctcacatgcgtcctcctcagatcttggcagggctcactgttaagagattgtgtcagctggagactgttcaatattttcaggattccagtaaagggtctggatagatttccctttgatgagttcttttgagggatttttggggctgagctgactgctcccgagagagggaattaacctgcaatgtatatagatttccagaagctgtgtttctcagagccaggaggcagcagctatctgctcttccccctgggccatctgggccatctgggcctcttgtgggatactgaggctagggatggtctcagggccgacctatgagtcaaggcagtggccttgttttgggggaggctggctgtcttccgggctgccctctcgttggtgatgcagactgtgcctcctaacaacaaaaatttctgtcctctgcctggctggtggacaatcaaaaaaaataaaatagaaaacttcaccgagagacgaccggactcaaccttcagctaaaaaggctaagaatatagggatttccgtggtttgttggtacctggggcaaccagaggaatgaagactggtttcttgaggggtttgaggtgggattctttaggcaggagtgactgcatgaagtccaggcacccgcagaaggtgcaaagccaggtgagaggaatggaagccggcgctgtgtgaggtggtgggctgggcgctcccaacctgggctgtctcctttcatcgccacagccgtgccacgaggtgggttgcatttctgttgtgcagaaaaataaactgagactcagagaggttaagtgacctgctgagggtcacacagcttcttgtatcagccccagactctgtgcttcgccaacctgggccccttctccaaggtagtgccctgggttcaggtctgagtttggggttccactgagacctgccctccccaaggccttcagcgaggggggccctgcattgaacaccggggagggaaaaagagacaagtggtgttgtcagcctcataccatgaaaatgaatcgccacgcagctcgccgcaggccccctttccaaggggctggccggccgggccacctaactgcttctttctttcttccttcttgccctccagtttgaagggcaggagatttccctggactcccgcatgggcatcttcatcaccatgaaccccggctacgcaggccgcacggagctgcccgagtcggtgaaggcgctgttcaggcctgtggtcgtgatcgtgcccgacctgcagcagatctgtgagatcatgctcttctctgagggcttcctggaggccaaggtggggggccttggcagcgccaggtcgtgcagtgcagacttcacccgggtctgcttccagactggggacctaggacgcgttagctccgtgtggctcttccagacgggacctaggatgtgtcagctccatgtggctcttccagatgggacctaggatgtgttagctccgtgtggctcttccagacgggacctaggatgtgttagttccatgtgggtcttccagactggggacctaggacgtgttagctccatgtggctcttccagactggggacctaggatgtgtcagctccatgtggctcttccagactggggacctaggatgtgtcagctccgtgtggctctttgatttttgttttttttttctgctgtgtctctcttcttcctcccccacctctttttaaattataacttttaattttggaataatgtaagatgcacaagaggttgcaacaatagtagcacggactttccaggtgccccttccccatgagaacatctcacatagccacagtccattgcccaaaccagggagttggtgttggcacaagtgccattaactcaggtgtagacgttgtgtggatttcaccaggtttcacattctctctatggcgtgtgcgtgtagttagttctatgacgttttatcacatgtggatgggagtggccgtcaccacatcaggatacagaactattccatcaccacgaccacaaagaagagagacagggtcttactctgtcacccaggctggagtgcagtggtgggatcacagctcactgcagcctcaaactcctgggctcaagtgatcttcctgcctcagcctcctgagtatttgggaccacaggcagatgccatcacacctggctaatcttgcttattttttgtagagacagggtctctacagcccaggctggtctcgaacttctgggctccagtaatcctcccacctcagcctcccgagtagctgggactacaggttgtgccactgcacccagcctcatgttactgcttactagacacattctcccctcaaccctaactcctgcaacccctgatctattcttcagtcagtgtaattttgtcactttgagaatgttctctacctggagacatgtagtatggaaccctttgagacgggcttctttcactcagcacaatgcctttgagaatatgtagattcaaaaacaactttatggataacttttatcctcttttaagctatctataaaatgtacatacgtaagatctttccagaagctctggaaaagttacaaaatagagaatacttttaacatagagggttgtcacattgcgtttctgcaatatgtcttttattgaaagctcttggtgcctattaccgtgtcaggattttgagttggcacgatgagatctcttgttcctagttttcacgactaaaattgccacacttgccttagagacctgtgggttttgaacccttgccatagatgaggtggctgacttgtcctcaaagacatttacagccttttttttttttttgagatggaatcttgctctgtcacccaggttggagtgcagtggtgtgatctcagctcactgcaacctctgtctcccaggttcaagcggattctcctgcctcagcctcccaagtagctgggattataggcatgcgccaccacgcctggctaatttttatatttttagtagagacagggtttcaccatgttggctaggctggtcttgaactcttgacctcaggtgatccacccaccttggcgtcccaaagtgctgggattacaggcatgaacaactatgcttggcccagttacagccttaataataggtttaggtcaaaataaagaagcaatgtatttctggagtgtgattcctacagatggttctgttctttaaattaagatagtgaagattttggtaacacagatgtttcttcaaattagttcccaatttgccatatttaaaaatgaaggacccaccctggtatttctggaagttagagatggaatttgcttatttgtagagcagctgcactggaacacctgcccccgttttcttgcatttgtagaatgatgctccattgcttttgaatcattttcttttttctttttttttgtatyattatcttctatcaaaaagactctggcgaaaaagatgayggttctgtataagctggcccgggagcagctgtccaagcagtatcactatgattttggactcagagccctgaaatcggtgctggtcatggctggtgagctgaagagaggctcctctgaccttagggaggtaggggccacgtgctggaacattctctggtttcagctgcttcaggcatttactacgtgccattggggaggtgatgggcacagtatggtatcacctgaaaggtttaagtcttagctgcctcttcaccccgcggtctggccttactttggcctcttacctgttgtatcrtttgcttgtaattacacttagtaccttaaggtcaagtgcaatgtcttcgctccaatagcaacatttatgatgcttccatagtaataatctgtagtctcaggatgggtgtggcggaagggtggggactaacaaaattctcatgaaagcatgaaggtgagttgttattttctctttgaaacaaaagaggggaacaattgtgttttttttacatggactttaaataaaaggtttagtcaatgttctgtgggcaacaggcttacctgtttctctagtgactgtactcaatgttgcacgcacacacgcacgcacacacacgcacacgcacggacacacgcacgcgcacacacacacggatacatgcacgcgcacacacgtacgcacgcacatgtacacatacgcacacgcacgcacacgcacacgcacacacacacacatttgggtagtaaaaaaaaaacagccgtgagtgcagtgatagaagcctgtttgtgtccataggaggagaggctgccacaaatcgcttcattcttttgggattttcacacatttgggttttttttttttttttttttggaggggtcgaaggaagagttatttatgctcttacaaaaaaggaagctgtaaaatgtaaaacactataaagtcagatggagctgcattcgtcatttgtacttcttttttcttaggagaaaggagttatatggaaacttctttcattttctcccctgctcctctatgtccaaagttgaagggcgatcatgctattgagtgggtcatatcttctgaactgaaaaaccaccgatgccactttcagtcttagcaacagggaaaacagtctcaagtgctatctaaggctctacgaagaagagtgaggccgtttgcagcagtctctcctcctagggcggtgaatatggtcccatcactgcactcactactggcttgttttcttttactgccttacactgaacccaagcatgcattcataggctcaactgctgcacaatctggtacttccttagaagaatgaaaacacattgcaaataccgaatatccaaggacttccgagaaagaggtaaaaaacagcctccttttctaggaggaaaatccctcttctcatccagcaatgtggacttacacatgtaaaactgtgtttgtacagagactgcgatggtttcttcacataggaaattaactttgctgtattgtctttgggcttctttatcacattaaaagtttgcaagcttggacctttgttcttattcagtaaatctatgtcacaggatgagtgaggatttagcatcttttgcttcaaattagaaccacatatttggaatttactgctgcagttctcagctgcgcttatcatgacagtggtggaaactggaggacattaaaaagcccatgaagtcagctgtacttgccatttatttagtcttgtttggaataaaaggtaaagaattcacaaataccaccacctcagcacctgtttcaaaggaaacatcaggcttcagcttgcaacatgatgtcgttacaattaagcaaatagcagaagcccccgtcagttgcttccttcttctggagaaggcggggaactgcaatccccggggctcctgtgttgagtctgggaggcagaacaaaaggaaaagtggccttttccactccacatcctggaggtaatgggtagagaagacatacccacatttccagatagtgaacgctgagtagagaagcaggactacctgtcctaggagacaacatagagacgcttgccaggtcctgagttcagaattttgtttttgagatttatataaaagcacctaaggctgggcgcagtggctcatgcctgtaatcctagcactttcggaggctgaggtgggaggattgcttgaggccagaagtttgagaccagcctaggcaacatggcaaaaccccatttctttccaaacaaatacccaaaactaaaaaatttagctggctgtggtggcacacttctatagtcccagctacttaggaggctgaagtaggaggattgcttgaacctgggaggtggaggctgcaatgagccgagatggcactattacactccagcctgggtgacagagcgagaccctgtctcaaaaaaaaaaaaaaaataataataaaaagtatatatatatatatgcgcacctaaaggtcaaagtaaatgttcttcctgtaataaggaacctttgctttagcgtagatggccatacccctctgtaaggtggggaggaggaagtttctgctccttccctctggccgagatctgttttcttctccttgcacggcccaccaggacactcagcctcctaggagcaggcccaccctggcctcactcctctgcctgtgctcctattttatattttatttaatttttacatttatatacaattttgtattgtatatttcacttttatatattttattttacatttttattttcatatgaaactttgaaaaatgcatatttacatttatattatttatatgatcattattaaatatgaaatatgaaatttcatatattcatattacacataatatcttatacatattttatactatataatatacataacattttatatacatttataaatttatataatttataaataatacaaatataattaatttatatgaatgatataaaatatataaattttataaaatttaatttatataaaattgtaatatatgtatataatttatatataattttatatttcattttaaattttatatttcatttaaatatatatgtatgtgtatatatatgtgtgtgtgtgtgtatatctatctatctatctatctttttttcgagacagagtttcactcttgtcacgccaggagtacgatggcgcaatctcagttcactgcaacctccacctcctgggttcaagcgattctcctgcctcagcctcccgagtagctgggattacaggcacctgccgccacacccagctaatttttgtgtttttagtagagatgtgatttcaccatgtcggccaggctgatctcgaactcctcaggttatccacccacctcagcctcccaaagtgctggaattacaggcatgagccactgcacccggccatatatgtgtatattatataatatgaagtacatattatatgaaatatatgaaatatatattttatattttatgtttaatctcatgtaaactattttatataatttatatttatttacatattaatataaaataaaaaataaaattatataatttctgtatataaaaatatataatacatatattcagaaattatataattttaaattaatttctgtaatttaaatttaaattaatttaaattaatttctgtaatttaaaattatgtaattttaaatgtgtataaaattgttaaaaataataaaatgtttatataaaaattatattttatatttcataagagtgttaccactgggttggaaacacagtccaaagcactgggttcctttggaaatctcttggaaacatgtgtttcatttcctgcaggacgtggtgctgatgagggccttgcgagacatgaacttgcccaaatttgtgtttgaagatgttcctcttttccttggtttgatttcggatctgtttcytgggctggactgccctcgcgtccgctaccctgacttcaacgatgcggtagagcaggtcctggaggagaayggctacgcggtcctacccatccaggtaaagccaggaaaatgacctcactgtggccgtgcatcctttccattggctttttgtttttgcagttctttaaaaatatatgtacagtaaaatacgcataagtttcaccatcttaaccatttttccccatttttaaatcacagtaaaatacacataacaatatttaccatcttacctacttttaaatgtagagtttgttaggccgggcacagtggcttacgcctgtaatcccagcacttcgggaggctgaggcgggtggatcacgaggtcaagagattgagatcatcctggccaacgtggagaaaccccatctctactaaaaatacaaaaattagccgggcgtggtggcgctcgcctgtagtctcagcttcttgggaggctgaggcgagagaattgctggaacgcgcgaggtggaggttgcagtgagccaagatcgtgccactgcactccagcctggtgagagagcgagactccgtctcaaaaaataaaagaaaaaagaaaaaatgtagagtttgttggtgctaagtacattcacattactgtgcaaccatcagcattatccatctctggaacgttttcatattgcaaaactaaaaccctacacccgttaacagcttaccttctcccctccctccgctggcaacctctgctcgacttcctgtctctacaaatttgactactctaggtacctcctgtaagtagaatcatgtaatttttgtccttttgtgtctggcttatttcactaacagtgttttcaacatttatccatgttgtggcatgtgtcagaatttcttcctttttaaggctaaattttatatatatagttttttttcacacaatgtgatcaggtgactcaaatattttgttttgaggcatcaaccatcagaggttctttcctcacctcaccttttttttctcctgagtcacacttaaaaaaaaattaaattagatattgcagggataggatttggatcctctgaagcctgtaagttgtatatgttgtcattaagccaaacacgtattgattggcagagtcctgctgagagtgtaaatgcccagagcctccagrcctggggggttgcctcgggtcgggcagcttcagggtgtcaggctaccccggagacctcaggcctgggcagtgggcaccgggtaccggccgtggacgagagctttctgtgcttttcctgaccctgattttctctggagttggttgttgaaaaagatgtgttttctggaaggaatataaaatggtgcagccactttggaaaacagcctggcagttcctcaacaggttaaaccgagagttaccataagacccagcaatttcactgctggggatctacccaagaatgaggacgaacgtccgctcagaattgttcatgaatgtccggagcagcattattcataatagccaaaaagtgggaacaacccaacatccatcagttgatggatccactgctgaaacagaatgtggtctgtccatcccatgggatatattttggccatagaaaggaatgcagcacgcgtgctacaacatggatgagctttgaaaacatgctaagcgaaagaagccagatgtgagagatcacacattctaggatcccatttccatgaaatgcccagaatacgcaaatccgtagagacaggaagtagatgagtggttgccaggggctgggggaaaggggattgggagagatgggtacagggttttttgtggggaggggtgataaaaatgttctaaaattgctcatggggatggttgcacaactctgtgaatatactggaaaccattgacttgtaccctttcaaaggtaaattgtatggcgtgtgtgttgtatcgcaataaaactgcgtcagaaaaaagataatgttttagcccagctgccattgtttgtcccgcaggtggataaagtggttcaaatgttcgagaccatgttaacccgccacacgacgatggtggtggggcccaccagagggggcaagtccgtcgtcattaacactctgtgtcaggcccagaccaagtgagtatgacctccgtagggagggcctggctgccacaggggctcacagtatatgtttggtgccagtattaccaagtcccactttgctctctgatttcctgggagggtaaatttgtaatacacacccctttcgactcagcgtgtttttactgactttattgcagacttagttaagatattttagaatgcaaaatagcaacccgcttgtgcatcagatggtgaataggttcatttgtgaaatgagaatttcacaaactatcttataaggatattttgaaaatgaatgtaagtcatagtttcttggggtccaaattgcttccttaaagtaagtcaggattcaccttatgcagtactgctgtggtttcgcagtggccagaaaacgaatgtcacctccccgggtgccttataatcgctagcccttcgggggcaattcttcacgaaggaaaaagtgatcgtacactcccacattgaagatcgtaaaggagccaggcatggtggctcacgcctgtaatcccagcactttgggaggcctgggtgggaggatcccatagtccaggattttgagaacagcctgggcaacataatgagactccgtctccacattaaaaaaaaattagctgggtgtggtgatgtgcacctgtagtacagctactcaggaggctaaggagggaggattgcttgagcccaagaatttgaggctgcagtgggctaggattgtgccactgcacaccagcctgggcaacagagtgagaccttctctctaaaaaaaaaaaaaaaggagagtatgtcataaaagcctgcagtgaattgaaagccttctactgaaagtggattcctgactcctcacttctcttctaagcaataactagattccagaaagacctccgtggatgctgatagcccggcaaaaatctaaatcaagccaaagtttctgtgacttaaacatttctaggcagtctataaaatctaaagagtaagtgtctgtcatatgttcccattatttcttcatatgtttcatatgagaaaaccagtcgacagtggcttactgactctaagtgggctgtgccgtggccatctgcatttcattctttaattcattcattgtaagtttatagaactatcacacagttgtatgcatgtgtaatatagcatgtacattatgatttactgattcgttggttgtgaactgtggagtgtgtgaagttttgttctctatagatgaattaatcctatagttagtgctgcagggatttacaggcactgtggtgagaaatgccctgtctgcttgattcatgaagtcaacagagcagctgttgttctgtagataaggaggattgaacattagtagtccaaagccttgttattatcgtggatgactgagtgtggtctcctatacgcccttaattctgagatatttacttaaatgtcatatatatgaatatgtaatatgcataaatatgaaatatacatgaaagttagcttcttggtgccctccagaggcaaagctgtgcttctagttcagacttcatttgtgctgtggccacatttttggtgaaatgtggttgctttatatttagaagaaagcactaacagtgaagggaagcccagtgaagagtttgcatgggttgcattttcaattttggattaaagtcaaaacatctaattcctcatagagggaacccagactgttttcctcatgcatttagttgtcttgaaccatggctaaagcctctcttgatttaggcttgggctgacgacaaagttgtacatcctgaaccccaaagccgtgagtgtcatagaactctacggcatcctggacccaaccacccgagactggacagatggggtgttgtcaaacatcttcagggaaatcaacaagccaacagacaagaaggagcgaaagtgagtatctttgtaggtaggaaagwgcctgggttagttaatgttaattagctcaacattaaaaacggtggcaggactatacattgtagcttcatgcttggatttcaacagacttagagtccagtcttggaggctgtgcttcggaagtgcgcagtccaatcttagtgctttttatgtgtgacctcagttgtcttagtgatgcaatgtggtaggtaccgggattgttcccagcttaccacagaggaaactgaggcctagaaaaggtcagaaatgtggcccaaggccagggatttggccctgatctgtgtgactctaagttctcaaacacagccgccatcaagctgcctgatcaccacgttctatggcaaggtaagtcaaggaaaggtagcaaagggccatggaaagtgcaggaatgccctcctgagccacggctttccatctgtagacgtggttgatggtgccctgatgacatcaccacatgccatggcaaaggccaagtgaggccaagtacagaaatgctctgagggtgtgtaaggtaaaaagcttttagttggtcctataatatctctttgctaaactcaggaatggttctgattttatgttctaatcaaatcccattaataataaataaaatccttaaataacaagagtccaaagtcccaactcatggcttttaaaacagcttcttagcgcttttcccctgattctggatgaacccaggattccacgctgaattccgttgtcttgtttttggcattctttaattttgagcagttcgtcaggatttctttatcttttatgaccttcctgttctggaggattccaggccaaccgttttagagaatggtctcggtttgggtttgtccgctgcttcttcataattagattcaggccatggctgtttgacaggaaggctgcaggagtgatgctgtgtccttctccgcatctcatcacgggcacatggtgttggttgccctattatgggtggtgttaatcttgattattgggttaaggtgccattttcctctttgcagttgatatgcaactctagggagataacttatgactaagtaaatatcccatttctcatccaaccttcacccattcacccaatggtttggagcatctgttgatggttacttgaatctggtcatcctcctcctcctcctcctccttctccttcttcttctcctcctcctcttcctcttcttgttcttctttcttcttttctttttttttgagaggggtcgtgctctgttgcccaggctaagttcagtcacatgatcacggctcactgcagcctcaaactcctgggctcaagcaatcctcccacctcagccttccaggtggctgggactgcaggtgcatgtcaccatgcccagctaatttttgcttttttttgtagagacagagtctccctgtactgcccaggcttgtcttgaactcctgggcccaaggaatcctcctgcctcagccaactacagtgctgagattacaggtgtgagccaccatgcctggccgttgagtccttttatagtgaatataaatggagactttctatagggacaactggtgaaatttgaatgtggactatacattagataatagtattgtatcaatattacatttcctgagtttgataattctgctgtggttgtgtaagagaaggtgcttattcttaggaaatacttgcttaagtatttaggggaagggggcattttatctgcaattgactctcaaatgattcagagagagagaataagagagagtgcgaatgtggcaaaaaaacgtaacaattggggaatctgactgaaaggcatatgggagttcttcatactgttttattctcataactctgtaagtttgaaattatttaaaaataaaaagctaaaaggaaaaaaatacaggaaggaaataaaccaaaatgttaatcctggaaaaaaaagatctaactgcttatatcagtgagttaaatggaggcactatcaaaccaccatttcagcacagtagaatagcctctgtcctgtggagatgggctttgctgcatgagatgtcacccattatagccacaaaatggaaccatcctgaagcttgaatacctgaggccttggacgtagacgtgctgccaggacacatggtgtgtaacccagggcttgtgaactcagatgctcccagggacccagcaggtagcacaaatgagtgaagtggagcaaattacatggtggtgttagtttcctagggctgccataacaaataactgggtggcttgaaacaacagagatttattatctcatagttctggaggccaaaagtctaaaaagaggtgtgagcaggactgcactccctccgaaggctctagggcaaatcctcacctcttctgcttctggtggttccaggtgttccttggcttgtgaccacatcatttcaaactttgcctctttcttggccttcccctctgtgtgtcttatgtctcctcctgcttttctcttataaggacatttgtcattagattaggactcatctgtataatccagaatggtcacatcttgagatccttaattgcgtttgcaaaggcctttctccaaacaaggtcacagtcacagcttctgggtgaacacatcttttggtggggggtgggtaccattcgacccactacacatggacatccaaaatactttctttattcttgactgtaccacaggaaaccaggggttaaaaccagtgataaatagcaattgatactcagcctcagatgtaagagaagaatgaggtaggagttgtggcaggggcagggactatgacactttctgtcttcatgggcagccactactcagcatcagctgattgttcccacgaaggaatccaggtctgtgtgctcagaacttccagcttgcccaagaagtgagaaattcagatttttgtgtgaagttccctcattcttaaatattggcaaagaactcaaacttttttttcttttttttttttttttttttgagacggggtcttgcactgttgcctgggtgggagtgcaatagtgctatcttggctcactgcaacctgtgcctcctgggttcatgcgattctcctgcctcagcctcctgagtagctgggattacaggcacacaccactatgcctggctaattttttgtatttttagtagagacggggtttcactatgttggccagactggtctcgaactcctgacctcgcgatccgcccacctyggcctcccaaagtgctgggattacagttttttatgtaccatttcagtcaaacctctgggccaactagggtgctctgtctcagatactgggtagaaaaccctgggaaaaagacattcaacatgaatgggcaggttataccaagttccataattggaagctctctaggacccatggctctcctttctttggttgctgcaggtatattttatttgatggtgatgtggatgctctatgggtggaaaacatgaattctgtgatggatgacaacaggttgttgacattggccaacggggaacgcatccggctccaagcacactgtgccctgctctttgaggcaagtagtgattaaaagtaaatttgaacataaatctttcttgtaattaaaaatgcaaatgtttgttaaagtagtagtaaatgtagatgattatttaaaaacaaacaatgcataagggtttataatgaatacaactctttgttctttactcctctcatccctctttatcccagaagtgactacttttactttttatgaattgtttcttctgatgattaccctagtgtctataagtaacaggcttagcatgatattcttcctttatacattttatagtttatacattatctgttgactgactgctacaaaagtgagaattcatctcttataccactaacgtcagaatagtatattgctaagttggttaacagtagataatgtttacattataatgaagatagaaataatttactgaagaaccaactaatatactacgattacatttactttcttttagagccatttcctttgtctagagtttgtaattgccttcctttttttccctcacactatttgcctttattttaatctcatttttttttttaaactttctatcatatcaagtattctgtcgagcccctttatttyctggaggctattctccaaagccctctatctcttaggatatggactgctcgtttcataggtgtggccctgggacttgctttcactctagcttagtattaatgccatttctaactgtaaaatttgtcagtgcatgaaatatttgtacatattattatctgattagctgactgaactatattttttttgtagagagagctaggtttgttaatatatctggtttagctttgtacttatgaagttttatactgcctgatctcaactatgttaaaaaaataataaagaaaaaagattgactggaaaacactccaaaacaacatttgtttctgggtggtgggatttggataacttattttcttctttatatttttctattttttgtcagatattctacaacgtattaattttcacattaattttataatagaaaaaccaaaaagatgttacatcagaagtgtgtaatcttctcatcaaaatcccaggtgttcagttaaaaagctcatggaagctgtgttgattttggtattatttggatttcatgcagttgtaaaaactttccataagagaaggtccttaaacatytagtttatcttgtgtatagctatagccrtgattgattttctttatttatccaggttggagatttacagtatgcctcccctgcaactgtctctcgatgtggaatggtttatgtggatcctaaaaacttgaaatatcgaccatactggaaaaaatgggttaatcaaataccaaacaaggtgaaatttttttctaaaatgaacttaaatttattagtattgatggctagttggataacatagtccagagggatgtttgtagttgaaggcgatgactttgtccttgacctgcccatgtccctgagcacaaaataagtgaaaacatggcagacacactttttttttttttttttttttttttttttttggagacggagtctcgctctgtcacccaggctggagtgcagtggcgcaatctcggctcactgcaagctccgcctcccaggttcatgccattctcctgcctcagcctcccgagtagctgggactacaggcgcccgccaccacgaccggctaattttttgtatttttagtagaggcggggtttcaccgtgttagccaggatggtctcgatctcttgagctcgtgatctgcccgcctcagcctcccaaagtgctgggattacaggcgtgagccaccgacacaccgacacacttatttaatttcagatagtttatagccagtgggataggtaatgattggattggttggtctagaccagaggttgacaaactttttctgtagaggggtagatagtaaatgtctgaggctttgtgtgggcaatatgatttctttcacagctactcaactctgctgttgtggcatgaaaacagccagaaatttgtatacaaatgggcatggctgtgtaccaataaacctttatttacaaaacagatgacaggccagagtgtgtgttgtcttaacaaaaggcttctgtgaaaagtgcagagatggatgtgacagtcacgtgcgggttgtggctcaaccacacctaggacgctacgaccaccttctcaaaggaacacaggtgttctgggtgtgtctctagtagggctactaggttggaggtgaatggaaaccaggacataattatgccagaaaagagcagaacaaaggaagaacaaaggaagcatgacagaaccatctgaggcactgtcctgtgggagacagctgtctcaggacccttgcaatccctggtggtgattggtgctttgatagggaggggaccttcactgctttacagtcttttctggatgactgtggtcacttgaactctaagatgatcagcctctttcctgtcaaatgggacctgttatcttccctttttcttccccaagggcatggtagactctgtggcagcgaaatgaaacacttcatgatgagatgaaagcatattgcagaggacaaatctctctgcaaatatagggcactattatcaggatttcctcacctgccaaatgtatcattcatcagaagatgttgctcaaccctctttgggcaagaaaagctttccactaacttccatttaaataaacaaacccttgaaatgctttggaatgctacttttttataggtggagcaatacaatttgaatagtctctttgagaagtatgtgccctatctcatggatgtgatagtggaaggaattgtggatggaagacaagcagaaaagctgaagacaatagttcctcagacagacctcaatatggtaagaaatgatccctgctgttagcaaaaagaaattctttcctaaagacaagctcacggtagggttttaaagggagtgaagatgccagacagggtgaacagtagcattgttggtcagtgccaaggcgggcgccgtgcttgcttttgtgcaagtcaagatactgggttccatctgtctgaaccaacatgtkgggtcttatgctcccatcgctctgggacctgggatcccaggatttatgactggaatggactctgtgggggtggactatgtgrgctgaaccagatattttcctgtgaaccaggtaacccagttagccaagatgttggatgcgttgctagaaggagaaatagaagaccwtgacctgctggagtgctacttcctggaggctttgtactgctctctgggagcctccctgcttgaggatggaaggatgaaatttgaygaatatatcaaacgccttgcttctttgtctactgttgacacagaaggagtttgggccaaccctggggaactgccaggtgggaaccgagtgtcgcctgtttccctgctctgagtgcctttggttaaatttctagaggaagtgaatgagcttttccatatttctgtctgtatgagttttccagattgtttgcttctttagagaaacatgcaatggtcagagcacatggcggaacacccaggagcggttcacatgcattgactgctgtgacagaagcccaggccctctgggtggtctttctggatgagagtcaacttctcttgcctcagcttaggcacttgcttcctttgctctttaaacttttcacattctgcatgactttgagtttcttcttctgtgggcttccctatctgtctttttaatttttatttttaaccatctatctccattttcaccatatcattcatctgctgtattcctgagtatttgcacagtagacaatcaagtgtggatttgtaaatcgttcataggaaatcatacaattaacattttatgtttttgcacaaaaatgtgcatcttcaatgaatcatacatgatgaaaaagatgcattctccaaggtctatatgcaatggtaggacccttctttatccatctcttattgctattcgagcatggcttggaatgtagatggcttttgaagttgtattttatactccttacctggtggtctttttaaagtttaaaatgaaatggcctccggtctttctaatggacagtcatggagcaaatcaaagatgtttttcaggtccctgctttattcggtgggagtctgagtgcacttttccagaactgaaatctccctttggggagtgcttttcagctccgccagccacgctggctgtgcgttgctgccatctgcaattccctcactcggagacaatgttggcctgcttccctggcttgtctccctcatttgccctcatcttgggggcctgaatggccctgtgggcatcccatttccagacacctgctcacagcttcagccctgcaggccctcgagcatacgctygacggtgatctctggcactgtcatgtctgcatcacaaatcctgctctccacctactctgcctctgagactcgggccacatgtgtttctgtttggcctcatggggatggacactgtgtcgccccagtgtctgctgttgcctcgagcacccatacttgccccttccctgcatcctcacttccttggctggtggccttcacttcagccactcttgcctgagacctccgcatgccttgcctaattgctctgctgaatccctccgagaaaactccaagtctgtcttctctgcctgtctaagggctgacagggagaagaccatgcagccacaaagacagatgtctccataaatcccagtccccagctggcacactcactcctggctccaaaggagcattgggccttttccccaaatatctaccctgccctttccgcgctctccgcagctgatctttctccctgcttcaacaggaacaayggaagctgtctgataggaatctctccttccagctgaaaagcctatagctcctgtctctgactttctccttttacagtggaagaggccacccccactgcaccccagccaaggccaacccagccccttcctccttctcaggctcctcgctccatctgagtttatctctctctctcatgttcagtctccgcctctctaccatcctgtcagctcttagacatgctcaagtaaagccttgcatggcctgagcggaggcgatggtgattactcgggcacctgcagcttccatctctcccctgccccgcctgggttgctgccttcccgcattgtccgttgttcctgcccctctcctgctgcagcacttatggctccacactgaaatggccacttcttgcctgtatctgtcccccacctggccctcgaacaactgcaagggtagggaccagggctctctgcttcactgttgtattcccagggaagtgtatgtccagtgaaagggaagtgttagttgaaaatactcagaaagtgcctgacaagtgcacaagtcacattagtgactgtcccgtgaactagaagcataagctccaaatacttggcatctgtccagtgatgagtagcattagttcaaggtactcggtatctgtccagtgaaggagcagcattgaagtactcactatggcctccgtgcagtacaagcaacattagttcatttcaagcatgtgccagaactgcttttgtatttccgtgtttatgattcaagtgaaatcaaccatgatttcctgcaggtcaacttccaaccttgtatgactttcattttgataacaaayggaatcaatgggtcccatggagtaaattagttccagagtatattcatgcccccgagaggaaattcatcaacatcctgggtaagtcagagtcaaatccttgttcctgggtttaggagtgtgtgatactcgctctaggaggaggcaaagaagatcccatggcttctctggtactctaagtcccacgcagagagctggtagagaagaattgaagagggtgagctgtgggccctcctgggcatggagggtggccgctttggtatttttgtcagctgctggctctgagcatcttccgtggctctgcctctcagctctttccccagcaggccgatccccacaggcagatgagatgccgtttcgcctcccctggcctttccctgggctctcttcagtccacagagctggctgggtggggactagacggcaacgaacgaggcagtgttttataaagggcgctggcttgaaaagctgtgtgccatgggcgtttacctactgaaccacacttagaatgcacccctctggctgttcagataaaatataggctggctattcaggtaaaatatgggctgaataatttcacaaagcatgtgtctgactttggtccattgagcttacggagtgagacatccctgttttctcgggagcccatcagggttgaaacctgccagtgcaagagggagccagacccgatgctgtggcttcactrtctcttcggaggaaggtgttgctcaggaagttaaatccckcaggggtctgagtgatgtcagcaacaaagaagctgagtttttgatatcctggcataagtcagaattgcatctcaaaaccggcttgggcgttctaaccctggacygtggtgatggtcgcrccgctgcagaactgtgcmaaagtcaatcagttatacacttcaatgggtgaatgtttctgaggtcatgtcttggcctttgctcctgttttttatgggatttgtggggttctaggacaactccatgttgyccccagtgctcaccctattggagttgctgagatgcccctgttcctaatgtctactttagttcacacrgtggataccactcggactacctggatattggaacaaatggttaaaattaagcaacctgttatttttgttggtgaatctggcacttctaagacagccactacccagaatttcctcaaaaatctgagtgaagaaactaacgtaagtcattattcatatgaattatctattgctgtgtaacaaattattccagtgcatagcagcttcataccacaagcactgtgatctcacagtttccgtgggtcgagaatgtgggagtgacttacctgggagcttctagctcaggctctcatgggattgcagtcaagctgttggccagggctgtagatacctggaggcctgggtagagctggaggatcctcatttgagatgacgtttcacatggctggaggctggaggcctcagttcctcaccatgtggctctctccatggatggcttgggtgtgctcaacatggtagagtgagtgcttaagatagatggcaaagcagatgctatgatgtcttttatgacctggccttggaagtcacataccctcccttctgccctaatctatgggtgagatagaagccaccctgtacaccctgatatagtgtgggagggacctgcaccagggcatggacacctggaggtgagtatgatctggggcccttttggaggctggctgtcacattattcaccatcatttttgggtttctaaaactttgcaagtgtttcctttccttcctccagccagctatgtgtccaatgtgtcgggggtcggatatgtacctggcatagaattcgcagggtgcacaggacaagtgatagtgaacaagctgtcaagatctgttctgtagggatttgcaggcagtggggggataaacatggagatgtgcacagggagcatggcagtgtttacagccagagggacctgcaggtttgtggagtcaggcactaggaagccgcatttgggagcctccttcacaacacccctaccccaggactctgcagctggtgctcatcagcccagccaggtacacctgaacacagtggctttagcaaggtacacattcagcttcaacacgttcagctcatgtgcacctgcactttgggtgccctacgtggagagagttatggaaggcagaggttcgttctcaaagtgtggtccccagaccggcagccttggcatcactggaaacttgttaaaaaaataccctagaccaccaggaatggtggtttgtgcctggtagtcccagctactcaagagactgaggaagaagggtcacttgaggctggtaattcaaggctgcagtgagctatgattgtgcaccactgcactccaacctgggcaacagagcaagaccctgtctcctaaaaatagcaaaacaaaaacaccctgatctaccaaattggaaactctggggaatggagcccagcaaggtgtgtggcacaaaccctgcaggtggagctgatgcataattagttaagtgtgagaaccactaatcaaggagctctcgccagcctaagcatggcaggagggcctgaggacacatgcatgagcatccagggggcttccctcacccttcctgccggcagttagtcccaaagcctgaaccacttgttcatgctctctttgacctatttagatacagccagcatgatagtgatttatgtttgaatattgtcatattgaaaatactgttggatattgcatctcatacgatgcaatagctctatgaagtagtcctaagagatgccattacgatcgtcttacaagtgagaaaaacgaggctctgaaaggttgaatgactttttggaagtcgccttgctagaactgtgcagaaacaagaccctcagtctactttcttgtatgccacattgtccccaaggctcacatgcgacaattcgctattgactcatacaatctgctgaaaggaaagaggaactcttactttagcacttagaaaataatgaagcacagtctcacactgggttattaaaaagttagttcagaggccartggatttgcaaaatagttgctagcttatttgcaaatgtttactgctgctaccctggggaaaaagctggcttttcacatcatctctttctgcttcagattgtgttaatggtcarcttctcctcccgcaccacgtccatggatatccaaagaaatttagaagcaaatgtggaaaagcgaaccaaagatacttacggcccacccatgggaaaacgcctgctggtgttcatggatgacatgaatatgccaagggtagtttgacgctcaagcaggtggagggatgggtcaagacagtgcttgtgtttgcatgggtgtgtgtgtgtgttagaagtgagtatgagaacattgatctttacctctgtgcaatgtctgcagggtacaggctgcggggagccagcctaaggcagaatgtacctgggatgctcttcttacacagagggacctttccctgactgatcatgttccttagtttcttagaggagggaagcaggcagccagcagcctttgaactaaattcagcatgtatttgaggaagtggtttccaaaggagctcttatttagataataatactgttgttggccccgtgtacatgggaggcatcaggacagacccttcccaagaattccgctggactcttcaaggaagagaaacttcagctgcattatgagtatgtttctgggatctgagcctgagaagtgcaaagttttcttggcatactagaatttaaatttatattatttcattgaaccatttttttctgaaagtctatttccagaaggactgtatgcaaagccagagtccgtccgtccatccatccatccatccatccatccatccatccatccatccatatgttcattcatctatcagtctgttcttccattcatccatccatgtgtctgtttttttcatccacccatctgctatttacctacctatctgttcacccatccaaccatccatctgtccattcattcatagatttgttcatctatccatctattcttctttttgcccatctgtctgtttttccatctacctgtccatttatccatctacccgtccatttatccatctacccatctgttcattcacctgtccatccatctacccatccacccatccatccatccatccatccatctacccatccatccatccatccatccatccatccattcaatggatggtccaatctgtctgtcattatcaatgtatgaattaattacccaatgtctttgcttatgttaaatgaagaaaggacaaatgcttgtcttaaagcttgatgctttgtaagcccctgagttgaaacaggtgaaaccaagagaagcagaagtgtcgatgtgtggacaggcatatcacaccccctgggtggcactgcattgttgaattcttgtctgtccatctgtctgtccatctgcccatccatcaatttgtccattcgtccatctgtccatccatccatccgttcattaattgaattaacatatatttattcagctcttcctatgggactggtgctgtgtagtcaacacctatgcagttcctgccctcatgaagctgtagtatcgtaagggagacaaacttcaaaaaacacaatcacaaatggatatatacagttgcaacctttgagaagccccatgaaactgaaaccgaggtgccctggagagtaacgggaaaaatgagcttgagctgggatggtcagccaacgcctctctgactcctactttgcgatactactgttctcttttcttttttaaaaaaaatcaaggtggatgaatatggcacgcagcagcccattgccttgctgaagctgctgttggaaaaaggctacttatatgaccgtgggaaggagctgaactgtaaaagcattcgagaccttggctttattgctgcaatgggaaaggctggaggaggccgcaatgaagttgacccaagatttatttcgctattcagtgtcttcaatgtgccatttccttcagaggagtctctgcatttaatttattcctccatcctgaaaggccayacctyggtaacttgattttaactagaagtctaaaccggaagaccttgtgttggggggaaacatacacagggctgacttatccatktaggcacagcagggttagrgccctcaatacttttaagggcctatgaaaatgttttaatttcttgcaaaatcagaagaaaaaaatcatctttatacgatgccattataaaatgtaattgtaatgtatttttatggaggaagaggtccatggaggtaaaagtgccttgggcccgtgggagtcctgatgtggccctgaggtgctcatgccacattgagtgacagcgaagaatcaactagcaggctggggccctggagtcagtccccttctgctccgggagcaggtctcttgaactctcctaacctcattctcatttggagcggggagatcatgatggtccccacctcactgggttttgggaggatgaaaggagagaaatgcgtgtaaagggtgcctagtgcacactgcctagtgcatagcagctactcattggttactagttactgctgttattattatgatttacttggctcctccaaatggaacccattcatttaaacaaccatcttctgatctggcgtttccctgctaaagcggagtctgcacactcggaggctccaggggccaggtgggtaagataaaggtgtggagtggccaggcctgatcagtaggaactatgagcacctggcccgttcatgccctacctgaaggcatttgctttcaaaacggtgaggtccgtgctggtcaaataaaactcccaccgagggctggttggggtctttggtttcacatcatgttgacttcacagttaatgtgaaaatctagagcaatacaaaaaaatcaggcccggtgcagtggctcacgcctgtaatcccagcactttgggaggttgaggcaggtggatcacttgaggtcaggagttcaagactagcctggtcaacatagcaaaacctcatctctactaaaaatacaaaaattagccgggtgtggtggcaggcacctgtagtcccagctacttgggaggatgaggcaggaaaattgcttgaacctgggaggtgaaggctttagtgagccaagatcatgccactgcactccagcatgggcaacagagtctcaatctaaaatacataaaaaaataaaaaaattaaaaataagtagtaaaattcacataatggctgggcatggtggctcacacctgtatcccagcacttcgggaggctgaggagagcggatcactcgagcccagcagttcaagaccagcctgggcaatgtggtgaaaccctgtctctacaaaaaatatgaaacattagccaggtatgatggtgtcctgtagtcccagctacaaaggaggctgaggtgggaggatcacttgagcccaagaggtcgaggctgcagtaagccctgatcatgcccctgcactccagtctgggaaacagagcaagaccccatctcaaaaaaaattcacataacacaaaattcgttattatagccattttaaagtatacaattcagtggcacttagtccattcacagcgttgtgcaaccatcagcaacgtctaaccccagaacattttcatcaccctggaaggaaacccacacacattagcacttactcccatcccacctctcattcccaggaaccgtgactctaccttctgtctccatggagttttccatgttgggtatttcatataaatagagtcataaagcacgtggctttctgtgcctggcttgcttcactcctcatcatgttctcaagggtcatccgtgctggagcttgtgtctgtcagtgcttcattcctggtttgttttattttgttttgagatggagtctccctctgtcacccaggctggagtgcaatggcgtgatctcggttcactgcaacctccgcctcctgggttcaggcgattctcctgcctcagcctcctgagtagcaggaattacaggtgcgcaccaccatgcccagctaatgtttatattttattttaatagagatggggtttcaccgtgttggtcaggctggtcttcaactcctgacctcaggtgatctgcccaccttggcctcccaaagtgctgggattacaggcatgagccaccgtgactggccaacttcattcctttctatagcttagtaatagtccattgtacggctctgccacattttgtttattcactcatctactgaaggacatttgtgtgttggggggggtgtctttgcatttttcagacgtttcatgagagcattgtggctgtgagtggcaagctgacattctgcacgctagcactttacaaaaatattgtgcaagacctacctcccactccgtcaaagttccattacatcttcaaccttcgagatctctcacgggtttttaatggtcttgtcctcactaacccggagcggtgagtttgatttatcttactaaaatatgccccacaggtatgatagttttcttattcttttaagacagagggcttatcagtggatttgatgaatcgttgtatgaattaattayccaatgtctttgcttatgttgaagaagagagaccaacacttggcttaaggcttgatgctttgtaagcctttgcattgaaacaggcaaaaccaagagaagcagaagtggggacaagcctatcacaccccttgggcaggctgtgttgttgacttctcgttttcagttctgaagttggaatttgcctgcatggagccttttgctcacataactcagtcgttgccggttggttataggatgtgtgtctttatgagaagtaagcagaggacagaaaggatttaagtcacgatatagggaaattcccgattaaaactaggcttatacctttacatgaatgtctactttagtctatgtggatttgcaagcatagtccaattatgtggattcatattatgaatccagaagatactgaaaaatgaattgagaattttccatgtatcctgcttttgagtgccttgaaacatacagactgtcaggggcggtcaggagagggcagctccaggtgtttcaggtggagtgacggttctttgctagaatgcagggaaagttctggaattggggccagattgagttggctcttagaaaaaggagctgtcggccaggcacagtggctaatgcctatagtctcagcactttgggaggccaagggaggaggatcacttgagcccaggagttttagaccagcatgggcagcatagtgagactccatctctacaaaaaaatttaaaaaattagctgagtgtggtggtatgtacctgtagtcccagccacttgggaggctgaggtgggaggatcacttaagcccaggaatttgaggtggcagtgagctatgattgtgccaatgcaccagcctgggtaacaaagcgagaccccacctcttaaaaaaagaaaaaagagagaaaaagaagttgccagtgaccctgatgctgattttaaattcatgtattccaacaagtagggatgatgtcaggtacttattttacgtcatttatagacaacgctctttttttctttcctacagtaagataagctacggatgatgactttagggggtttacattactttcttagcttctgttggattctctggttagatttcattaacgtgagactaggggggcacgactggagaaatgttgggcctttattgcgctctgtgtgtctgtctgaatgtcacagccgtcagccctggtatccttcaggtgacttcctggctgatttttgtcccttccattctgcagattccagacggtggcccagatggtgagagtctggaggaatgagtgtctgagagtcttccacgaccggctgatcagtgaaacagacaagcagctggtcagtacatccaatgcttcttctcaggaaattcttctcaggaaaataaacaagcgccaaaagtgttttttatattaggackcgaattgtggaaaaataggcacgaaaggtcaatggggcaaaggagggtgggtgggttattaagcgtcttgcagcaactgaaaaaaaatagaacgcaaattattttagataatagtacgtatcctctgctcctagcaagtttcagsccgtgtactgttgttgagtttgggtccttaagtgggcttctgtttcaaggtacaacagcacataggcagcttggttgtggaacattttaaagatgacrtggaggtggtgatgagggatcccatattgtttggagacttccagatggctctgcacgaaggagaaccacgcatttatgaagacatccaggactacgaggcggccaaggctctgttccaggtggggatgagccccaccctgtccatgggctcactttctcctgagcatgggccaagcgggagctgagcatcgcgcgggtgcccgggagcctawcacctggggctctgtctgagggcttgaaatacgggcttgtgtctggtccggtggttcccacatccagcatgcttgggagtgacgttaggaaattgttagactcctggggccaccccgtgagatttgctgcgctgggcccatggagggtccccagattctggtgcacagccaggtttgggaaccacttgtttgactccctaatattcattttcatttaaattcatgagatgagccttgttaccggctttgggtcgctgctggccaatcaaagcccagcagatggaaatctcgattgtgaaagctagattagtcctggagacccaagcagtttaattattttaactactatagatgttcagaaaaatctctcttccattcttaatctcctctggacaaaaggagggagtctgtctcttaaaatccagtgatcctttaagacattatttatttatttatttattttgagacagggtctctctctgtcacccaggccacagtgcagtggtacgatcacggctctctgcagcctcaacctcctgggctcaagtgatcttcctgcctcagcctctggagtagccgggactatgggcacacatcaccgtgcccagctgatttttttgtttttatttttgtagagacgtagtcttgctctgtggcccaggttggtctcgaactcctgggctcaagtgatcctccctcctcagcctcccaaagtgctgggattataggcatgagccactgtgctgggttttaaattctctttttttttttaatgctttaaattctagggtacatgtgcacaacatgcaggtttgttacatacgtatacatgtgccatgttggtgtagtgcacccattaactcgtcatttacattaggtgtatctcctaatgctatccctcccccctccccccaccccacaacaggccctggtgtgtgatgttccccttcctgtgtccatgtgttctcattgttcaattcccacctatgagtgagaacatgcggtgtttggttttctgtccttgcagtagtttgctgagaatgatggtttccagcttcatccatgtccctacaaaggacatgaactcatcctttttaatggatgcatagtattccatggtgtatatgtgccacattttcttaatccagtctatcattgatgggcatttgggttggttccaagtctttgctattgtgagtagtgccgcaataaacatacgtgtgcatgtgtctttatagcagcatgatttgtaatcctttaggtatatgcccagtaacgggatggctgggtcaaacactatttctagttctagatccttgaggaatcgccacactgacttccacaatggttgaactagtttacagtctcaccaactgtgtaaaactgttcctatttctccacatcctctccagcacctgttgtttcctgactttttaatgattgccattctaagtggtgtgagatggtatctcattgtggttttgatttgcatttctctgatggccagtgatgatgagcattttttcatgtgtcttttggctgcataaatgtcttcttttgagaagtgtctgttcgtatccttcgcccactttttgatgaagttgtttgattttttctcgtaaatttgtttaagttctttgtagattctggatattagccctttgtcagatgggtagattgtaaaacccaccatgctgggttttgaattctttttttttttttaaatgcaggaaattcttgaagagtataatgaaagcaacaccaaaatgaacttggttctcttcgacgatgctctggagcatttaacccgggtgcaccgtatcatccgcatggaccgcggccacgccctgctggtcggggtagggggctcagggaagcagtctctttcgaggctggctgccttcacagccagctgtgaggtcagtccacgtaccctcccagaaataggtttacgatgccagtttctgcagttggtagttcgtgtacatattggaacaatccacagcagatcatagcatgatgttttcatagagtatcgaggtgggtgttttggtttgttttattttttcttgtttttggcttgatattactatattttaactgaatrgccagagcatctaagtacaggtgttctttggcttaggatagggttacatcctgataaaataatcataagtcaaaaatattgtcagttgaaaatacatttaatatcccaattaacccatcataaagttgaaaaatcctaagtggaaccatcaaagccggggaccatctgtattgctttgtttttaggatggagaatgtcagatcaagttagaaagtcaaatacaagcacatcctgtgaacggtgatgtgtgttcatatggggagggcttggcccaaacctcagtgcacccatagtatggggctggcaatttgctggctgccatatctgcacagcctgcacacacagatctgggttaatcttagaatcttgtatttttaaacagctttactgagattgaattcaagaccatacaatccacacattcaaagcatacaagccagtgcttgttggcacattcacagatctgtgcaaccagaccacagtctactttagaacacttctgtggcttcggccgggcgtggtggctcataccagtaatcccagcactttgggaggccaaggcgggtggatcacctgaggtcaggagttcatcatcacccttgccaacatggtgaaaccccgtctctactaaaaataaaaaaatgatccaggcatggtggcacgcacctgtaatcccagctactcggaggctgaggcaggagaatcacttgaacctgggaggcagaggttgcagtgagctgaggtcatgccgcagcactccagcctgggagacagagtaagactctgtcaaaaaaaaaaaaaaaaaaaaaaaaaagaacattttgtggtttcaaaaagaaaaagaaatcccatgccctttagtgatcaccaccctgacctctgcaccctcccctcatcaagccctgagcaactaacggactaatctgctttctgtctctatagtcttcctattctagactttcatgtgaatagtgtgtgtgtctattttgtgtctggtatctttcttttagcacagtgctttcaaagttcatgttgtagcatacatcggtacttcattttttttttgccaaataggaggccctcgtgtggctatgccacgtttcctttatccactgctgggcgtgtttgttgtttccacctgttggcttttgtggacagtgctgctgtgagctttcatgcacaagtttctgtgtggacatgtgtttgcattgctcttgagtatgctcctacaagtggaattgcgggatcctatgataactctatgtttaattgtttgaggaacctccagggtgtggctgcaccgttttccattcctaccagcagcgtctgagggttcctgtttgtccacaccattcttagaatcatacaggtacctcctgcaggttccacaggtaactcacctgcaaggggcctctcgaagtggagcagacactatgcattgagatgtaatttgaagaagagtcatgtccctcattcacccttttctccccgactcttcattagttctctggtatctgacttctttcactattagggtctcccgttatccaaaatgcctctgtttttgcctctggttgcatgatacacatgcatgcttataatattttcaatttacaatggatttattgagacgtagccccatcttaagctgaaaagtgtaccctaaaatgcaactagtacctaacagcggctatctttaggtgatgaaattacaaatgatctttattttctttagacgtttctgcattgcttgaattgttgcaatgaggattattccatttagagagagagagaaatgagtgagtccataacaatagtgattcttattccatgcaatggactgaagttttgtccgtgcctgttctgggtgtgtggtgcaggacgggatctgtattcagcctcagttcttctcagatgctcagccacccctcatgtctacctcagaaccttttgataagtccacctttagagaagacacttcttgcagaagggtcattttcatgactcttctcctcctggcaagcaagaggtgttctttttcttcgcccccgagatggagtttcgctctgttgcccaggctggagtgcaatgacgtgatctcggctcactgcaacctctgcctccccgggttcaagcgattctcctgcctcagcctcctgagtagctgggattacaggcatgtgccaccacgcccggctaacttttgtatttttactagagacggggtttcgccatgttggccaggatggtcttgaactcctgacctaagaggtgttcttttgcacagactttcttctttgtcttcagtgtgttttctggaatcagatttaactcagcatcattgccattaccacagagagtcttaggcagttcaggctgttataacaaagtgcgatagactggctggctcgtggacagcaggtgttcgtttctcaccattctggaggctgggaattccaagatcagggtgccagcatggtcgggctccagagagggccctctcccgggctgcagatggctggcttctcatggcattcttacatggatggatgacagcacgaaaagtctttggggtcccttttataagggcactaatcccattcgtgagggctccaccctcatcacctaatcacctcctaaaagcccaacctccaaataccatcacattgggggttatgatttcaacaaaggaattttgtgtgtgtgtgtggggagaacaaacattcagtctattgcacggagtaagaatcactattgttatggactcactcatttctctccctctaaatggaataatcctcactgcaacaattcaaatgatgcagaagcgtctaaaaaaataaggatcacttgtaatttcatcacctaaagattgccactgttaggtaccagtagccttttagtgtatacttttctttttttaaattatttttctgttattttcatttttggtctgggaaccaacggaataatgtacacttttcaacttacaatagggctgtctcaataaacccatcataagttgaaaatattataagctgaaaatgcacttttgatttatatattcaacttacaatgggtttatctggatgtgaccccatcgttaagttgaggagtgtgctgaaagtgtagcacttttgcgccatggcaaagtcaaaaagttctaagttgaaccagaggaagtcagggaccatatgtgcattcatacacaaacgtatttccttcttaccagcaatgggttaaagttatatgtaacttatgtcatttttccccactgtgtcactgcgtctttccaagtcaataaatacatatttacattgtctttggaagcgttggacagtattctattgtttggatatgccacacataacccatttccaatggcgggcatttagctttgtccttgttttcttattactaacagtgcagtgatgaacacctttgtttatgtatctttgaatattgttcatttttttttccctataggatcactttctttagagattggtaagttggcaggttaaagggtatatgctcttttacagctttggttgcctggcaccagatttcgcactgggaaggttggatctaaactcatatggagtttgcctctttggagtggaaaggacctggggatgcaggacagaaggaaaggaaaaaagtgtccttattaacaaccaatcaccccaccacaaaggattatgctaatttatgcaactggcagtgtctgttttcacatattcttgccaatactagatattgtcatgctgatatttgtcaagattataggtggaaaatattgcagtttaaatgatcctttctccaattaatagtaaagtttgaatatccttttatacattttttggacatttaccttttctcttttgtgtattgcccctttatatacttattgagttgtgagaactctttatataggagagcaatcacagttcattcaatgaatccagcttccaaaatttcacaaatattggccttttgtttgaggtatttgtaaaaaagggaaaaactaatatgcttgatctagctttaaatctgatgaaatacataattgaaatcattcattgttaaaatataactgtttgcaattgttttccacatttttctataggacaaggcattccccactggaaagttttattattttttttctgttgatttgtccaggtaaatctgaggcattttcccctaaagtagcgcctcgaggaacagcagagaggatgttgagggacagagatctggaggaggttgaggacacacagggctgtgtctgggccctaggaagtggcgagggttgggtagtggggtcagaacaggtgttcagagagtagtgccaggagctgctggggaggggaggcggctgcactcgggaggggtgaggaaggtttgcaggcgacaggcagaactggagaccagagtctattggccagaaggcatcctggttgcgttgcgcgcgcgcgcgtgtgtgtgcacacgtgtgtgtgtgtgtgtgagcatgtgttctagtgcatgccagggtgcaagtgagtgtgtggctgagtgtgaacatgtgggaatgactgtgtgagtgtgacagtgtgagtgaagcgtgtgtgtcaatgcatagggttgagggaggtagggaacagagagagatctctcagttcctggaaatctgccatgtttctgacagtcgctggttgcaatgaaagttttaatttctgcttctgagctaaaagaaacacttgagcagaaaaagcgtgctttaaacttatgtccttattcacatttacatcgatttcgtgtgtacattgatttcctgtcacgaagttaaagtgcctgcttatttctccctgtgtgcgtcttcccacagggtctgattttctgtaaactgcagtatgtggctggcgttcaccttggggtacattcttcccccctttcctctgttgctgggctcatggggcttccccctcctctgtttcatgacagggagtcccttccagacttttctttcctgacctacttcctcgagcttggacagacccacgccctctgcactctcctccagcgtccccaccccggagcccgcagggaagggaggctggtggtggtgacgcccatgtgctctgtgtctgcatygcaggtgtttgagatcctgctgagccgaggctactcggagaacagtttccgggaagacctgaagagcctctatttgaaacttgggattgagaacaaagcgatgatctttctgttcacggatgcccatgtggctgaggagggcttcctggagctcatcaacaacatgctgacctcaggtacagccaaggctggcrcccgctgtggccaacaccccrctcagctcttaagggagttcactttcttcagcagttaccacctccagacactgtgggtagccctgtgcgggtgtacctgttcctccctcacggcggcccctgagataggtctcattatcttccttggctcctcctgtcctggagtctcccgagtgtgcccccttctctccgtctgcgatgatggcagtatccttgcagtaagaacaggtggtgtctgggcatctggccgtgccccgggctgtgctaagtgtgcatcatacattcccgtctccacaaaaacttgatgagaggccaggtgtggtgcctcctgcctgtgatcccagcactctgggaggccaaggagggaggatagcttgagcccaggagtttgagaccccgtctttacaaattttttttttcttttttttttttagatagagtctcgttctgtcttccaggctggagtgcagtggcgtgatcttggctcactgcaagctccgcctcctgggttcacaccattctcctgcctcagcctcccgagtagctgggactacaggcacccaccaccatgcccggctaattttttgtattttcagtagagacggggtttcaccgtgttagccaagatggtctcgatctcctgaccttgtgatccacccgcatcggcctcccaaagtgctgggattacaggcgtgagccaccgtgcctggcacaaaaatatttttaagaagttagccaggcatgatggcgtgagcctgtagttccagctactcaggaggggcaggaggattgcttgagcctgggaggttgaggctgcggtaagtcatgatcatgttatggcactccagcctgggcaacagagtgagaccctgtctccaaaaagaaaaaaaaacaaaagcaactgaaaaacaatcaaacctaatagggaaggtaccattaacatcctcatttcacagctgaggaaactgaggcccctgtagagggctgaatggcggccctctaaaagacacatcctaaacccctggatcttgagaacgagacctttgtaagaaaaagagtctttgcagatgtaattaaattaaagatcttgaagtgccttcctggatttagggtgggtcctaaatccagtgacagctgtccttataagagaaggcagagggagatttgagacacagagaataaggtcccataaagattcccacaagtcacgggacacctggagccaccagaagccagaggaggcaaagaaggatttttcccttggagctgttggcaggttaccctgagaccttgatttcaggcctccagaactgcaagagagtcggtgtctgtatttcttgtctgaagccactcgctttggggtaattagtcatggctgccccagaaatctactagagatgccacctaccttatccaagggcaccttgctgggaaggcactgaggtgagactcgaacccaggatttttagcatcttagccacgctcacaaccactttaccgtgttgttatcttgtctaccctggggccctgcaaagatccgtgctgacttcgtctggcctaatggcttacagggacctmctttctttcccagggacctatttcatcgattgcttgtttgtttcagcacctgaccatattcattattgtattgctgtgttattcattgagccccagcctcccagcatttactataaaaaatttctaacataacagtgaggctgaaagaattttttctgtgaacatctgccggcatgccatctagatccctcctttctcgccttgctgcacttgctctgccaygcgtgtaaacagctttccctccctccctgcttccgcccttctcgtttttagatgcgtttcagagtcaattgcaacatcactgctctccccgctaaatgcttctgcgtgccactatctagagttcaagttttgtttagtgttttcttttgatgtaaaatttacatacagggaaacgcacaacattttaagtgtatatttgctgcattttgatcattgcgttttaagttgcgtctgtttcagtgggttgtcggctccttgagaggggggatcgggtcatccacctggatttattccacagtgtttattccagacactgggtttggtagggaataagatggtcatgacctctgccctccttggagcatacatttcagcgtgtgagtggactggttaacgacaacaacaactacacaaagagatacagcaattgcagattgtggtaagtgccgtgagtgcaaaggggagttgctgtgagagagagtgtgggcaggagcatctcagggcagacagggaaggcgtcactgtagagacttttcagctgaggcctgagagatgctgtgtgatcacactccctatggctgctgtagcaaatttccccaaacagcacggatttattcccctatgcgcctggaggtcagaaatcagaaaagggtcttaaggggttaagatcagggtgttggtggggctggttccttccagagcttcctggggacactctgtttccctgtctcttccaactgcttcaggccacccgtttcttggctctttagctcgctggctctcatccttccagtctctacttctgtcatcctgatgcaaactcagctgcttctctcttgtggggacccctgtgatcgtctccagcccacctgggtaattgagagcacgcgctccatcccaccatccttggctgcgtcacatccacagagtcctttttgcaggaaacataaagaaacccattggccggttcctgggcttaggatgccatggacacctttagagggctgttgtgcagggatcaggacgaggtggaggggttctatggcgtggaaccttgtaggtcatttataggagataagattttattctcagtgcaatgacgtagtccagatttatgggttttttaattttttagatttaattaattaattatttcagagacagggtcttactctgttgcccaggccagaatgcagcggcatgatcatagctcattgtagcttccaactcctgggcttacacaatcttcctgtcccagcctttcgagtagctgggactacagatgcatctcaccacaaccagctgattaaaaaaaaaaaaacacacttttttttttaagaggtggagtcttcctgcattgcccaggctggtcttgaactcctgggctctagtgtttttcctgcctcaccttcccaaggtgttgagattacaggcgtgagccactgcacccagccaagatttatgtttctaaaagatccctccagtgcgccgtggggacgagattagaggggaacaggagtgggagaggggcatccagtttggagctacccctgcagtgtaggcaggaagtgacagcgattggaggagggtagggcactggggacagagagaagtgggtggattcacgaggtattcaggaggcagagccaacgggacttcgatcgatttggctgtgggttgggggaggggtatcaagggtgactcccaggtttctggtggagcgagtgatcagtgcttccatttgctgagatgaggaagaccagttctgggcttgtggcattaggagcgtgttgagtttgctgcactagatgagaatctgaatgtgatgtcatatagtgtattagtttgctggggctgccgtcacaaaatgccacaaactgggtggcttaaaacaatagaaatctactctcacagttctggaggccaggagcccaagatcacggtgtcggcagagcccgttccttctgagctctgggtgggggaatctgtgttgctggtggctgctgacagtctttggtgttccttggcttgtaggcacagaactccagtccctgtcttcgttgtcacgtggccttccccttgtgtgctgtctgtctctgtgtccaaatttccctcctttataagggtacctgtcatattgcattagggcccatctcaatgacctcatttcaacttgattatctctgtaaagacaatttccaaataaagtcacaatctgagctactttggggacttcagtatatctttttcagggcgacatgcaacttcaaccgtaatacataggcagtgtgtacatgagtctggttctcagaataggagcctagggtggggacgtcaatttcagagtcactgacatgtggtgggacccaagtgaaccatccagggagagcccagcactgagttcaggtggaagaggaacgagcagagactgagagggcaggcggagcacggggagcgagagactgagagggcaggcagagccccgggaggaagagactgagagggcaggcagagcacagggagcaagttcctctttgtcttttgggagtcttgggctccctgccaagggagggatccctctcccttgttgaatatccccaagaccatccccggctccgtgacttgctaggaggactcgcaggactcagcatgtggtcctgctcatggctgtgagtcattacagcaaaaggacacagagcaacatcagcagagggaaaaagtgcatgggggaccctagggaagaccagtctcaagtctcagagtcctctctccggggagccacacaggacatgcttaatcccccaacattgagttgtggcaactcgtgtgaagtactgcccaccaggggagctagttggagactcagtgctccgggatttccttggggctgctcatgtaggcacctctacctggcatgtgccaaaatcccggatgcccggagggagagcgggtagtcagcatagaatacgttgcatacccaagcagtgtgggcacaatgttaggctgttcttgcattgctataaagaaataccttagactggttttttataaagaaaagaggttcatgtggctcacagtgccgcaagctgtacaggaagcatggtgctgatttctggggaggcctcaggaaacttacagtcatggcagaaggtgaagggggagcaggcgcgtcccatggccagagtgggagcaaggttgggggaggggccacacactttcaaacaaccagatctcacgagaactcactcgcgctcacaagaacagcactaagaggatggtgctaaaccatccatgagagatctgcccccatcatccagtcacctcccaccgggccccacctgtaacactggggatcacaattcaacctgagatttggtgcggacgcagatccaaaccacatcccatattgggccactcttatcagtgaatcggggaggaagctcttaaggaaactaagttcccaggtgcctttcagaggtgagcagccgtggcctgccacgttaactcttccctgcacaggagaacgtcagagatggcataaaatgtattgcataatttgaaacggcgtagatataggaaaaaagaagtccacgtagccagggtttctcgactgcgtgccgttgacatttggggctgggctgttctttgttgtggtggggctctcctgggcactgtgggaggttcagcagcatccctggccttgacctattagatgccagtagcaacctcccttgcaacaagcagaaatatctccagacatggcccagtgtttcctgggggcaaatcccagctgagaatccctgcttcggagttacaggcaagtgaggcctcctcatgctctgcatgctccctgtgatgctcacggtcatcctcccaggcgagctggcggcatctaggatccccgtttgacagacaggagctggaggctctaagggcttgccacgaggtggcagggagcctcgggtctcaggtcaggcccacacgctgctctctggactcagcacctgctgatctttccacaccttccatcactcagtcagcacttagagcggtcatgaccctgggactcagagagatcaccagcatgtcttccttttccaggaattgtacctgcgcttttttctgaagaggagaargagtctatcctgagtcagattggacaggaagctctgaagcaaggcatggggccggccaaggagtctgtgtggcagtacttcgtgaacaaaagtgcaaataacctgcacattgtcctgggcatgtcgccagtgggggacaccctgaggacctggtgcagaaacttcccaggtacccgcrgtggagcctgtgaacccatttcccctgctttggcagagtgtgtggctgagggtctgtccayacctctccaggttcccccagcaaagcaaaacaagacacggccattaggtggaaatgtgggctctgcactgtagcttggggctcactgccccttctaggtgccagtgggcgtgagtgatgtccctctgacaggaggatgtacccatgctcctccatgcgaggcccgcagtgcatggacggtggctccccgcttccttccatttgggaaaattccaccagcctcatgccagcctttagagcagaggttcctaatgggcggggcaggggcgggggaggttgtgttctaggggactcttggcaatgcctggagacatttttggtcatcacagccccggggagcatgcagtgtagtactggcatctagtgggtagaagccagggatgctgtgaagcatcctacagtgcacagccagctgctgccacaaaggattagagcccagatgtcaatagcgccaagggtgagaaactctgcttttgatgaactagatttggacacatctggctcattcaccaacttgttggctattgaagatggcatccatgttcttgagtgtctcagggttgcagaatgagcatccttttttttttttttttttttttttttgagacagaatctcgctctgtcgcccagattagagtgcagtggcaccatcataggtcactgcagcctcgacctcctgggctcaaatgagcctctcacctcagcctccctagtggctgggactataggcgcacaccaccacgctgcctggctgattttttttttctttgagacagggtctcactctgttgcccagactggagtgcagtggtgtgatcttggctcaccacaacctccacctctcgggttcaagcgattctctcacctcagcctcctgagtagctgggattacaggtgtgcaccactactgcccggctaatttttgtatttttagtagagatggagttttgccatgttgtccaggctggtcttgaactcctgacctcaaatgatccacccgccttggcctcccaaagtgctgggattacaggtgtgagccaccacacccggccctgatttttgtattttttgtagagacagggtctcgccacattgcccaggctgggagcatctttttaatctctctttcctttcaaggtatggtaaataacactggtattgactggttcatgccctggcctccccaagccctccatgcggtcgcaaagtcctttctaggtaagtcacagctgttatgggaactgcattattgataaaacaaagcaatttattttcccttttctgactttgaattctggtcttgtagatttcttcactggaaaaccctatggtaacaaatggctttcaattttgttagtatgtttttggtttatatttggtgttttagtccaaagacatttcaggagacttagcaaggacaatttaggataaaaattgattaggtgttctccacagcagcagttggcaaaaccatggtctgctgtctagttggccccttacttgttttagtaaataaagttttattggtacacagactcactcattaattaacatattgtctctggctgcttttatgctacaaccgcaaagctgaataattgcaacagagaccgtatgagtactgttcggctctttgtagaaaacatgtgctggcctctatccaaagaatgctccaaggacaattcagcaaacattctgcattctcattgaatttctagcgtttcaaacacctaaggccttggatattaattttaatgtttgaataagaaaggaagtctgtcttcagggaacatctttttcttttgacctaacttgagcagatttatgatgaatgacactgggtaaccttgaaaatagtttcaaccttctaaatctgtactcaataataaataaataaatgttcctatatgtaagaagaaatcataactttaatcataatgcagttttgggggaaaaggggccaagagaatgactcttttctgatgatatatctcaggtccagatggtaaatatttacagctttttcgcaactactcaattctgccattttatcatgaaagcagtcatagacaatacgtaaatgaatcgctatggctgtgatccaataacactttatttacaaaaacagggggcgggctggatttgtcctttggcccgtagttggccagccccaatatagatgtccccttgttctcagaggcgtatttgccgtttccatgtgtgaagtgcttgtgtttgctttcagtattcagtgattcagcatcataaataatgctgcctagaatttgcttagaacttttttgtccttagaatatactccctggaggccaggcgcagtggctcacacctgtaatcccagcactttgggaggctgaggcggatggatcacttgagcccaggagttcgagaccagcctgggcaaaatggtgaaaccctgtatttactaaaaatacaaaaattagctgggtgtggtggtgggcacctgtaatcccagctactcaggaggctgagccatgagaattgcttgagcccaggaggcagaggttgcagtgagccgagtttgtgccactgctctccatcctgggaggcacagtgagactttatctcacacacacacacacacacacacacacacacacacacacacacacacacagagagagagagagagagagagagagagagagagagagagaatatattccctggaattgagatgactatgcccaaaggcacagatatttgtgaggcaccgtttttcctgcacactgtaaaatgggccctggggctgtgttttgctaaccccggagtaactcaggaccagctctgcagaatctggattaatcggtactttcaatctgtctttccttcctccattttaatatgagacattctctgctttgagctgaatgcatttaacaacctatcagataatccaggtgatgtgatcttgacactggaagccatcattcattctttcagcgggtgtataggaaggcccacctttgccgatatgtgctgggtgtcatccagcggtgggtaaccgaataagcccacccagtcctcgggcgggcgaggggagcaacagggcagagttagacgtggtgatcgcttctgaaaacccaaggcccttctgccacggtgtcttggcctttagggaagacagggcttcctaacagtagggaaggaattaggtaacagagtgagaccctgtctcaagaaaaaaaaaaaaaaaaaagaaggattagcacggatcactgctgtggccctgaaaagccaccaataagtgatagccattcttttcttgtcctattaaaaactttaacatcatttttttattgtagtaaaatatatgtaacataacattttccattttaagcattttgaaatgtacatgtggcactaatcacattcgtaatgttgtgaaaccaacaccactgtctgttgccaaaacttttcatcatcccaaactgaaactccatacccgttaaacacgaactccccatcgcccctccctccagcccctggcaacctcgaatctgtgttctgtctgtatgaatttgcctgttctagagagggttcgtataagtggaatcatgcaatgtttgtcctttggtgtctggcgtctttcacttagcatcatgtttttgaggctcatccgtgtttcagcatcggaacttcattcctttttacaagtgaatactatccccggtatagataggacacattttgttcatccattcctccgttgctggacgcttgggtctttccaccttttgcttattgtgatagtctacagtaaacattggcatacaagaattcatttgagtccctgcttttcagttctttggggtatatacctaggagtggaattgttgagtcatataatagttctatatttaactctttgaagaatccctgttttcctttcttaacaagcatggctgggtgcggtgagtcacgcctgtaatcccagcactttgtggggctgaggtggaccgattgccttagctcaggagttaagaccagcctgggcaacatgggtgaaacctcacctctacaaaataatacaaaaaattacccaggcatggtggcccatcctgtagtcccagctacttgggaggctgaggtgggaggatcacctgtgcccaggagatggaggctgcagtgagccatgatcacgccactgcactccagcctgggcaacagagtgagaccctgtgtcgaaaaagaaaaagaaagaaaacattttttattccttcctcttcagggtataatccaatgatcccggcagaaaatatagaaaatgtggtgaagcatgttgtcttggttcaccaatccgtggaccactacagycaacagtttctacagaaattgaggcgcagcaactatgtcactcccaagaactaccttgattttattaacacctattcaaaattgctggatgagaaaactcagtgtaatataggtaagccttggggatggggtggttgacaaaagtcattattatttatgggtaaggattcgagcgctgatcttttctttagtaagatsgggcatcttcagtattgaggccaaacraagcacatcttggattttgtgtcttggagcgattctttcatgtgggcaggaccctggcatgtccttatttttgttctcagtgttgagtcttagactttgaagctttacattttgatcacattagcaatttttaaattttattttttatcttagggatagggtctctgtttcccaggctggagtgcagtggtgcaaccatggctcactgcagcctcgacctcctgggttcacgtgctcctcccgcctcagcctcctgagtagctgggaccacaggtgcagccaccatgcctggcgcacattagagacaactatctgctgcagcagcatgcactgccggacagggctttttaaaaagtgctctggctgttggccaagggaagcactgtcttcagaaatacattcattttggctgatgctgtcccaagtatggcagtggaggtactgaaagacatgtgccatcttgtaaaaatgttttgttttgtttttgataagctgaagttaggcaaatctcagtgattgtgttgcgaacagtggccacctcgacgatgaacataggtgccctctttcctcagctcagtgcaagcgtctggatgggggactggacaagctgaaggaggccaccatccagctggaygagctgaaccagaagctggccgagcagaagatcgtgctggcggagaagtccgccgcctgcgaggccttgctggaggagatcgccgtcamcaccgctgtaggtgagtgagggcggggccagggcagcccatccccaacacccaatacccaccgtaggtgagtgagggcggggccagggcagcccatcccgagcaggacagggctctgccaggccgtccctgtgaaactgcttgtaggcactgagcgtgccatctttgaccctgcaattcctgttttctttctgaattcgtgtccagccagtcttgtcccctttcataagcactgagaagctaccatatgtaggcccctgcgctggtagcctgaggatgttcaggggagtggaaaagtcactcgaccctctatgggctggtgaactaagtccgtggggttgaaatgacctaagccttggcaccatcgacgcgggactttcttggttcttgaagctgtttcaaggttctttcttgggccccttccctcggtcttcttggccgagcctctgtgtcacctgcactgtcctgctcttgacgactctaccctctcgcgatgcctggcacaggacggctcctgcagcccacagctctgtgcctggcctctaagcctcctctctaggtctttgggccagtggcttctgatgtgtaccctccccagcttgttcccagattcctgcagatgccgctcaacctgcctgcctcttccttctcctgctggtccgtgttcgtgttgctgctaagtgtcatctcggttcagttcctttgtcattgcacccggccctgtgcacaggatccatttgtcatcactctggcaacagcaccttaacttggtgttggcaaactgcctctccccgactcccagtgcctgccatcaggatgggcttattctaaccctgacagaccaattagatgttctctgggactgcacattttgaatcagccaatataaagactgaagattatttgtgttcattcattgcacagcagcgccgtgaagagactgcattcagtgcccgagcccagatccctgaggcgcctctagtttatgtgtttcagcatcttccatgtctgtgagctaccatatcttcttaaaacaatttcacgtttttcttaactcgaccatcattagcttctgttgcttgcaaccaaagcaacttaatcgatagatatcctttcccaggaatttgtggcatatccctgctgcctgttttgatgctgagtcctcactgtggccgtgaagggtcccatcaatccctctatgtcatcttgcctacctaatttctcatgacaccctgtcgcctgctcacagcatcacttcttcatgcctgtgtgagtcctgcagtaacttgctctttctctccctttggtctgctaagaatatccgtaccacttctttcttcctgtccatgtttctccttccagaactttgatcaaatgcctcattcccacatagctgcactttgctttgatctgtcttttaaaaactatatatttctggccccctaaatgtaaaaaactatatattcctggccccctagatgtaaaactagactggaagtgtcttgaaggatgctggtattccacgtattcatctgtccagtcagcagatactgacttcagcttcatggcagccaccgtggtagggagagtgggggctagaaaccgaatgagactcaacccctgcctcgaagaagctcacaaccaagagagcccctcccccggtgcccaggccacagtttgtactgaggaccgcctatttgccacacctgtgtttagtgcctctcctacctgtgcttgtttttctttccccattgccatcatccttgtccagggtcaccttgctcccacttggaattttggaggaagcttcatctaggaactctgtttccagggttgcaaatggtagaaactgagctcaaagtggcttaatccaaagtggaaacgcattgattccagaggcatgctggcttcaggcacagctggatctaggattcaaatgtatcagtgggaatctttccttccctttcttggctctgctgtcttccgtttgggcttcatctcaggcagccggctctgtccatgctgagactttgggagcctccagcatgaggttggcatcctattagctcagcatccccaggggagagagggctcttctttcccatacattccctcaaagctcccagagttggctgtgattggacagatttgggtcacatgcccatgccgaaaccaatcctggtggccataggaatgggatacattgacacgtcccacagagggtagggtggagtgcaaacaatcctctctcctgagggtggctcttcagcacctgccccagcctccagcccatgcttctgcctggctgaaagagcccacaattttgctcctcagcatgactcaagcacctggcttcgccagccccctttgcaggctgctccccacactgaggttcctgaggcctgtaccagccctcttccttcccagccagctctggtggtgtcctgttacctctgcactccgttcctgctggcaccaccccccacccccgcgcctcagcacgctcacagcttagacagcttcctttctgcttttctgttccgaaggttccacactcgtgatcttgctacccttttctgatgcattcatccccctgctgccccagggacaagtagtgcctgggctggggaccctttacagtgtcaaggcccgtgcacggctttgcacgctgcaagtgccagtgctggcttgttagctgtggagatgggttccgagagaccttatcatgggggaggcagagcctctgcagccagcatctgtttgtagaaggcctgctgcattcatctcccggggctgctctaacaaagcaccatgatctgggggctgaaaacaacagacatttatttttttaaattaattaattaatttatttttttgagacagagtctcgctctgtcacctaggctggagtgcagtggcgcgatctcggctcactgcaacctctgcctcctgggtttaagcgattctcctgcctcagcctcctgagtagctgggattacaggtgcccgtcaccacgcctagctaatttttgtatttttagtagagacggggtttcgccatgttggccaggctgatcccgaactcccaaccttaggtgatctacctgcctcggcctcccaaagtgctgggattacaggtgtgagccaccatgcctggccaacaacagaaatttattctctcacagttctggaggccaaagtctgacatcaaggtgccaggaccatgctccctctgaaagctctaggggaagcctcttccagcttcttggggttgttggcagcccttggtattccttagcttagcttataaatgcaccactccagcgtctgtctccattgccacacgcccctcttccctgtgtgtctgcacatggccttctgatagggaccccaggcattggatttagggcccaccctcaccccgtatgacctaatcttaactaattccatctacaaagacccacttccaaataaggtcacatcctgaggtcccagtgggcacgaatcttggtggggtgacactgttcaaaccactgtgagccaagccctgctctaggttttggggttccggccctcggggaggtgctgacatcctagtgagtgagggcacccaggcagtgaatcagccagtggtgaaatgaaacttccgattgcgattggtgtcatgaagcaagtcagcaaggaagggagagagaggacgacagaggggcaggctccttagagggtggctctggctgggcccgagtgagcgtaggaagaggcgatgagaggcagaaggaggagatcgcagggagccggtaagcaggagggggaccccagcatcctcactgaacaccggcgaggcagggctgggggctatcaggagccatgggatttgtcctggatggagtgggtgggacacaggtgggccagttgaggaaggtcagagtcagggtggctgcctagtgctggaggccccacgcatggtgaggttttctgtcccaccaggatcactgaggctgccacattggccaragccccttagatccccgctagggctcaagccaacctttgaggactgcactctgctcagagccggggccgygagtgcatctcctctgagcccaagctttactcaccccctgtcctaccctgcagcygaggagaagaagaaactggcagaggaaaaggccatggagatagaggagcagaacaaagtcattgccatggagaaggccgaggccgaracgaccctggcrgaggtcatgcccatcctggaggccgccaagctggaactgcagaagctggacaagtcggacgtgactgagattaggtaatgcayctgagccaccattctgggcttccattccacctctgcaagccagtagtctccatgatcgtggcaaccaggagcttacaaaggagccgatgccacatgctgccactgtgcctggctctctccatggtggagactgttgttgccctcattttcggatggggaaaatgaggcccagggagatgaggtgggcgccccaggcatccagatcccccagctagtaggaagcagggcctgctgaccttgaacccaggccaagggaaggatggagtggggtaaaacagtgctcttcacggaacatgcgggggcaagtgtccgccctaagcaggggcaggatgctcaccatggggctgagccctgctgaaaacagctctgcagagatgtgtgcacaccacggccggactggcgatgcctgaatccatttccagccaaggaagctttcaaggagggtgagagtaggtcactattgaggcccccatacatcttgcaaatcaatctgtaagatgaccctgtcccccacaccagagggctcatctgctgtcagcgagggtaacgtggtgtggcgtgggctaacaagctttctcctcgcatggcttggcctccccagggcactgttcctgggctctgatggtcagttgagtcttgtgagtaaagccctgggagggaacactgtcctggtgccagcctccgcccactgcctctgcccctgtgctgcctggccccgcacagacccctcggcgtgggagcctcagctctctccttccccactcttcatccagaaggagatcagtcttcctggccccacacacgggtctcgcagccgagaggctccgttcctgggtcagtaatgggcttccattctgggctcccgctggagcggtgcatgttccctgtgcttcctatttctctgcctctgtgctgcctgtgaaggctgagcagcgctccttgtccaagtccgtgcccttgttttcttattggtgaaacatttgtgaatttgagcatggaattcagctcactccaggacagaatgacctcccggttcattcttgggaggtcacttggaggtgctgctgtggtcagcaagaagtcattagttcagtgttgaggatggtgtcaaggagggtataaggatcgatgtattaaaacttcagcactaggcgttggaagtttaggctgaggtaccaggacacagtggaagtgcacacccagcggaggggtaggagacacggtcagcacacacatcctccagggaaatttctagctaccggtgataggatttgggccactgctcccaggtcagcagcataaaaacatcgtgaaagcagagactaggaaggatttttgaaggggatttatttgaagagaaggaacggtgagtcccttccatcaatccaaggtggaggagtgggggggagcttccatggggccaaatagagggcgtggcatgtgtcccctgcagtgagacaggcattgcagacaggtgccccgctcacccctgagaaagcctaagtacaaaaggaataatttttacacattcatacatggctctgcctctttgctgtgtgacgtttagcaagtcatctaacctctctttgctccagtttcttcatttgtaaaatgtggataagaattgtctcggctgcatcagggtcttcatgaggatcatatgagcctatatgtgaagaactgggctgggcacatggtcagagccatgtaagcattagctgtgattatggctccagcatccaaaaggtatgctgggaaaagcccacggccactgtgtcctctatcagctgtggtcaccttcccacactgcaacaggtagtatgggtatatcatttctcatatacacttcctgaggattttcatgcatgaccaaggcaaccaggtacacaagggtctcttctcttcctgacttcaggttctgagggtttggagagcaggggatgcctgcaaatccttttttccttcttttatatacaaattataacaccctatgcatatctttctgcatcttttctgcttagcagtatattttggagagcttttgcatgttgatgtatgatgaacttccccgatattttagaacattccttcacattccattgtgtggctgtgccgtaatttatttaacaaggccttactgatgagtttgttaaataaattgattgtgtctccagtcttttgcctttacaaacagcgtggcaaagaataaatctgaccatagttcattgtgcacgtgggcgagtccacctgcaggatacatttctggaagtggaattgctgggtcccagggtgtaggcatttatagtgttcatagctgttgcctaatccccgccgtggggatggaacctatttatcctcaccaacaatccaaacgagtagtacctgctttttcctagacttaccaacagggggcgcgatcacatgttgggatttttgcatattttgtagatgagtggtacttgtgtagttttaatttgcatttctcttagtgtgagtgaagctggccttttttttttttcctatgagaaaagtgtgtctaagagttatgtgtatttccttttctgtgaacttggtttgcgtatctattgggtcgtggttattgttgctttttatttcaaaaccatttccaggggctttttatataatggggagctcagctttttatccataaggtgagttgcaaatcttttcctggtttgtcatgggctatttgactttgtttatgaggtttatgtgtgtgtttgtttttgccatctatgtttatttttatgtggcaggttttagcaatattttattttgtggcttttttttttgagacagagtcttgctcagtcacccaggctggagtgcagtggcacgatctcggctcactgcaacctccgcctcccgggttcacgccattctcctgcctcagcctcctgagtagctccagcctcctgagtacctccagacgcccgccacgacgcctggctaatttttttttgtatttttagtggagatggggtttcaccatgttagccaggatggtctcgatctcctgaccttgtgatccacccgcctcggcctcccaaagtgctgggattacaggagtgagccactgcgcccggcctttgtggctttttttaaatttattttttgagacagagtctcattctgtcacctaggctggagtgcagtggcgcgatctcggctcactgcaacccctgccttccaggttcaaacgattctcctgcctcagcctcacaagtagctggggttatagacacccaccaccatgcccggctaatgtttgtatttttagtagagatgggctttcaccatgttggccaagctggtctcaaactcctgacctcaggtgatccacccacctcagcctcccaaagtgttgggattacaggcatgagccaccgcacccgacctattttgtggcttttggatattgtgtcctagttaaaaggcctgatcacactgcaagattgtaaaataatttccccatgatttcttttggtactcttatgttttaattttttatatttaaatcttttatctattgaggatttttttcctggggttctgtgtgagtttggatccaatttgagtttttccagatgagtaaaatctggcttttctcaggtcatttggatgttaagcgcaatgagccggcacttacatcttgacaattttataatcttttaagtccttaaaaagcgcttccttcttatcatactcaatcctctttgtagaaatcattaaatgttaaggcaggaagatgaagagtcatgaagattagaagtagatgtttctctaactataaaactataaaagcctccctttgttgctggctcttgagtttcacttttcttcctttcattcattcagtagtcagtgggtgtctgtcccccaccccacccctgccctgagcaggcactggggcccatcagcagtgaggcaggcagggtcttcactgcgtggcgctgacactctgttttcctataggaatcccatgtgcatggggaaattatgtaggattaggttaggaaggaaaggtccttgctgctctgacagtggatgttgggacctgacctagtcatggtcatggagggcggagggggcaccttctctgagattgcaaggagctcggctggagaaaaagcagagacagctggtgtgtcaggggtagagtactgggaggtggggagtggggtttataaggattattttcctctagggagggtagcatatcattctccctttctcattcctgagtttgttttgtgatagaagaaaggaatcaaattaaacagacatctccctttctcttgacttgcaccctccacatttcacacaccttggtcatccggcattgtggaaagtggtatgttctggataagtgagatcccagagcgtggcctgcaacccaacagcagaaaacgtcactttggtagactcagaggatttgggaactggaaggttccagttctgcgtctctacttcacagatggggaaactgacgccctggctggttcctaacttgcccaagggctcaggaccccgccgcaggcctgggctccttctgtcttgaatctgaaaacatctsccccattctttccccacctgcttgttcacagagcggtggccggggcctggtttccatccaccctgaagggaccttttaaagacacttgacagccccgccgctttcctaagcagccaacaccagcgtgatcgagccttttcccggggactcagggcctttctttcatcactgggctttgtgctgaagtgtgggcgccctccctcctggctgttgccctggcttgtccgtacactatggggccttctctcctctgctgtctgtgtgggagtgtgtgagggttccggggtcaggaggggtgggggatttgctcactgcagaaagcctccaggttgctgtctgctcaggctgtctcctccctgtctctctgtctcctccctgtctccctgtctcctccctgtctctctgtctcctccctgtctctctgtctcctccctgtctccctgtctcctccctgtctctctgtctcctccctgtctctctgtcccctccctgtctcctccctgtcttcctgtctcctccctgtctctctgtctcctccctgtctccctgtctctgttcttgtgcatgtgtctccccctctgtccctccatccccctctttcttctctggctcaccccagcctcctaccagagcacaaatgcctgggcccctgcctggccgcccccacactgcatccatgccctccgggacctctgtctcctgctcttctctcctgcttttccttcctctcctgctttgccttgtctgtgctgttctcttccacttctgtctttccatggcgtggtctgggagactcctgtggctttcactgaccttgcctggcagtgggatgccccggtgagatgggttcggttccttctctggcctttgtaccagcgctgctgttctgtctcctgttccgttggcagttctggttctccagaggaacaagggcagtggacatctgcgttctggaggagcagagtgatgatctagtcttatcaaagccacagaacacaattacggggcaacatagcctggaaagagcccaggatgcggggaccccaggcttcccaggcggtgtcagcacagccagtcatgcaagctcccaggaccctgtttgtccatctagtaaatggggagagataatggttggtggtgatggtgatggtgatgatgatgatgataatgacaataatgacggcagccaccatttagagtctgaggaatcagccgagggtgtaattaaaacataggtgctcaggctgccccctaaccactgatccagacgctccggggacggcctgggtttgtattttaatgctgcccccgcaccattccaggcgcctggtctggaacctgagagggggacccggccctgcccttagggacgctcccgcccaggagtgcggtttgtgttgggacctggcttctttcgtttgcttgcagcaktagctccagggactgtcttttggttgagctcgtttttctggagctctctttcaggccagatcctggccacatcccggggttgtgacccacgtgccttggtttcttgccaggtcgtttgctaagcccccgragcaggtgcagacggtctgcgaatgcatcctcatcatgaaagggtacaaagagctgaactggaaaacagccaagggcgtgatgtccgacccgaatttcctgcggtctctgatggagattgattttgattcgattacccagarccaagtgaaaaacatcaaaggtgagtgtagccaygtgtgggaatcgccagggtggatctcggtctggcatctcaggctctgggacagggatggagggcaaggaggcttgtcgtgggcaggccctccccttctggtcagatggtatcggatggaacaggcaactgatggtcaccagaggaaaacagcagccccatgacgtgacccagggagagtggctggggatgcgcggcggcagccgtgcccactgagggttcgattcggcactagtcctagctctccgtgtcaggaaacaggatcttctcattggaacctagcccagccttgtcttctgtgcatctcacccagtgctgttcagtgcacatgcagaagcccagagctagtctgaccttgacttcccccctttctcctcttgtcagtgtcaagtcttctggaggtccctggggagtgggcatgggggtgggcagcatcactgatggccagcctctcctccatctttggttataggactgagttccccttgagctcagttcctgaccctgcccagtgctcagccaggcggtgatagtgtaatggtgttagtctttgcgaaaagcaatacaagttaacgctgtgtttgatggtttatttagactcttatcaaatgctttttcttagccccttaaaaacaaaagcaatctcaacacaaatgaccccaaccactacaaaaacccaaggcactccctctgtctgaatcttcattggatggacttccgtttatgtgaaattactcctggggtgagggtgcgggtgaaggtaacaggtgacctgtagtggcctgtgaattccagttagccacctgggtgcccagttgggagtctccgttacgccctgggtctcctgtgtgacacctgcgtcctgggtggcagtaaaccatgtcccttgcccacatctgaaacatccgtttatgcagaacccatcttggtttgacaccacgctgttggccgtaggagagctttgtgcattctgctcacagggccactgaagaataagaaactagttatgcttattttgtctattttatgctcccaagatgaagcttgccactcataaaaattattgcatgtttcacgttaggcctcttgaagactcttaataccacaactgaagaaatggaagctgtcagcaaagccgggctggggatgctgaaatttgttgaagctgtaatgggctactgtgatgttttcagagaaatcaagcccaaaagagagaaggtattgcccgaatgtaagactgccacaccactgccaagggacccattcagagtcagaattcacatgtacatacctttgctgaaaaacttctcccgaggttctgacttcaagctgcataaactttccctccaccmcccaataaatggcaatcctgaaacaccactatcacttaggcatagtgtgggtggtggacaagaccgaggtctgaaagagtttcaaacttcctgtgaaagtgtagtataaagatgttcagaccaggcgtggtagctcatgcctgtaatccagcactttggaaggcccagatgggaggatcacttgagcccaggagtttgaaaccagcttgggcaacatagtgagaccctgtctctacaaaaaaaaagttttttaattagccgagcatggtggcacacacctgtactgccagctacttgggaggctgcagtgagctgtgattgtaccactgcactccagcctaggtgacagagtgagaccctgtctcaaaaaaaaaaaaatgacgtaaagatgtttaaagttgtttctctagggtcaaagcagagtttctcagctgcagctgaatgtggcctggtggtggtggggggtctgtcctgggggatctgtcctggggggtctgtcctggggggggtctgtcctggggggtctgtcctggggggggtctgtcctggggggtctgtcnnnnnnnnnnnnnnnnnnnnnnnnnnnnnnnnnnnnnnnnnnnnnnnnnnnnnnnnnnnnnnnnnnnnnnnnnnnnnnnnnnnnnnnnnnnnnnnnnnnnnnnnnnnnnnnnnnnnnnnnnnnnnnnnnnnnnnnnnnnnnnnnnnnnnnnnnnnnnnnnnnnnnnnnnnnnnnnnnnnnnnnnnnnnnnnnnnnnnnnnnnnnnnnnnnnnnnnnnnnnnnnnnnnnnnnnnnnnnnnnnnnnnnnnnnnnnnnnnnnnnnnnnnnnnnnnnnnnnnnnnnnnnnnnnnnnnnnnnnnnnnnnnnnnnnnnnnnnnnnnnnnnnnnnnnnnnnnnnnnnnnnnnnnnnnnnnnnnnnnnnnnnnnnnnnnnnnnnnnnnnnnnnnnnnnnnnnnnnnnnnnnnnnnnnnnnnnnnnnnnnnnnnnnnnnnnnnnnnnnnnnnnnnnnnnnnnnnnnnnnnnnnnnnnnnnnnnnnnnnnnnnnnnnnnnnnnnnnnnnnnnnnnnnnnnnnnnnnnnnnnnnnnnnnnnnnnnnnnnnnnnnnnnnnnnnnnnnnnnnnnnnnnnnnnnnnnnnnnnnnnnnnnnnnnnnnnnnnnnnnnnnnnnnnnnnnnnnnnnnnnnnnnnnnnnnnnnnnnnnnnnnnnnnnnnnnnnnnnnnnnnnnnnnnnnnnnnnnnnnnnnnnnnnnnnnnnnnnnnnnnnnnnnnnnnnnnnnnnnnnnnnnnnnnnnnnnnnnnnnnnnnnnnnnnnnnnnnnnnnnnnnnnnnnnnnnnnnnnnnnnnnnnnnnnnnnnnnnnnnnnnnnnnnnnnnnnnnnnnnnnnnnnnnnnnnnnnnnnnnnnnnnnnnnnnnnnnnnnnnnnnnnnnnnnnnnnnnnnnnnnnnnnnnnnnnnnnnnnnnnnnnnnnnnnnnnnnnnnnnnnnnnnnnnnnnnnnnnnnnnnnnnnnnnnnnnnnnnnnnnnnnnnnnnnnnnnnnnnnnnnnnnnnnnnnnnnnnnnnnnnnnnnnnnnnnnnnnnnnnnnnnnnnnnnnnnnnnnnnnnnnnnnnnnnnnnnnnnnnnnnnnnnnnnnnnnnnnnnnnnnnnnnnnnnnnnnnnnnnnnnnnnnnnnnnnnnnnnnnnnnnnnnnnnnnnnnnnnnnnnnnnnnnnnnnnnnnnnnnnnnnnnnnnnnnnnnnnnnnnnnnnnnnnnnnnnnnnnnnnnnnnnnnnnnnnnnnnnnnnnnnnnnnnnnnnnnnnnnnnnnnnnnnnnnnnnnnnnnnnnnnnnnnnnnnnnnnnnnnnnnnnnnnnnnnnnnnnnnnnnnnnnnnnnnnnnnnnnnnnnnnnnnnnnnnnnnnnnnnnnnnnnnnnnnnnnnnnnnnnnnnnnnnnnnnnnnnnnnnnnnnnnnnnnnnnnnnnnnnnnnnnnnnnnnnnnnnnnnnnnnnnnnnnnnnnnnnnnnnnnnnnnnnnnnnnnnnnnnnnnnnnnnnnnnnnnnnnnnnnnnnnnnnnnnnnnnnnnnnnnnnnnnnnnnnnnnnnnnnnnnnnnnnnnnnnnnnnnnnnnnnnnnnnnnnnnnnnnnnnnnnnnnnnnnnnnnnnnnnnnnnnnnnnnnnnnnnnnnnnnnnnnnnnnnnnnnnnnnnnnnnnnnnnnnnnnnnnnnnnnnnnnnnnnnnnnnnnnnnnnnnnnnnnnnnnnnnnnnnnnnnnnnnnnnnnnnnnnnnnnnnnnnnnnnnnnnnnnnnnnnnnnnnnnnnnnnnnnnnnnnnnnnnnnnnnnnnnnnnnnnnnnnnnnnnnnnnnnnnnnnnnnnnnnnnnnnnnnnnnnnnnnnnnnnnnnnnnnnnnnnnnnnnnnnnnnnnnnnnnnnnnnnnnnnnnnnnnnnnnnnnnnnnnnnnnnnnnnnnnnnnnnnnnnnnnnnnnnnnnnnnnnnnnnnnnnnnnnnnnnnnnnnnnnnnnnnnnnnnnnnnnnnnnnnnnnnnnnnnnnnnnnnnnnnnnnnnnnnnnnnnnnnnnnnnnnnnnnnnnnnnnnnnnnnnnnnnnnnnnnnnnnnnnnnnnnnnnnnnnnnnnnnnnnnnnnnnnnnnnnnnnnnnnnnnnnnnnnnnnnnnnnnnnnnnnnnnnnnnnnnnnnnnnnnnnnnnnnnnnnnnnnnnnnnnnnnnnnnnnnnnnnnnnnnnnnnnnnnnnnnnnnnnnnnnnnnnnnnnnnnnnnnnnnnnnnnnnnnnnnnnnnnnnnnnnnnnnnnnnnnnnnnnnnnnnnnnnnnnnnnnnnnnnnnnnnnnnnnnnnnnnnnnnnnnnnnnnnnnnnnnnnnnnnnnnnnnnnnnnnnnnnnnnnnnnnnnnnnnnnnnnnnnnnnnnnnnnnnnnnnnnnnnnnnnnnnnnnnnnnnnnnnnnnnnnnnnnnnnnnnnnnnnnnnnnnnnnnnnnnnnnnnnnnnnnnnnnnnnnnnnnnnnnnnnnnnnnnnnnnnnnnnnnnnnnnnnnnnnnnnnnnnnnnnnnnnnnnnnnnnnnnnnnnnnnnnnnnnnnnnnnnnnnnnnnnnnnnnnnnnnnnnnnnnnnnnnnnnnnnnnnnnnnnnnnnnnnnnnnnnnnnnnnnnnnnnnnnnnnnnnnnnnnnnnnnnnnnnnnnnnnnnnnnnnnnnnnnnnnnnnnnnnnnnnnnnnnnnnnnnnnnnnnnnnnnnnnnnnnnnnnnnnnnnnnnnnnnnnnnnnnnnnnnnnnnnnnnnnnnnnnnnnnnnnnnnnnnnnnnnnnnnnnnnnnnnnnnnnnnnnnnnnnnnnnnnnnnnnnnnnnnnnnnnnnnnnnnnnnnnnnnnnnnnnnnnnnnnnnnnnnnnnnnnnnnnnnnnnnnnnnnnnnnnnnnnnnnnnnnnnnnnnnnnnnnnnnnnnnnnnnnnnnnnnnnnnnnnnnnnnnnnnnnnnnnnnnnnnnnnnnnnnnnnnnnnnnnnnnnnnnnnnnnnnnnnnnnnnnnnnnnnnnnnnnnnnnnnnnnnnnnnnnnnnnnnnnnnnnnnnnnnnnnnnnnnnnnnnnnnnnnnnnnnnnnnnnnnnnnnnnnnnnnnnnnnnnnnnnnnnnnnnnnnnnnnnnnnnnnnnnnnnnnnnnnnnnnnnnnnnnnnnnnnnnnnnnnnnnnnnnnnnnnnnnnnnnnnnnnnnnnnnnnnnnnnnnnnnnnnnnnnnnnnnnnnnnnnnnnnnnnnnnnnnnnnnnnnnnnnnnnnnnnnnnnnnnnnnnnnnnnnnnnnnnnnnnnnnnnnnnnnnnnnnnnnnnnnnnnnnnnnnnnnnnnnnnnnnnnnnnnnnnnnnnnnnnnnnnnnnnnnnnnnnnnnnnnnnnnnnnnnnntctgtcctggggggggtctgtcctggggggtctgtcctgggtgggtctgtcctgggggagtctgggctgggggggtctgtcctggggggtctgtcccgggggggtctgtcctggggggggtctgtcccggggggggtctttcccgcagggggtctgtcctggggggtctgtcctggggggtctgtcctgggggggggtctgtcctgggggggtctgtcctgggcactataggatgtttagcagcatcttcagcctcaccccactggatgccagcagcaccctccctccaagctgtgacatccagaaatgtctccagacagtaccaaacgtcccctgggggacaaaacctaccgcagttgagagcagcggggccaaagtcacatgaagatcacaaaatacaaagagaataaggttaatttgatcattttgagtcatattgtgaccttgcgctatagctcggaattgtattattcagaaagcttggaaccaatagaaatactgttactgtctatggtatattcttctgagtttttgacttagaaccacagtgtcatcttacggagacctcagtacatgaaagtaaaaccatttgataacttgggtgctgtgtcttctaatgggacatggagtttttgcagcaaacagtcgaagaagaaactaagaagccacgtgtctcaacatagcatatagaggctctgaaaagcacagacaccattagagcagtttagacatgtggcctggtttgaggccatgggatcgcggccccaccacggtccttttccccatctttttgcaaattgtcttcacttaggtggccaggctggagcggaatttttacctcactaaacgggaactggaaaggatccagaatgagttggcagcaattcagaaagagctggaaacattgggtgccaaatatgaggccgccatactggaaaagcagaagctgcaggaagaagccgagatcatggagaggcggctgattgccgcagacaaactcatctcgggtctggggtcagaaaacatcaggttagcgctgctcacgagcccacctgttgcggtttgtaaacggacgtcacccacagagtttctcgccatgttgattctttatctcacgttgtgtttttatgtgaaaaccatgtgaccaggtcttatgttcctattatcatgtttatggcagctaatggctattttataggctcttgtttgtattaggcactgagtgttatttattaattactaagggtcaaggaggcagtgcagctgtggagacgggggaatccataccatttagcagggtgctctaggtttgggaagtgttcacttcttggtgacctctaacccctgggtcttttctagaagagtctgtgggagaagcccatctctgtcaccgcacagatgccttctaagggtcccagtggcttgttcaatcctgggcttcagtcttaagtgatggggctgtttgatatttatgggcaagaccgcttggccacagcttattcaccaaatagggcaacaattttgaatctagcatctgtaagtgtggtgtagaaaacactgaaaaatgttgtttgcgtgtgggaaacaattttcagtatttcttaaacctaagtcttggggcatttactgaaagaggacaaatgaaacagacgctttcttttatcttgggtggaattctgtcattgagtgaggccagaacttgttagctctgccgggctgatttatatgtctttgattaaggcttcagaaacaacgtgattactacttaatatgatccacgcaatgtgattactgcttaataaagaccacaggcctttactgagccccctgcttgatgctggctccaaataccaggttcactagggtgggaagttgcaagataagctgttggtctctgttcctcacaaggaaagaatatctcaaaacatgtttccatctggctagccctgttagcaaggtatcaagctggttcttctggaatgttccttttggttgtggccagaaggtaaactcacggcagcctccctctcctcccgtgccaggtggctgaacgacctggatgagctgatgcaccggcgcgtgaagctgctgggggactgcctgctctgcgcggctttcctcagctacgagggagccttcacctgggagttccgtgacgagatggtcaatcggatttggcaaaatgacatcctggagcgggagatccccctgagccagcctttccggctggaaagcctgctcacggatgatgttgagatcagcaggtgtgtggcaccctgagccagcaggagggaggggacaccttagcacagggggtctacrtgggtgtcaccctggggggaggcaatggcctggggggcatcaccaggaccacagttggctcgactgcatggaagtggccgggcaagctgcaaacccagcacggagcccttctccctggcctctgaggaggcttgtgtggcctggggatgggtagattgttctggaaggccagtcctaccacccttagcccttggctcacaaattggtgagaaaaattcatttcccaatggstgtttcttccagatggggatcccagggccttccccccgatgagctctccgttcagaatggcatcctcaccacccgggccagccgcttccctctgtgtatcgacccccagcagcaggccctcaactggatcaagagaaaagaggagaagaacaatctgcgggtayggtggctcctcccagggcgtcttctgccccctattcctgttctctggagaatgcccctcccgcctcctgtacgtggcagtccctagcctcagcgaggctgggctgaaatgcttccatcctgacccccatgcggagccctcccccggctccgcctccgcctccaccccgtgggtctgccagggcagctcaaaccgccatgaactctgcctctcccctcgcaggctgtgagcaaccttagcttcgtgttcctctgtccagtacggggttcgtggtctgggtgctcagtcactattttttggagctgaggtgggggatggggatgcaggggaggagaggggagagtaatggcttgattgagatgtaattcacataccacacctttcccccactgaaaacatacaattcagtttgagttttagtatatttacagagttgtataccaatcaccagagtcagtcttagaacatttttattatccctggaagaaatgctacatcctttagccatcacccctccagtccttccrtttctccctccccgagcccctggcagccactcatctgctttccgtctgtgaatgtgcctcctctggacatttcttaggaatggactcagacgctgtgtggccttttgtgtctggcgcctttcactcagcctgatgttttcaaggtccgtccttgctgtagtgcatcagggcgtcattccttcctcgggctgaatgatattcyggtgtatgaacagacacattgtgttcatccatccatttgctgagggacagttgggttgtcctactttttggctgtttgaagaatgccgctgtgaatgttggtgcacacgtttctatgtggccatgtgttttcagttctcttggggcgatacctaggaatggaattgccggggcggcccaatcactttttgctgagctaatgaacaaattaattattttcaatttagcttttcctcatttttttctggtccttgatctcaggtatttgcctgctgttagaggaagcccatttgtactccaaggtcaggggaacagtctgcctccaaaatgcacatggagctatcagggagcaaatactatgagggcaggaacttttctagactccctcttccctcagcctgccagggagcactgaaattgtcagcctacccctagtccaattccaacatctaccctctctcttaaagaggaggggttctagcttacgggagaggggctgaggaatccccttcctttcctctctaccctgtttgagcaagatcctgccctgagcctggacctcatggtgtatatgcgttataccccttgcttctctcttcttttcacctctggccccctccaagttcctggcccatccacttcccacttccaagccattctccccttatatttggcagggccacagttaaacgtgggctttcagcatctgcctcccttctcttccaggtcgcttcctttaatgaccctgamttcctcaagcagctagagatgtccataaagtacgggacccctttcctgttccgcgatgttgatgaatacatcgatcctgtgattgacaaygtcttagaaaaaaatataaaagtctcccaaggacggcagtttattatcctgggaracaaggaagtggactatgattcaaatttcagactgtacctgaacaccaagctggccaatcccagatattccccatccgtgtttgggaaagctatggtgatcaattacactggtaagaatgtgtagaacctccactgctaattcagatggttatgagggagaccgcaacctcagatcaaggcattcatgggacatcatttcactcagtgaccccagatcattctctcataggcacatctggactagtcagctcttaccaattaggtaccacttagaaggtgtgaggccatgagtcacctgtcatgagtcacgctgagacggggccgtgggcttatgtgttcacacatggggtgggatgggacctctgactgtgggggcaggaagttactctatattcgtgtatttaaaatacatgttgtgatgttgaattttttttttcttcctctcagttgaattctgatagaaatgggatgttatctcttacattctctagggctgtcatgctcctgcttaaataggctaatttgatttggatgtactttcttttcttttttctttttctttttttgtacagatggggtttgtctgtgttgtctgggctcaaacttctgggctcaagtgatcctcctgcctctgcctcccaaagtgctgggattacaggcatgagccactgcgcccagtctgggtatactttaaactatggcaccccagtccgtggaagcctgggttttatttcagtgtgttttttcctttttatctgccactctgcaccacagcatcgctgttttgctcctgcctgccaccttgctgctctagagtgactttggtgggcagtgaatcctcgtgcctctggcctgctggctgagacccgcgctaagcttgtcccgtcacagcagggcagcgggagagactgttgttgggggccgcaggtggtgarggcctctcactgtcccccacagtcacgctgaagggcctggaggaccagctgctgagcgtgctggtggcttacgagaggcgggagctggaggagcagygggagcacctcatccaggagaccagcgagaacaagaacctgctcaaggacctggaagattccctccttcgggagctggccacgtccacggggaacatgctggacaatgtggacctggtgcacaccctggaggagaccaaatccaaggcaacagaggtagcaaccacagtggaagaggccgtgagtcaggcggggcctgcatgcgccgttggagcgtccatttctctgtctgctcaatgagaaaatggggctctgtgatctcagggctaaaaacccacctctattgggatgtgctgtggggaggggagccctaaaggtgttcccagggacccttgggcatcaggtcagtctctttaaatcgagagtgatagaaaatccagccctgcctggcttaagtcaaaagggaagttatcagctgagaaagcagaaaagttcagagatggcctcaggtggggctggatccaggacttcaaaaataccaggaggacctggtttctgtccatttctgggctgggccttctactgggttggcgtcattctctgccagctccccacatggtcataagactggtctggcctcacgtcctctcgggtccaaacccaaaggggtaagtgagaatcttcctgttcctaccgtgaaggtcctgagagtcacttaggtcacgtttctaccccaaagcagccctgggagcttggggatgctaggctcaggttagctggccctgggtcacatctcctggagtcggggtggaaccccatatgggaagaaaagggagagggcagtaccggagacttacaagcagtgttactaggggaaggggccatgggtgcaggggcgtcagccacaaatattcaccccttcctacaagagggtgggtgccctcgctcccctgcagtccctggatactttcaaagccctgaagcattgtacatacctctctgctgtccccctgcccctcctgccctctgcccacatctcagtcttcctgtttccagggtcacctgtgcttttcttcaggtctcagagaaactcaagctggcggagaagacagccttggacatcgacaggctgcgggatggctaccggccagcagccaggaggggggccatcctgttcttcgtcctgtctgagatggccctggtgaactccatgtaccagtactccctgattgccttcttagaggtcttcaggctgtcactgaagaagtcgctgcctgattccatcctcatgaaacgcctgaggaacatcatggacacgctgaccttcagcatctataaccacggctgcacaggtgagctctccccacagaggaggacatgttagtgtagtttggtgtgccagacgtggctttaaggaaacgtgatctgtgaaaatggaaagttaccaaatagcattttttcttttttctttctttctttctttttcttttttttttgagatagggtcttgctccatcacccaggctggaatgcagtggtgcgatcacggctcactgcaacctccacctcccaggctcaggtgatcctcctacctcagcctccagagtagctgggactaaaggcaygccaccacacccagctaagtttttgtatattttgtagagatggggtttcactatgttgcccaggctggtctcgaactcctgagctcaaacgatccacccaccttggcctcctgaagtgctgggattacgaggtgtgagccatcatgcccagctccgaatggcattcttgagtctggcgattcatgttacaagaggaatgtttaaagcactgaattttaagatagcagctttattgagacacaatttacataccataaattcgtcctttaaaaatataccattcggtggtgattcatagcatatacatagagttgtgcagctatcactactctctggctccggaacgtttccaccagccccgaaatgaaatcccatacccattagcagtcaccccctggccccccactcctagtccctggcagtcaccgctctgccttccatctgtaaggatttacttgctctgaacacttcatgtcaatggcatcatacggtgtgtgacttcatgactggtatctttcactccactccgtgacctcacggttcatccgtgttgctgcgtgtgtcagcgcttcattcctgcctgtggctgagtcacattccatgtatggacagaccgcactgtgtttatccacccgtcacctgatgggcatttgggttgtttcgcttgttttgctattaaggcaatgctcctgtgaacatttgtgtgcaggtttttgtgtgaatgtgtgtttttaattctcttgggggtatatctagaaagggaactgctgggtcatagggtaattctatgtctaacttttgaggaactgccaaactgttttccaaagtgactacagtatatttaaacccctaaatcattgattttttcaaaagactttttattatggaaaacatatgcaaaagagaatagtgtcgtgatcgtctgcacagccctcacctggcaatgatyagctctggatttgtttatatgtaacacggttccccatcaacccagattatgttgaaaatttgcttcatattcagatcacttatctgtaagtatgttagtttgtatctctaaaacagaggtcagcaaactttttctggaaagggtcagatagtaagtgttttaggctttgaaggctaagtgatttctgccacaactactcacttctgcagttgtgtgccacaggccccactgggcatggtggcaattgtagcacaaaagcagccattggatgatatggaagtgaatggccatggctgtgttccaataaaacttttttagcaaaaacaggcagcaggctggatttggccccttgcttgtggtttgcccatccctgctataaaatagaaggattctatctcaaaacatagacataaggccattatcatatccccaaattaataattcctgaatatcatcatattcaggttttcaaatgttcccaattgtcttatatgtcatgtttcacattattttaaatcaggacctcattaaggtctatacattataattggttgtgtcacttaatttctctcttttcccccttgcatttatttttatttttgtttgtttatttttggagacagggtctggctctgatgcccaggctagggtgcaatggcacaatcacagcttactgcaacctccacctcccaggctcaagtgatcctctcacttcagcctcctcagtagctgggactacaggtgcatgccaccatgcctggctaatttttaaaaaaaatttgtagagatggtggtctcgccatgttgcccaggctgatcttgaactcctgggcttaagggatcctcctgcctcggcctcccaaagtgctgggattagaagcataagccaccgtgtctgccccaccccttgcatttatctgtggaagaaacctacctgattgctgggttgtttcccgtcgtctgaattttgtgctcgcctctctgtagtgtgtcattggaggaactctcaaatgccaatacatgtagttcttttctcatgagactttaggattccccagtgaagagtcttcagccttttcctagagtatgtaatcctggctgccagccttcgtggaaccaagtgagaaaagaaggctgtcgatttcagcattcrtcgtgaaaacgttcactgaaagccatattttcagtacggtttaccctcaactatgcctggtgttcccccgtccagagaccctgctttatcttttccaaagttcacttgggtggggcaggcagttgcctggcagcatggagtgagaggggatctgggatctgacggcttgtcaaacaagctgtccacccatcttcctgtttttagcccatattcacccacacttccaaaggatctggtactgccagttcctgagcttttgatgtgttctgtggtttgcatctcagctttatctcctcctcatgtgagagtcaactttttcagctttgctaaatcagttatcacttgtccatctgtctgtagcttgcagttttttttttttttttttttttttttttttttttttttttgagacagaatgtcactctgttgcccaggctggagtgcagtggtgcgatcttagctcactgcaaccttcgcctcctgggttcaagtgattctcctgcctcagcctcccaagtagctgggattacaggcacctaccaccacactcagctaatttttagtatttttagtagagacagggttttgccatgttggccaggctggtctcgaactcttgatctcaagtgatctgcccaccccggcctcccaaagtgctaggattacagatgtgagccaccacacctggcctagcttgcaaaattttattgctattgtcttttctccaattttctgggagcttatacctttttaaaaaactaaccattaggccaggcgcggtggctcactcctgtaatcccagcactttgggccgccagggcgggcggatcatgaggtcaagagatggagaccatcctggccaacctggtgaaaccccgtctctactaaaaatacaaaaattagctgggcgtgttggcaggcacctgtagtcccagctactgggggggaggctgaggcaggagaatggcttgaacccgggaggcggaggttgcagtgagccgagatcgcgccactgcacaaaaacaacaaacaaacaaaaaaactcaccatttcagttggtttttgaaaaggagttgggataaactcagaatggccatttttaaccaggggcctgtagagtgacctttaggaagcagagggtgggtaggacacactcgtgtccctttccagtcctcttctgctgagacactgtactgacagtgatattttccatgcaccagcgtttggtgtattagtttgccatgcctgccataacaaaataccaccgactgggtggcttaagcaacagaaatttattttctcatagttttggaggtcagaagtccaaaatcaaggttttggtaggtttcgtttctccttaggatgctccccttggcttgtaggaggctgtcttcctgctctgtccacacaaggtctttcttctctgcgtgtgaatccctggtgtctctgtgtgtccaaatttcctcctcttataaggacaccagtgaggttggactgggcccaccttaatggcctcatttgaacttaatcacctatttaaagaccctgtctccaaatactgtcatattctcaggtactggaagttggggcttcaacataggaagtttggagaaatataatttagcccttaacagttgggcagaaaagagattgtttctatagggctcacttaagtagccaaccctcctaacacatataaagtagaattcaaattacaaattttgacttaaacaatttttttttccaggaacacatgtcttctgttaaaaagcaaaaaagaagaacgctggtattttgcatccattaataaagagtctgttgatggagtgtgtgtcctctgcaatagaggttggcaaccccctagccagcatccaaatctggcccactgcctgcttttgtaaataaagttttattggaacagggccatatccatttgtatacatattgtctatggttgcttttgcactacaatggcggagttgagtggttatgacagagaccatctagcttccaaagccaaaaatatttactatctggccctttgtagaaagtttgccaacacctcttctagactctaatggacacaaatgccatggagtcaggcaaacaacctgccttcrgtggagagggctgcccctgctgtactgcccctcactggcttttcctcttcccaggttggtgtgattttacctcctgtagacatggccatttccgttacatacaggagcatgtcactacagactggggcatgacctaggaactgagctcatctctcttgaacttagatattcatggacattaggtgcaaagaggggtaaatgcagccatacagttcgagtgtttcatttatcttacgtttaagcacagtgtgcataagaaactcagttttttaaaaatgaattttaagaaatcaatactcatctgatgtttccctccagggctgtttgagaggcacaagctactcttttcttttaatatgaccatcaagatagaacaagcagaagggagagtccctcaagaagaactagatttctttttaaaaggtaatgaatttgcctagcttcattcctcccatctccttgcccacatgatacatgtatataagtttgtctgttgaaacaaacaataacaaaaattctccttaaaacttggcttccaacagcactgcatttttcactattccagttgatcattccagcctcagaaatggctctggttgaaatcggagcagccagcctctgtctcggggccatcctgaggctggaagctggatgctgcactgagcgcctggttggtgtcactggcggtgacgagggcaagcctgggccacttcctgtttccagtctccttcttgaaaagtggacttttcccaaaagtgggagaagtcgaagcagagttgcttgctttgtgttagtggtacaatggctgcttgcttctcttctgttgtgattaggaaacatttccctggagaaaagcaaaagaaaaaagccctgcgcttggttgtctgaccaaggatgggaagatatcattcttttatcagaaatgttttcagacaactttgggcaacttcctgatgatgttgagaataatcagactgtctggcaggaggtgagcccacgttccctttctcctcctctccttccccacatgtcaacaatctccaaacctcaactgtggcccaaccccttaagagaagacactcctttgagtaacccattcagtgtgtaactgatgccctgtaactccctgattggaattctcctttggctaattcagctagttgtatgggagatccaaccatctacctgtccgtccgtccatccatccatccacctacccacccacccatccatccatttacccaccgacccattcatctacccatctgcccacccacccatctactcatccatccatccatccatccatgcacccactcatccatccacctacacacccgtccatccaagaaatagttgttgggcatctgccatgtaccatgtcccttgatgggcactggggactcagtgaataagactcagttgctcctttctcaatgtcatagcctttgggggtagagaatgacagatctgaccaggtggccttcagttagtacacctatggattctcrtccctttccagtggcttttgccaccttcacacataaatggggacctatgtcatttctgagttgacgcacaatgaatattctttgcttttcccagtggtatgacctggattcactggagcagtttcccgtccccttgggttacgataacaacatcacccctttccagaagttgcttattttgcgctgtttccgtgtggatcgggtctatcgggccgtgactgactatgtgactgtaacaatgggagagaagtaagtgtgtcgttttgttgatttgccactttccgtggggtggaatctctagcgtcctcccaccttggactcaaagaaagcagaggctgaccagctcccgagacagctgtcgccaccctgctgtacaatattcgatagccgatattctagaattcttcaatattctagaacagtgctagtcataagaaattcagtgtgagccacatatgcagtttcgaaagttctagtagctacattagaaaagaaatgggcgcaattaattgtaataacattttatttaaatgaatatattaaaattatcatttgaatgtataatcaatatgaacatgattgagacattttacatgcttttttctggtattaagtctacaaaatcctgtgtgaattcacacttacagcacatctcaattggggctagccacattttaagtgctgtgcctcacggccatcgcactggacaatgtagctctagcatggggtacgaagccaggcggagcgtgtggggctgcagctcagatgtgcccttgtagccagcaggccatggcagtgagtgatgaggctgggtggggtcctggtccctgggcagctgcccttagctcctgctgactgataccaggtgccattgggaacccacagtggctggatcctctgactctgaaagaagctaggacttcagattttttcctgaaatatcccaatatctttgtgtttgcaatgaattttaaaacgcacatctgggtcaggtgcggtggctcacacctgtaatcccagcacttcaggaagctgatgtgggaggatcgcttgaggccaggagttcgagacccagcctgggcaacatagtgagatactgcctctaaaaaataaaaaataaaaaagaattagccaggcgtggtggtgcacacctgtagtcaagctactaaggaagctgaggtgggaggattgcttgagcccaagagtttgaggctgcagtgagctgtgatagtaccactgtactccagcctgggcaacagagtgagattatatatttcaatttaaaaaaaaaaaaaaaaaagaaaaagaaaaaacccacacacaaaacacaaaactcaaaactcaagatgtggaccattcaggacacgcctgtggaacctcagggttttgtgccatgggcaggcccacctagagggcaagctgaggtgcccagctcagcacaaaccaactgaatcgagtgtgagggggtacagagaagtccctgccactcaggagttccccatcagggtgggagaygtgcatagaaactagaatctaaaacagggaagactgcaacgagctatcccagaggagtggtcagaaggttctggacaccggaggaggcagcgctgatcagacagaccagcccctggtctggagctgtcctcgcgggagagttttctgactgtgtttctttcaccaggtatgtgcagcccccaatgatcagctttgaagctatttttgagcagagcactccacattcgcccattgtgtttatcctgagtcctggctccgaccctgccactgatcttatgaaattagcagagcgaagtggttttggaggaaatcgcctcaaattccttgcaatgggtcaaggtcaagaaaaggtaatttgtggctgaaaggaacaagctctacgtttaggggaggtccctggtgtctgctaagaaggagctaacctgggtttaagctgagtgccacgccacaaatcagttggatgcatttccgagctaagaagcagtaatgaaacactgggaagatgacaataatagttatgatttcacaacctcatgttgtgatcatggtgctgtgctgttttctttttttttcctttttcttttctttttgagacagggtctcactctgtcacccaggctggagtgcagtggtgcgaacatagctcactgcagcctcgacctcctgattgtgaagtgatcgtcctgcctcagcctccccagtagcagctgagactacaggcatgcgtcaccatgcctggctaatttttttggtattttctgtagagaaaaatacaaacacgtcaccatgttgccctggctggtcttgaactcctgggctcaagcgatccttccacttcggcctcccaaagtgttgggatcacaggcatgagacacgatgctcaggctgtgctgttttcaaagccctttcacacacagtccttaccttccttagtccctgaacagcctcattgtggatcaggattattatggccccaattgcatggccaagggagtgggtggagagaggctgagcccaggaccattcaggacagaactgtggtgcaaatcctcctacctttctgagccagtgagctttctttgctgaggtcttgcctctctgcatcacagtgctccctgctagaacttgctacacaagttcagtacaatgtgggacaaagcttgcaggaaaagtctgtgcgtcagtaagtgtgatggttgcaggcatgcgtgttggggtcagagggagctgactgccagtcctggctttgctatgaactgtgaggctttgggtaagcccctctactgctgaaagcccctgggtgagatgaggatggcaatacccatgctggatggcccaggaggcaagccctgggcaccagcaaggcgggccagctctctcaaccacaacactgaaataagctattgtaacgccagcactcatgtgttttaagccatttcagaaagcaaggcttgatttgggtgtttagcttgtttgtgctttgaattacatttgggaggggacatggtgattgttttccaggcctagggccctgaagatcttacagtggccaggacagtcccgacttcctggtgggctttagctggtctcttgcagccctgctcaggagtcctcaggggacaggagcgactgtgtgggaggagctgggacttccagggccagggaggcmgatgagtgcaaaatgctcacccatcttccaggctgggtgtgaccagctcagtgcacccacggggcccatggggtttctcaaagatggtttatttgaaggctccacctgtagctcctggatcctcggcttgcttttggcttctgctggagctgccatcgcccttctgtgggtgtggagtgggtctctggagagcayggggttgggtttggatgccaacccctctcctcttccctctcccccggcgcaggtggccctgcagctgctggagacggcggtggctcgggggcagtggctgatgctgcagaactgccacctcctggtcaagtggctgaaagatctggagaagtccctggagaggatcaccaagccccacccagacttccgcctgtggctcaccacggaccccaccaagggcttccccattgggattctgcagaagtccctaaaggtctggcttcrggatggacatcaacatgccagcacgcagcttctcagaacacctgcatgctgctctggggccggggtgtgcctttgtctgtgtagaaataaaccttaggctgcaggtgaaaccttgcggttgaaacccttctcaatcccacctctctctttagagggagccgctgtcctgggttgggtgtttgtgactcccaggcctatctctaccaattctgcatgtgtccctaacaatatctacgctacttttcataaacttcacggcccccccccccacacacagcctgcagttcgctagtgctgactgcaggagtttcgcgtggtttacatgccccatttaatttattctccrggaaattcttttggaaaggttttgtcattctctgyctctctctctctctctggggaggtggagggaagactttactttcattttatatatagtaaaggatctcatggttcagaggaaggtcaaagactcttgacccttgaccctgagagccagaacatctagtcctttaacttctcagcctgggccctggacaagagactttagctattggaggtctcagacagatggctccgtagagaggaaggaaagcgcagtgcctgcattgtgcacactcttccaagcttgtgggcctgcggtctccatcactgtgtgttttcttctcttctgaaggttgtcaccgagccacccaatgggctgaaactcaacatgagggcaacttacttcaagatctctcacgaaatgctggaccagtgcccgcaccctgccttcaagccgctggtctacgtgctggcgttctttcatgctgtrgtgcaggagagaaggaagtttgggaagattggctggaacgtgtactatgacttcaatgagtctgacttccaggtgacagtggctgcttctccttggaaatggcttccttaggcggcccacttcctcccgactttcctcygggttcaaccacagcagggttgcaccgttcccagcagccttttcagaaaagtatcagaatgtgaacagcttggtgggtttcagtataactgagcgtgttctcttctttcaaggtctgcatggaaattctgaacacgtacttaacgaaagccttccagcaacgggacccaaggatcccgtggggcagcctcaagtacctaattggagaggtaggggtgaccggggatccttcygcaggtgcctctggggctacagagctgtggcctcgtgcccctattttcctctgagccctcagaaccagcctcttctgcccctgtgttccccttgggtttctgtgacaattctctctgctctcacctggttgttctttgtcctaagtgagctctgttcacatggaggttccctgagctggatccatggctggggatccaggcaaggcatcctctagccccttgcctcagctgttgctgtatacagagctcacaggaagcatccccggtggtctgcacacggctcaggcagtgacatcaattccaaagacagaagcagctgctggcttcttcagctgtttgtttgatgtgtttgggggactttgcctgctgcacaggagctcccaacacttcctgagggcttcttactgctttgggccctatcccttgggaagccagcaaagccacagatcaattgtgtgaacagtggcccgaaaggttatgcaagtcaacaggttcaagccttgcagcagccaggctgctggagtctcttgaccctgggtgagcctctggccccgggcccccagggtgcacacagtaggttctgagctcctggctggctctcaggccctctaatttcaggtcatgtatggaggacgggccatcgacagctttgatcgccgcatcctgaccatctacatggatgagtacctgggggacttcatttttgatactttccagccattccacttcttccggaacaaggaagtggactacaaaatccctgttggtgatgaaaaggagaaatttgttggtgagatttctcagacatgaaaagatgttttcaaggctttttctaagggagaccatacatttcaaccggctcctctcctggtgggggctcctcggctggtcaggtgtggtctgttaagcctgttaggtggctcggcagacgcttcctggctgcagagctgactgatagagttcagatttcccatcctggaatgatggtaaataaatcaggttccacctggaagggcagaatggccacagtgaagctcactgagccattttcgtaaaagatgaacatacggctggactgggtgtggtagtgtagaatttttacattaaaaacatgtcattggcyggtcatggtggctcgcacctgtaatcccttctttggaaggccaagaagggcagatcgcttgagcccagaagttcaagaccagcctgggcaaccaagcaagatcccatctctacaaaaaataaacaaaaaatcaaaacaaaaaaacaaaaaacaaaaatattagctgagtgtggtggtgaatacctgtagtaccagctacttgggaggctgagatgggagaagagcttgagcccaggaggtcgaggctgtagtgatcaatgaccatgtcagtgcacttcagcctgggtgactaagaccctgtctcaaaaaaaaaaaaagtcaccctctaaacagtggaaattagtcttgcatgtcttggagactttgaggctgtgggccctgagaaagcacaggtggctggacagtgccacctccgttgttctctgtgattgcagaagccatcgaggccctcccgcttgccaacacgccagaagtgtttggtctccaccccaacgctgagattggctattacacgcaggcggctcgagacatgtgggctcacctgctggagctgcagcctcagacaggtaaactctactcaggaggacttcattagtttgaytggggttttacgattgcttcttgtagccctcccacgttgctgatgcctttcccagaactggaaggctcaggrggctccggttctgcacgtggatgccttgctttctctgaaaagtgtcctggttttaggggaatccagcagtggtatcagccgcgatgattatattggccaagtggccaaagaaatagaaaacaagatgcccaaagtctttgacttggaccaggtgaggaagcgcctcggaacagkactctcccccacttcggtggtgctcctgcaggaactggaacgcttcaacaagcttgtggtccggatgacgaagtctctggctgaacttcaaagggtgagcctgtctctcatgtgcagattactgcctagatacgtggcacctggggttctgatagagtcctgyccgattgctcttgattctaaataggccttggctggagaagttggaatgagcaatgagttagatgatgtggccaggtctctttttatcgggcatatccctaatatctggagaaggcttgctcctgacaccttaaagtcccttggaaactggatggtctacttcctgcggcggttcagccagtacatgttgtgggtaagtggcacgtcaccgcctcctctctgccgattcaggtgtcagcctagactcctcaaaccacctcccaatcccctctttccattgcccagcagtaacctctgttaaagtttattgggtgctctggaaatggtctgagattcttacaagcctatctgtatcttttgtttttccttttcttttgaagactttgaagcatactcttacatacccgattattttatctaagtgtatatcttggcacttgttccatattagtacacagctagctcgttcttttttagagtatgccattgtacaaatgtttcatatcctttctcctccttctgtatcctaaaaatatggtaactgcctacatttcggtggttaccattttttttttttttttgctaatacaaataacattctggtgcacatgtatatgaatatgcataggggtatattccatgggtaaattctgacagtggaagagttggatcaaagagcttgtgcattttaaattttgatagctcttgttggatggttcttggaaaggctgaaaccacagtctatgagagtgcttctttcctcactccgctgcaatgctgcgttcttaacattttggatcactgtctccctgataggtgaaaataatatctcattgttttgcatgtctttaattatggtgagtctgagcgtatttyrcatgctttacagacattttgtgtttgtttttctgtgaattgtccttttgtatctggatttcatttttagtgaggtctccatctttctcattgatgtttaagagctctttgcaaatcaaagaaattagcccttggtctgccagtgttgcaggtatttctccaagcttgtcataagtcttgactttgcttacggtattttttccacagaaaagctttacatttttccgtagtcaaaccyacaaggcttttcttttttatcctgggctttgtatttcctactccacgatatgaaagcattcattggagatgtggcccagtacttttgtggttttatttatttttatatctaaatctttgatctacctggaatgtggcagtccagattgtttttctcagacaggcggccagttgtgccaacgccatcttttgccacttaggtgaaatatgtcttttatcataaactaaacttccaggccagctttgacctggcattggatggcagccccaggctcccagcacttgtcctctcttctctccaggtgaccgagagygagcccagcgtgatgtggctctcggggctgcacatccctgagtcctacctcacggcgctggtgcaggccacctgccggaagaacggctggccactggacygctccaccttgttcacacaagtgaccaagttccaggatgcagatgaagtgaatgagcgggcgggacaaggtaccgtcagctcgttagggatccacagcctctcacttaggatttctctccctgaaccacctccaactcaaagggacaggcatagcgtgggcctaaatgggccaggccatgtttgaaagccagcctgctgcaaatatttcctgtgtctctgcactgcccatgtcttaacacctctgagggtggatacggaagtttctcttccactttctccgttgagacctggggtctatggcaggggagacctgaaccatgttcactctgctagctcatggcaagtgggctcctaggtcagaattagctcttgcaaaaaccatcaggtggctttcttgtaacccctgacggggccaggggcatgggagccacagagcagcatggactaacttggttggaactctttgattatgccagaacttcaggtcccttagacattggttactgactgtgcaaatgagagctggaaactgctgtttccccgggtccatgttgtcttagagttcttttaactgcaaggaacaaaagctcttttgagatggcttaaggactggggacttacggtaaagatgcagggactctccaggtctcagtggcaggggaggtggcaggtgtccgggccacyactctctctggggccacaggagtgtgttcctctctttgcacatctgctgggtcctcctccccggagaccactttctctgtgaggcttcgacttcctgctccccagccacttcggctcacagggtagctggggttgccatggtgcccattctgactctgggaccatgcatctttctagcctgggggcccagggtggtctaagtccgtgggccttgatgccccaggaatgaggattcctgggggagaggccaccgccccacacccatttctctgggccatggggcagggccacagggtctcctgtctgggctgctcctccacagagggaaggtgggcaggacagaaatgctggagaagggcctgggctgtccccaatgcgctggggaggmggccagccagtggcctgtgtgtcgctgtgtgtgcgcctgatagagccactccgtggcaggctgtgcatgctccagttgtatccagtctctgccttgtgtccctaggatgctttgtctcaggactgtacctggaaggtgctgactgggatatagaaaaaggatgtcttatcaagagcaaacccaaggtgctggttgtggacctgccgatcctgaagatcatccccattgaagcccatcgcctcaagctgcaggtgaaggtcccagcccctcctctctgacaccagggcccttcctcttctgactgtagttatggctgaggtggtttccaacagtcctactttttaaaacaggggtgcctaagctttatgggctgggragagtcttggagccgtgataaaagctacggatagctgcttcctggaaaaggcgcrgctgtatgtgtgtgtggatgccggtccttccagaggtgtcaggctcaagctgtgatcctgtggtctagactaaccaaggggagactccctcccttcttgcaaaatgctgcagacattgcctgagtcataaagtggttcccgctggtgtggacagcagatgtcttctgctctgcctgggccaggacccacttttaaccagggtgtcagtgtgaagccaggtccccgtgaagctggyggagggtggccctgagcagccccagccttgtgcgtgttctcaggtgcagtcttgcacaggggcccctgcctgtcaagacttacactgcacctctgcctttatccctctgcaccctctctccgtgggggcatctcacctgcctttcccttgcagaatactttccggacccccgtctacaccacctccatgagaaggaacgccatgggagtcggcttggtttttgaagctgatctctttaccacgaggcacatttctcactgggtgctgcaaggagtatgcctcaccctgaattctgattaacctttgggtgaagaaaactgcttaatgaattcggagcctggggttgtcrgagtgatcgggtctgctgtcatttcttggggcctctcaagaggcaggagggggactgacactgatttttcatttgaaatcagccacttaaatctctttccatacaaattaacctgaatggttttgtttttaatactactttttaaaaggaatttatataaycaaaaagtaaatattggagagtattttaagatgtgtggagttttcttttccttctcagagaaaacacttgattaggcaaaagtgcctggcatacatagcattggcacaagtgagaatcctaatgtaatttccaaaggtgtgttttcgatgatccaggtctgtttcagcagatgctcctttttggcaagaagggctgatgatgtcgggcacagagcagaagtgaccagtcacctggagccacttctcccccttccagaactctctggccctagcttctttggctctgacctgctacggcgactgtgaagttgttgagcttagtgtttagttcctgcatgagcttctacccccagcctgcctgggtctgtgtggggtcaggtaaggacacagaacctccaggaccagtggtcactgggcaccccttccctctgtgcaccatgaggctggcctggagccctggctggccacctggaggtgaggggtggcttcactccatgagggaggagaggggctagcacgggcagcacagtgggcaggggccatcagaggcaaaagcagcttcccacagaagctcaggagcgcagcacattctaaggactagctctgggccgggaggaggccggagtcgcttctgggacctgtgattgctctccctcctgcagtctcctagccctccttcaggtgtttgtttaataaaagacacaaaacagaaggaaggcaggtttagaaaataaagtttgttgggatcttaaacattttggataaaactaacaaaaaaatatgaacacacattcaggttgtggtgctatgaggagtagcgtcatcttatttagttccttgagatacacgcacggctgctcggtgatcggtgccgccctgggaaaggttggtcaggaggtgacaggggtctccaggaggagctcgggaggtgacaagggtctccaggagggagcaggggctgctcggccaggctgccctggagcttgaggataaggtcaaggttggtatgtgttgctccgacttgagaatgaattaggtgtgtgactgtgtggcatcgtgaacatcagtagtgacgcagccgtggcctgggctttgcctgcagcgcacttaggttacacggagcgggatcagaagcaagcgattcggcacacaggcgtttggccacagcaattaggaaatacatattctgcggcagggacacgatcatattttggtgtgaagaagagggcaagagaagcagaaggagaatgggtcggtaggtgtgaaaagtgtttggcatgcatgggattaaacagaaaaggtgtggctgagatttcccagtggtgctcacagtgcatggacagcgcggggtggggcacggcgggcttcacacagttctgtccgtccctgagtgcttcctcaccaccttgcctccgttcacctggtcgaccgccagggtcttcacctcgggctgggcctgcggcggggtggcgtggtggatccgatgtgccaccccgacgtgggccttgtgcggcttttcgcgggccgggctgtgctgctcgccgcttcggtcggaggcgatgggggggatgacgaggggcctctctttgatgaggtggacctcggcggactccctagccagcagaaatggggtggggtcgggcatagcatccactggttcccgcaaaaggagtttcctgctctctgccccgaatctgtagacctcttcaaattccgggtgcaagggggctgagaggctctttttcatgcggcggcgaggcgtttcgggtagcttgtctttggggggcgctggcttgtagctggccagcacggggctccctgacgggctggcatctgaggtcccgctggagctcatgagcttcttcttggcggcgtgcagctgggaggtcaggtaggcgatggtgctggcccgctgctccagctcgctagacagcagggtcagcttgtgactcttggccttcagctcctccaggtacttcttctctcgctccttgatggtgttctccagcactgtgatcatcgcgtttttctgctccagttctttcaacaactcagcattttcgttctctttcactttcagttgggcttccagctcttcacatcttttctttaattcactgcttttagaagtcccgtctcctacaagaataagccgaggaagcaggtgaagaactcattagactgaggccgagtggtgaggcctatggggcaggcggacctgtctggtgggggccctgtctaggctgtgggggccatgcagaaggcagggctgtgggggctctggaaagacccctcccctccccgaggtggggagatcggggcatctcagaggccctttccggctcttagttctctggcctactgcataaaagaatgtctctgaaccttaaagatgctgaacttaaaacaggcaattgcagagtatcagacctcagcaaacacttaggattcaactggccgcaaatccctctgtctgctcagatggcatttatggaatgcctgctacattcaaagtactgttttgaaactcaaatgtaaaaagaattatccatgtctattgaattaaaattctgatgtttagaggagaagaggtgtggggctgtcacctttgctctgccgctggccgcctctctcacccccctacccccgtctctctcacacacacacacacacagactctttcccacttcctgctcagagagtgagctgtctcgcctctgtggctcttacccttggtccctccctgcccctgccctaacacttcgggcctctgcctccttttgctgtccctgggtgcctgccctcacccagtccttcagcaaacaccagccacctccttctcctgctcttctggtgacctgcagtccctggtcacctcacatagcacccttggctctaaaccctgggtcaccatcctactcctcctaacgctggctggctggccatcctccttgcctggcccctgggaagttctttctagactcttccttgctggtctggaattcaacttgagcatcagctcccgattcagtgtctcctgagcaccacttctccaagtgagtgtccgtcagacacaccctcaagtccagatagctgctctgcttcccacatcttgactctcccagggaaactggatgcagtcgccatccctggcctcccctccctgactgtgcctttctgctggctgctcagtgctgccccctccctgctcctccagccggccttggtcccacctcctctctggtcttcgtttcagcccatcctgtatttaggaagcttggtcaccccctaaatattcttgtcctctgttcaaaatggttcctcactgcctaataaaacccaaactgccagatgccttccagttcctcaatctgtcctgaatgttatctgctcccacataaatcaaagcttccatcactctccccaagccaccacctcttgttctgtctctattgtaccctctgtccttgccctaactccagacctgcacgcccagtttccctgtaccaactccaccacccagggcctgcctaggcactggacgccactggacgtctttcccgggcttctgtctgtcttgctttgaattttcccacctgcctgagctagcagcagctctgcagcatgtcccgccgccagactctgagcttttgagggcccacagctgactggactggtcttgtgcaggacacttgcatgttacaagctcgctgcaggtgatgggcgctcctcgacttagcatggggtcatgtcccgaaaaatccaatgtaagttgaaaataccgtaagtcaaaagtgtgttttcgatattttcagcttaccatgggtttatctggacatatccatggtaagtcgaggagtgtactgaatgggtattgccccatgcagttgaaaaattttaagttgaaccattgcaagtttctagttttaaaaaccatgtgtctgtgtgtgtatgtgcaggtataatgtcagcaaatgacctccctaaaaaggatgcatgcagtactacctttcatgaggtttcttcttttgccaaaaggaaaatagatcctaaaacacagtttcagaggtagagagagggacagagacacacacacgactctgtagacactgtaagacccaggagcccagccacctgggctgaacccctgcaacctgaaatgctgacctgggcacggcattgggcctggtacccgctgtccttcccccagggcctgtgggacaacaacccatgcctgtcgcagggcctttgctttcagcccacactcgggtggacagtgggccttgggctccttccgaggaagggctgcaacctcagaccttcaaccacatccctggcctgctgtgagcatcctgggatttttcttcccccaggcagtgctgcaaaaggctgatggacgtttggaacattcaggaacaaggctgtccctgggctttgctcatgtcctgtgaggggcagcccacaaaggcagagggccctggtggtcggactggggacttggatttgtggggcacctgtcagatgaagatgcaggttcagagatgtcaaagaacctgcccaaggccacacagcccctccgagtcagagcagaggcccaaatctggggctcattaagcatcactctggttcttttcgccacagcatcctgagagaagctcctcctggatagacatcctcctcatcatccttccttgagagtcatctagctgtgctgcctcctcctccagggtgcagccttggctccgggctgatgtttaccggccccgacttgagtgggccgtcctgtgggaaggagctggtacgactgctcctccatccccagctctggagagctgcttcagtgactgtccttcccaggaatcagcacctcctgttttgccaatttcttgctctttatagaaagctccactccacctcctcctctgtacgtaccccctttctggaaatttcagtcttcccatgaaagcttggtgcacactgagctgacagcagccaactgctgctggtctccaaacgctgcactgctgagcctgcccgagcgtcagggcactgcaacgcttctaaacctgcgcactccctgggcccgcccagacttctggggtcacagcccccaggggagggaagccaagagtctatgctgtaccctgggtcccgaaactgcttggaattgggcagttttgggtgcactaatgtaaaacaatgattttcaccactgggaggggagacgccccgactggaaccacctgagaggcttttgaaactgcctcccctaagacacagcccttgctgtgagaccctgctgctgctgggagtactacatcaggtgggtgggtgggtgggcaggtggccttgggacctcaggttgagaaccgtgactggagaggccacagggcaaaactatgctgcttcagattagcctgggccaggagaggacagggagcgaggacgccctggcttccatgacacgggtagctcctttcccaaggcttcagtgctggcaggtgtggacgctggaggtccctagtgtcaggctgaaatcctgttcctctgcattcccacaggcccagctcccagtcccagggcttcgggggaggtccctggtatccctccacagggagacttctgaggacaggctcccattccaccaccccaagaagcccacggcgccttccctaccacacgcagacaaaaagatgtctgggctcctgggtggcgcactcaggaggctgtaatatgagcaatgcaaatggaaaaaaatcagtgctcggtaatccactaaggcttggtggaaatggtctgtgtcttttacaaggaactggacactctcatgaatagtaactgccattgtgaggcctgtttagaaaaaggcattgtggggaatggagaagttcttcaaagtttcttgaaaccataaagagcttgtcatttccttgctctatgtatatctctatatatgttccagtgtagctgctccgccttgccccggcacgcctgcgcagggctgagcgagccctggaccatag

SEQ ID NO: 96715 - DNA, 38396 bp, Homo sapiens
ccagctctgctttcctatccctcgagcgtttgggggtgcaagctgtagggctgtggccaacaggtgcccctggggtttgcacggcaggaagctgagaagggaaagggggaggggcaggctagatagtgccgcctcattggccctggaccgaggtcgggatgtgacttgtctgcggtgtgtgttcctctgcaccaggcccagctcacccaagaaatgggcgtcctagccatgctgctccagggttccatagacctgcttcccctgcttttggagcctgcagttggtagtttaggtctctagtccatgtcaggaatgtgggtgccctgctccagtggaattctcccaccaggcccaggagtggcccctctgctgcccgaaccctttgccccaggcctttccctatggtgtcccctcctgggaggatcagcagggtcggtgttggcagagccagtggcagaggaggttccaggggctcagggaggggaagaagctgggcgaggtcgcaggagcctgggggtgaagtcagggcagggccggcctgcggggagctgccgcaactcctgggctctgggcgacattccagccagctctcccaggctctctgctcgccttcctccctggtagctatctctgtctctctccaggtgggtctacatcccctttcagcagccccatcacctccgacgaggaatacctgagccccccagaggagttcccagagcctggggagacctggccgcgaacccccaccatgaagcccagtcccagccagaaccgccgttcttctgacactggctccaaggcaccccccaccttcaaggtcagacccctgaggctggggcctagcctcctgtgtgcccccgttcctttgggtgcccccttgttcttggggccatgcctaggcaacatcaagacctggaactttgctcccattcaaaccctcttacccagagccagtctcagcctggctgtggaagagtcctccgtctcagattccacagcccccaggacccaaggctctgccctgtcttcccctgacactttggggtacccccttcaggtctcacttatggaccagtcagtaagagaaggccaagatgtcatcatgagcatccgcgtgcagggggagcccaagcctgtggtctcctggtgagtagccgcactttccaccacccaccagcgactctatgccaggcctggctctgggaggtctggctttgggtggaaggaaatggaatcttggtgggcttccccatgatctgcctcaggggcctcatctcagggacagcagtgtactccccccggcaccctgtcccttgccccatgttccaggcttatttagggcttccccttctggggaggggtttgggtctcatgtctgtccatttgggataaatgactgggtgcggtggctcacgcctgtaatcccagcattttgagaggtgaggcgaatggatcacttgaggccaggagtttgagaccagcctggccagcatggcgaagccctgtctctactaaaaatacaaaaaaattagccagatgtggtggtgcatgcttgtaatcccagctacttgggaggctgaggcaagaagattacttgaccctgggaggtggaagctgtagtgagctgagatcacaccattgcactccagcctgggtgacagagtgagaccctgtctcaaaaataaaaatacccccttcccaaaattagcaaggagcaagacatttcagaggccaaggaaggaggattgcttgagccaaggagttgaagaccagcttgggcaacatagtgagactctgtctctacaaaaactttttttaaattagctggacgtggtagtacatgcctgtagacccagctacttatgagggtgaggaggaggatcactggagcccaggagtttgaggttgcagtgagctatgatcataccactgcactccagcctggacaatatagcaagaccctattgctgaaaaaaaaaagacatgcaacaatttgtttctgagctgccagcagccccgagttaaatgtgggtctaagcagaggggcctcgctcatcccaggtgcctggaagatggattactcagcttgctaattttttatggtttgaattctgtttttcatttttaattgattgtctggtccccactgtgattttttttttttttttttttttttttttttttttttttagctggagtttcactctttgtcgcccaggctggagtgcagtggtgcgatctgggctcactgcaacctccgcctcctgggttcaagggattctcctgcctcagcctcctgagtagctgggattacaggcatgtgccaccacacccagctaattttgtattttttgtagaggcagggtttctggtcaggctggtctcgaactcctgacctcaggtgatccacccacctcggcctcccaaagtgctgggattacaggcatgaaccaccgtgcccagcccccactgtgatttttttttttaacattgtaagttttttcatatcccttttgggaagtgggaaagctatctgtccattataaataaataaaaataagacatggggaagtttaagaattattaagagctaaatagggtcaggcatgagggctcaatgtctgtaatcccagcactttgggaagccaagagaggaggatcatttgagcccagaagttcaagaccagcgtggacaacatggtgaaaccctgtatctacaaaaaatacaaaaattagctgggcatggtggcgtgtgcctgtagtcccagctactcaggaggctgagatggggagatcgcttgagcctggggaggtagaagctgcagtgagctgtgattgtgccactgcactccagcctgggtgacagagggaaaccctgtttaaaaaaaaaaaaaaaagacaagaaaaaagagctaaatagcacggctccactctgaatgcagcagggttccgagaagggagagctgcaggcagttagaagtgacctggaagctcctagaggtgggtgggatggcagagtgggggtaaaaacctagccctggaaaccagggatgcccacggtcagtgggacagatctggggactgggcaaactgcacagggaaggagaggcctgcacagtgctgcagccccagttcctgtgcacgcacatcaggcccctgggccctgggactgagttcttgcccctctgacaggctgagaaaccgccagcccgtgcgcccagaccagcggcgctttgcggaggaggctgagggtgggctgtgccggctgcggatcctggctgcagagcgtggcgatgctggtttctacacttgcaaagcggtcaatgagtatggtgctcggcagtgcgaggcccgcttggaggtccgaggtgagtacctgatttctccatgaatgcccacctggccctggccccttccttcccccactgtctgctctcacacagcctcagttagaggatgccaccactgaaagggccttaaggggcccctagtccagctgcttatattattgttgagtgaaccaaagcccagagacaggaagtgacctgcccaaagctgcacagcacattgttccgtgctcagcttactacacaacaccaccttccctgttgctccatcacggagccctggcggcagccagagaccctgcacctgccactggccaagctctctctacactcttctgagcctttgtcaccctgctctgcccaggaccctccctcatccccctccccctctcctctcgcccctttgcccaccctcccatcccattgctgtgcagaagctactgtgaggtagcggtggggagagtctggtggctggacccgttcggaggggcccttggggtggcttaggcttggagcatcacagggaccctagggtgccagggtgagcacagctgtgacgtgtgaagaggcctgggcccccagagcctggggcatatgtgcaggggccctctcaggcagcagaaatgccaggccctggctagggggccctcgagggccatgggttttcctccccaaaggccacaaccgtttatcttgccttccacctcacccttcgcctcaatggctcctcgcttcctctcctcgcttctcactcagcccccagcccctgaccttccccaaggctcagagctcagaccctgacagtcatggtccctctgctggcccccctgcctcagttcccctcctctgtgcctgccgttcctgtagttgccacttccttggtctccagattcttcagccctcctccccggcctgctttctctccagggcctggctctgcctcgcttctctgtattaacccatgtcttggtgcttctttctcttggggattccttccgacacccccaggctttggggtgctcctgatcccatgaatgcctggttgcccggggtctctgcctgcccaggaaccccgaggaaccagtctctggctagctgccggccctcgcagcccagagctgtccttgggggagccaagagtggcagtgctgccctgacggtgtgagaggcagccctctatgcagaagggccctagccaggtctgcgtgcctgtgcgtgcatgtgtgcgtgtgcgtgcgcatgcgtgcgtgtatgtgcatgcatgtgtgtgcatgtgtgtgcgtgtgtgcgtgcgtgtgcatgtgtgcgtatgggtgtgtgcatgcgtgtgtgtgtgtgcgcgtgtgcgtgcgcgtgtgcgtgcatgtgtgcgtgtgcatgcgtgtgtgtgcatgtgtgtgtgtgcgcgtgcgtgcgcgtatgctgcactaacctgccgcttgctgactgaggtttttgtctgtacacaggcgagtgagctcagggggccacctgcgctccccccgctaccctccgagccgcgcccctgtctcaggcacctctcggacctcgctgtgtttcactgcctcctgcccacagacccaggcctgccggcccggacccgtcccagcctcccctccccaccccatgcagcccccagggggatagcccatgggcccctgtggaccctccctccccaagtggacacatggctgtgcaggccaggaggcccacagatggactgagtgctgggaaggggcggctgcgaggggtatcaaccccccgagtctctccctgaaggggagcaccgggcgagtgcatgtgctactgctgctacaggcctgtctatctgtttgtctgtctgtgtgtctgtgacagtcagggaaggatgcctcggagctgaggtggggtgagacagagtgggagagattacggcatggcatggaggggcccaaggagcaggggctgttgacaaaggccttaccaggaagggttaggacactgaccattctagaaatgggtttcgaatggcacaacactttctatttcacaaaagaccaaaagccagaggccccaggctctgtgctgatgaacagcctggctgagccctggccctggcaggtttagggcccatttggggccccctccttctctgtcagggctggggtgctctgtctgggaatgagggagttaaccaagtttggtgcaggagcaggggcagggggccactgtagtgagcgtggagaaatttggaaacacctatttcttaactcaaataaagtccagtttgtacctatctggtgtgttgtgttttttttttcccccgccgatgtctctgccaccacgtggccctctcagtttcccctccctcagttccctcttgcctccatgaatcaccctccctggcccagcttggattgccatctcaaagccaggtctgggcatgccttgctgtcctggccaggtgggtgggctttccccatctccagagaacaaaatgcatctctctctctgtgtctgtctgtctctctgtgcgtgcgtatgtgtgtctccctcaccctgtgtgtctctgctctgtgcgtggcccccgtggctgctttcccctcagcacaccctgaaagccggtccctggccgtgctggcccccctgcaggacgtggacgtgggggccggggagatggcgctgtttgagtgcctggtggcggggcccactgacgtggaggtggattggctgtgccgtggccgcctgctgcagcctgcactgctcaartgcaagatgcatttcgayggccgcaaatgcaagctgctacttacatctgtacatgaggacgacagtggcgtctacacctgcaagctcagcacggccaaaggtaactccccactcaggcattgggctgccgtgggtgcccaagagctggagggaggggactgggggtgtacagtaagatgcctgggaaacagagctccaaccccgaggggaagcgggggagggtgggagctagtacattgccttggcctcaataaaataagcacttagaatagtgcatagcacaaaggaaaggccgcaacagggttaactgttcctaggagggagtgcatctgctgaggtgaacgtgggttcccacgcctgccctgcaagtcaccagccatataactttgaacaagtcasttcatctctctgagctttagcctgttcatctgtagaacagggatggtgatcattcctcctctgtagagggattggcaggattaatgagatagtttatgtgaagaacaaagcacagggcctgtcaaagggcctttccaggagagggtagggcactgagcattccagaaatgggtttcaaatggcacacctgcctaataaatgccagccattgttaccactgatgctatctctgacctgggcctgcccacatggaagggcagagattatggcacctgccttgctacgttgtgggtgatgaagacctaagcggaagctggaggggctttagaagcaggagggtgcatcgggtcaacataagggacccttatctcctccagaagcttctttgagggttggtaggtggggccaaggggcatctgctctgggtctggggaaggtggctaggagcatgggcatgaccccagcacagaggagaattctgagaagtagatggaggaggggtgggcttggcttctaggaccctatcagagctgggctgtgcttcatccagggtgggcagggtgaggggaggaggggggagctggggccaggccctgggctcaggccctgggctcctatggagtccccagcccaccatggcagtctgcacccacccttgctgacctccaccctctcgaggtctagtctctggatctgtgcccacttcctcccctgagtacccagagcctttgctgggctctgcccaggctccagcttcctgctcagccttaggtcaggagtggtgggttgggatgcctgggcctccttagccttccctatctctgagctgccccctgccccacagatgagctgacctgcagtgcccrgctgaccgtgcggccctcgttggcacccctgttcacacggctgctggaagatgtggaggtgttggagggccgagctgcccgtttcgactgcaagatcagtggcaccccgccccctgttgttacctggactcattttggtacggcccctgtgctgcaggtgttgagggcccccccaagggcccaggcggcgatggggtgcacccagagggcagggcccctcactgtgcctgctctgcattcccacccctcctttctgcaggctgccccatggaggagagtgagaacttgcggctgcggcaggacgggggtctgcactcactgcacattgcccatgtgggcagcgaggacgaggggctctatgcggtcagtgctgttaacacccatggccaggcccactgctcagcccagctgtatgtagaagagccccggacagccgcctcaggccccaggtaccaccggggccccaaatgatgctggggctgcctgtgaggggccagcccagccctggggtgggaggcacggccctgggcctgtgggcagctgtgtggtcttgcagctcgaagctggagaagatgccatccattcccgaggagccagagcagggtgagctggagcggctgtccattcctgacttcctgcggccactgcaggacctggaggtgggactggccaaggaggccatgctagagtgccaggtgaccggcctgccctaccccaccatcagctggttccacaatggccaccgcatccagagcagcgacgaccggcgcatgacacagtgtacgtgtctgggaagttccccgggagtgtcccctgcagcacccacttggcttgcaatgccctgcccctctccccagctctccccaggcctttcctctgtagcctgaccagggacagggtgcctgggggaagggaacccggagggactgtgaggtcattgcctcccctgcaagcccacacagcactcatctgctgagtcacccctcagtgcccgttagcactgactgggcaggcagtactgcctgctactaacccgcatcgggcccatgagcaagttacagaagccctctgtgcctcagtttctcatctgtaattgggttgttacgagactaaatcagttaatgcatataagccccagagcagggcctggcacctggcaagcagctgggaggtgtgaagtctcagtattcttgttttagtagccattatcatcagcggtggtacttcctggagacattgcaatgaaaaagcaggtgtgggcagtgtctggcatggaagggatgctctgtccagggttgctaacaaatagcaaataacgaagaaggggccaggggagacacagaggaacgtatttgggttggtgtcctcttagcctgggatactttcttatgggagcatctcagttccatccttgaaggaatctgagtcttgtgtgagaaggtctgcccccctcccataagacagtgcccactctttgacccacgatgatttcctcttatrgctgcaacatgacaaagatcactttcattaagtgctttctaagtgccaggtcctgagagctaaaggtatgacaaggaccatcttaccttgccacaggcctataaggcggatactattagccccatttacagatggggaaactgaggcttagagagatacaggaagctgccaagaggcaagaaaggactgtctgaccctggtgcccagctcttaaccaggatgtccctgtcacccatgctrcatcctccctgcccacccgcctgcccatctccagtgatgccaccccggctccaacccstgcccacagcctcccatgastgtcattctcagcagcaggcctccstgtctcccagtctgctctgaggccctgggtgagtgtctgtctcaggatmtaagctggcgtctccgcttctgcstgtatctggggtcactggcagcccttggcttctcttctcttataaatagtgtcagcagagataaatgaatgggtgactgttctatgcagagataactgcaaagagaagggaagggtgtctagggacagccctgacatgaaggaggacagtgcaggcctcctctvtgtgtyttcgccagagacagcctccttatcatccagggagcasggagtagggaaagagctttggaatcacatggtaccaaggtcaaactatcatttattagccgtgggaccttgaacaagtcaatatctctgacctcattggtaaaatggggataattttgtagagttgttgcaaggattcacgagggggaaagcatgtcaggtacctggtataggctgggcacagagcaggcaactcttgtaatatatcatagaatgtatttggtacttactgtgtgtgaggttctgggtctggtgggacaagcagatctgacaacgtcagccctctctttaaggagcttgcagaccaggtcaggagctatgactgatgcaagaggaagagcccccgcccatgaaaagcagcgtgggccagtgcccatcgatgtgcaggcgagagggttggggtcctgggaggagtcagaggatgaggggtagagagcgggccaggggcaggggggcttcatgggctgtacccacttaaactatgtcttgaaggacaaggaagccttaggtaagaggagagcattccccaagggaggaatgttgtgagcaatgacctgcagatggaactcggtgtctcgttcaggggcctgatagttagccagcatcaagatgcagaggagcaacagagacgtggctggcagggagtttgggttgagggctttgctgtcctcctggagggcttccctgcagctgtgctggagacagaatggcagtggccttggggatggagaagaagggcttaggggaggggccttgggaacaaagctttgttcgagttttgacatagaggttgtgaccatgcagaggtgggaagacgaggggccagtcaacagaggcagggaccccagagggtggcccagtgtaggaggaagagaagatgataagttgcctggcctgacacactggagggacagaccagaggggccagggcagatgtagacttggaagccagcccgggcccagacccagactttgctgcaccatggatgcacttcttgctgcctgccccatccttgccccatccttgcccactcgcctcctccctgcagtggatgggggtgagggaccaggccygggatggcatgggcctacccctcaaggtatcctccgggctcaggcccagtgtcactgtccctcccctcccagacagggatgtccatcgcttggtgttccctgccgtggggcctcagcacgccggtgtctacaagagcgtcattgccaacaagctgggcaaagctgcctgctatgcccacctgtatgtcacaggtgaggcaggcacyctcgtggtcagctgcacgcacagcctggcctctggcactacgtgggggctcagggaaaggggcctccacccagctcccttcccctccatcccctggggaccctcttgccttgcccctgcccctgcggctgagcccccaggccctagcctcctgccctgaggctcggtgatcctgtggggctgttgggcccttggacccagcagacattcgaactgcggctttcagatgtggtcccaggccctccagatggcgccccgcaggtggtggctgtgacggggaggatggtcacactcacatggaacccccccaggagtctggacatggccatcggtgggtcagggctgcacagggccatgggtggggaaggggtgtggagaaggcaggctcaggcaggacaccatgggggccaggccccagaagcggatgggcaggggcaggagctgatggaatgctggtgggaccagctttgcccrtcttctctccacgttgcatggggctcttgctctgggtgaggagaggaggcacggggcactgccacattcccttcccatcctcagagtgggtgcctgggtcaggacttgcaaatgccctctcctcgtcttgtccaggatctcctcccgctctgcctcagtttccctacctcaggtatcaaggaattagagttcaattccagccccatctgtgcctgtactggtaccttgttggctcttaacctcccagggaagtggctgggcaagagcagatggggggacaggcaggaagcaacagcagagactgaggcacgtcatcagagcagactaatgatgagttccagggtcccgggccagctggatggggaggggttactgctcctgcaacagcagcctctagtagctcctctcccgccagacccggactccctgacgtacacagtgcagcaccaggtgctgggctcggaccagtggacggcactggtcacaggcctgcgggagccagggtgggcagccacagggctgcgtaagggggtccagcacatcttccgggtcctcagcaccactgtcaagagcagcagcaagccctcacccccttctgagcctgtgcagctgctggagcacggtgagcctgggtgctcctgtcgggtgggggtgggagctgctgggatggggaatgggggccctgtggtggaggctcaagggatggcctggacatggtaactggcaggagcagcctagccgggcgggaccttggcccatctgtacacttccttctccctcctgaaagcagcagggcacggtggctgaagctcaggctttgggatcgggcctgctggggtccaaccccacaacctcagctttgctgctcyctggctgtgttcccctgacaaatcgctaaacctctctgagcttcagctttcccatctgtaaaaacggaactcaagtgttgatgaggggtgttagaggagtggtgggtgctgaggacctgatgtcaagcccagcacagagcctgcgctctcctcctcccaggcccaaccctggaggaggcccctgccatgctggacaaaccagacatcgtgtatgtggtggagggacagcctgccagcgtcaccgtcacattcaaccatgtggaggcccaggtcgtctggaggaggtgggcccctttcccacatgtggcagcccaggtctggcccagcctggccggaatgccctggggcaagatctgggtgacctccctgtcatgtgtcccctagctgccgaggggccctcctagaggcacgggccggtgtgtacgagctgagccagccagatgatgaccagtactgtcttcggatctgccgggtgagccgccgggacatgggggccctcacctgcaccgcccgaaaccgtcacggcacacagacctgctcggtcacattggagctggcaggtgggtgacagcgggccttcttcctagcctccctccaaggcccaaagctctctactcacacccccaggtacacaacctgcctgacactgctgcagatccaaacccatgtcctctggtcaggcctgtccatgtcatggctatacaaataccatattagtaataatgacaacaatcatactaacaagatttattggccagacgcggtggctcacacctgtaatctcagcactttgggaggccgacacaggtggattacctgaggtcaggagttcgtgaccagcctcgccaacatggtgaaaccccatctctactaaaaatacaaaaattagctgggtgtggcggcaggtgcctgtagtcccagctacttgggaggctgaggcaggagaatcacttgaacctgggaggcagaggttgcagtgagccgagattgctccattgcacgctagcctgggcaacaagagcaaaactctgtctcaaaaaaaaaaaaaaaaaaagatgtattgagcctagtatgtgccagtctcagtactaagcactttacatgtattgcctcatttaatgtttacatcagccttgtgagttggggttggttattatccccattttacagatgaggagactgaggccgaggctaagagtaactggcccaagttcacagaacctaataagtacaggagctgggttcaagtgtggctgcctgactcctarctcctgtgttaaacataataggaaatagtatctcagatataacaaacatgggaagaccaagttggtttttaaagaaacccatgggcacatcttatcaccgaactgccagccctgagaatcctggccgcccttcggcacaagcctgtttgacagagcctcccaatgtttgcagcagcaaggattcttttttttttttttttttttgagacagtcatctcactctgtcacccacaccatctcggctcactgcaacctccacctcccaggttcgagtgattcttgtgcctcaggctgccaagtagctgggactacaggcttgcacaaccacgcccagcaaattttttgtattttttagtagagatggggttttgctatgttggccaggctggtctggaactcctggcctcaagtaatccgtccacctcggcttcccaaagtgctgagattatagatgtgagccaccgcctcgggccttaggattctttttataatttttcctttaaagatgtagtttctcaaactagttactacctaatgcattaggtagtaactgtttggttttctaatttgttaattaactctagacatatgtaaccgccactcagaactcctgatcaacatgggctaaacagggttacctgctgagtaaatacaattccaaccaaaagcaaagaaagtgacattttacttagcacaggcaatcttatcatgggtaaatggacattttctggtgctttcaaaaaaccattgaagctcacttgaaactttccggtgctttgaccttcatagactgcccccaccacctcccagcccatgggggacaggattcctagaggcgaggggaggcgtctgtgaagtggaagataagtggcaatagggtgtgtaacaaagagacagggaacgcttctggccgtgctgtgaagatggtgggggtgctgggcgctcttttaagtgtctccctccttgcctgccctgtccctagcactctccactcagtcaccactttactccttgacagtccatcttcaggactcacctttcttcccagatataggaggagccctgaagtttggggagcccctggccctgagagccctgcagcacagcctagctggaacagtgaccgatggagccccatttgagcccagccagtcagggctctgatggggctggggcttgcactgacacccmtattccactagacccyacccagccacacccagacagggcaagtggagtggtggccccccttcctccacgtcaacctcactgcagtgtcttccccacccccgggatggcctcccccgttgtctgtgtgcctgtgaagggtgggggtccacacccggccgccctgccttcccaagtgcctgactcatcctacttctcctcagtctgagatgctcaaacacgctggggtggggggtgggggctggcgggggacacctggaagtcacaggctcctttgcaaagcacattgcaatgtgtatttaattccatcatgagaattagaagctgctttaccaggaaatcatatgaccatgtgatattatggagaatgaaatcacaaccacatgtgggagatactgagagtccatttctagatggtttggttagtatttgggggttacttgtttgttcatcttgccatctcccagatgctattaatagaagcccctctaaacatttttcaaagattcagtgaaaaaacttcaaggtagaggcaatgccatccatgagcttaattcagggtcacaggctgagccacctgcaggggccaagttcaggtagtcagaagccagcgggtggccctgtgaagaagggcggccacccacagggggcagcattgggccactcctctcccgcggattcatgcagcgaggggagcgactcaggatggccagtcctgatttttcaagagaggcaggaaatccagatttcttttgtgtgtgaaaatctcctaatttcaaagctgccaaattaatacagaaggtcaaacaaagcaagcctgcaccttgtgccaggtttcctcagatttggagaacatcacgtttggatttacggggcggggcggggcttggtccaggcagggaactctgttgtcccagttggtgggggtggggggtggtggcttgcagggaggcgggggtctagcgttctgactgagccagtcactgatgggggatcttgggaggggctgaggaggcagggtaaagccagcccctagccccttctcttcccacccctatccccatgtgtttcagaggcccctcggtttgagtccatcatggaggacgtggaggtgggggctggggaaactgctcgctttgcggtggtggtcgagggaaaaccactgccggacatcatgtggtacaaggtcagagtgtgctgctggctgagcctgggggagggaggaggggctccctgggggcgtgggagggtcctggaaggccttaggagggcggagcccgggcagaggcgtggttaggaggaggaaaggggctgcagaggactgactagctgaggggtgcagggctttctgtgggagataagggaggagctgactctgggtcctggtgagagatgcgctgcccagagtaggagatgaggccctggccccaaggtagagatgaggccaggcccaggctgaaggtgagaccccactctgcaggacgargtgctgctgaccgagagcagccatgtgagcttcgtgtacgaggagaatgagtgctccctggtggtgctcagcacgggggcccaggatggaggcgtctacacctgcaccgcccagaacctggcgggtgaggtctcctgcaaagcagagttggctgtgcattcaggtaggcaggagttccggagaaaggtaaagcgcacaccccctggaatctgatgtgaccctccatgctctgcccaggaagcagccagccctggactcgagccaccacacccccagcccagcaccccgccttgagcccccaacattcttgcacctcttctctcttcttcttctgtccacctgtcccagtctctggcctgcttgctttcttcccctcccacctaacaccatgacatctctgccccagctcagacagctatggaggtcgagggggtcggggaggatgaggaccatcgaggaaggagactcagcgacttttatgacatccaccaggagatcggcaggtgtggggctaggagggaagccagtgggggccgagagaggctgctgggtctgagggttgggaggggtggagagggccacagtgatggctgatctctgaccccctccctgtgtcaaccaggggtgctttctcctacttgcggcgcatagtggagcgtagctccggcctggagtttgcggccaagttcatccccagccaggccaagccaaaggcatcagcgcgtcgggaggcccggctgctggccaggctccagcacgactgtgtcctctacttccatgaggccttcgagaggcgccggggactggtcattgtcaccgagctgtatcctgggacaggctgggggctagggggatccatgcctaaatgactggtccttgtaacatccaataggcaacatgttttacagtttacaaagtagtcccaattgacaattgggagggatacatctggagacttctatgaaaaccaacagttttaagcccattgttagcttaaattttcatagcatttaatgtgtgtgcctggcagtgttctaagagttttacaaatattaacctatttaatcccatatattcctatctcctggaattttattattaacttgtattatccccattttacagatgaagagacaggcatggagaggttaaataacttgcccaaggtcacagagctagcacatggcctatgcttttcatcatgaaatgcagtacaatgcatctgcatatttgtagtgaccccatttcagatcaatacttggctttatttagaggctgttttcataaggaacagattttaccctttcatgaaggctgtggttaagcaaaggcacattgaggtaaggatgctgggtgattggctcatcaccccagtagcagggtgaccgtaacctgcacatgagcctcctgcctgcactgtttgaattcaaacctcagcaaaatgacaaattattccatgtcatggatcttctaggtcattctcaaatagagtcaagaagttccatccacagtcaacaaaattctgctgtaatttgatccctataaatgctttacagggtgggcaggaaaggaaatgttattcccatattactcctgggagaacctaggctcagagaagtgaagtgacttgtctgagatcccatagaaagtgggagttcaagcagggatgacccacctgtgccctcagaggacaggaggtggggagggggtacaygtggaggagcggagaggcagtctctggctagtatcaagcattctgtaaggggaaggagaaccccgtgctgagctgggacctgccctgagcgctgggctgggccgggcagttggcactgggcactgttctccttgatctgggatgtagctgcacagaggagctgctggagcgaatcgccaggaaacccaccgtgtgtgagtctgaggtgagggcagtgggtggcaggggccaggttgggcaccagccttcacccacctgagctttgagaaccaacaaatgggtcctsagtgtgccatctgtgcccacaggaagccaggggtggaggtggagagcactgttaggtaggcagcagagtccccacccaatgataccagacccccatctatctgagacttgtgctattctctctaaatctcagcaaacccaccccagctcctaactgttgtttcccactcttcatcacataaacatcccccaaacatttctcctggaaggagccccacctagattttattgatctcactgcagtcctgccacgtcaggctgtacatgttgtgcactgcacaattctacttattaccacgcaatggctcctccctataattgtgctgtaccctccggtgcatatggtagccttggatctttgcaaccccaaacctgtttcagccccttccacgagccatctgaaggctactccacaggcacagccggaccgcttgccgccctggaggtgttcagacatacaccacccttccccctcagactctgggcccactatttccacagatccgggcctatatgcggcaggtgctagagggaatacactacctgcaccagagccacgtgctgcacctcgatgtcaaggtgaggtggggactggagagcagacagcccctgtgggagccaggaggtgaagcatccttccttgttcatttggcccgcacacctcgccttgtgtcttccagcctgagaacctgctggtgtgggatggtgctgcrggcgagcagcaggtgcggatctgtgactttgggaatgcccaggagctgactccaggagagccccagtactgccagtatggcacacctgagtttgtagcacccgagattgtcaatcagagccccgtgtctggagtcactgacatctggtaaggctggcatgctgggctgggccgaccagggcagctgcccttggggctgtgctggggacgcgctcactggcagggagatttaccgagcctgaattcctcctgaaggtgggctggaggcattgtttgcagggtctcctgcccatgttactccttgccccttgtgagtcagggctgccccattctctcaaggcctcagccctgttagtccttgactccttgtctcccctggaagccgggccttcccctcagcakycagcctgcctcctccagtaaggcaggcatggtcccattggttcccaggcttccctgggcttcctgggccagccctgccatgaccctggacttctccaggcatatctggacctgtaggttcagggtcctccctgaagaagccactcctgtgcccattgtccatggcagtgttcccagggaggtaacagctcactcaggtcagcagtagcaaagaactgctcccttccagtcagagaggggcggtcctcttacctatcactctccttttcccacaggcctgtgggtgttgttgccttcctctggtaaggacccctctgcaatgtcccagcagtctcctggcaggtctacccctaaccwttgcagggctgcagcccacccccttctcttccgcaccccccactccttcttgcactgcaaggagcctcatgtgcatgaaggtggacacccctgtctgcatgcccacactctgcctgtccccacacccctccataagaggtgggcaccctagatggagagagcccagcgcaggctcagggccatggaggcagggaactccttggctctgagtgtccaaaacttggactagatgggagtggagctcagggtgggcacatccccttggcacagactcttcactcatggagaggccacactggaggagggatggaacaggtcctctaaagcacaggccactaggccccaaggcagcaccacctccctgcccatcaggggggctggggaggggacagggcaggagagagtccgcagcctcacctcttacccacatttgcccagcctctgtcatcctcacaaccccagagcctccatctgtccccagccctgtgcccccactgacattcccctttgtccccgcctgcccctcatgacagccctcttcacccctgcagtctgacaggaatctccccgtttgttggggaaaatgaccggacaacattgatgaacatccgaaactacaacgtggccttcgaggagaccacattcctgagcctgagcagggaggcccggggcttcctcatcaaagtgttggtgcaggaccggctgtgagtacaaggccctgggagcccccacctgcagggtcaccctcataccacctgcctgctactcccaaactcctgcccctcgacatgcaagcccccaactccttaggagccctgtttgctcagttattgactcactgatgactgaacgataaatcccttcttaatcctcattcattcacaggagacctaccgcagaagagaccctagaacatccttggttcaaagtgagtctagtctgcaaagtggtggcacaaaaggtggagggagagagaatgttactaacagctctatttattgagtacctactgtgtgcagtaaccacgttaggcattgtatgtacatatgacgtattagcctcacaatagctttgcaaaggaaggcattatyagtcccattttgttgacaaggaaacaggctytaatcagtgatggagttgggggtatacatactggactccagggcatacstctggacctctccatcctgggcgtcctcagtggagttctcccccatgcttgagaccagaccctggtcttcctgacttctgtctgtccatctctgtcctgcactggtcccacacaatagcgttgggggtgaccaggcagtctcagccccttggttatgagcttcatgtgrgcaggttctcggttctcactcattcatcttcaaaccccagtgcctcagggcacagtgccaggcattgatggggtcttggggatttgggagggggggttcagcaaatgagtctggaaagagcgcctgaataaactgttcatggagggttgtgccaggtcacttgaaggctgaggtcattcgggtatcaggagttgaattaagagccttctttctcagaccggaaatgagctccagaagagagagcctgggtgggtagctgagggaagcatccgtcttggtctggaccaccaaggctccagatgtctggggtgttggccctacatggagacagaggggagctggggagccaggacccgggtaaagggcctaagatcacaggcctcccagggcagctggtttaccaggacagggccatgagccctggtggaagctcagaagcctacctaggggagccaccagtttcctgcctctcccctggggggttcaggggatttgtctttaggtgtgcatcttggctgtaggcattgtcctgacagacccagggggaaggggacccccaggagcccagactcagtgctgctcgatccactctctcctgccaccccgccccatggactttgtctctctgttgccaaacctggagggtctaggttgacagctttccctcaagccctctttcctgggtttgcagactcaggcaaagggcgcagaggtgagcacggatcacctgaagctattcctctcccggcggaggtggcaggtaagtgtggcaggccarcctctgtgctttccaccttctccttttctctagcactgccttccccctcccgtgggccttcatctcctgctcctgtcttctcgctttcactggctccatgcctagcttcctgcctgttccctgaccctctgcatgctcargcctcttccccagggctgaggtgggcctgggggggacaatcctgccccaggggtccctcaggtctgactccagtaccctgtctccagcgctcccagatcagctacaaatgccacctggtgctgcgccccatccccgagctgctgcgggcccccccagagcgggtgtgggtgaccatgcccagaaggccaccccccagtgggggrctctcatcctcctcggattctgaagaggaagagctggaagagctgccctcagtgccccgcccactgcagcccgagttctctggctcccgggtgtccctcacagacattcccactgaggatgaggccctggggaccccagagactggggctgccacccccatggactggcaggagcagggaagggctccctctcaggaccaggaggctcccagcccagaggccctcccctccccaggccaggagcccgcagctggggctagccccaggcggggagagctccgcaggggcagctcggctgagagcgccctgccccgggccgggccgcgggagctgggccggggcctgcacaaggcggcgtctgtggagctgccgcagcgccggagccccagcccgggagccacccgcctggcccggggaggcctgggtgagggcgagtatgcccagaggctgcaggccctgcgccagcggctgctgcggggaggccccgaggatggcaaggtcagcggcctcaggggtcccctgctggagagcctggggggccgtgctcgggacccccggatggcacgagctgcctccagcgaggcagcgccccaccaccagcccccactcgagaaccggggcctgcaaaagagcagcagcttctcccagggtgaggcggagccccggggccggcaccgccgagcgggggcgcccctcgagatccccgtggccaggcttggggcccgtaggctacaggagtctccttccctgtctgccctcagcgaggcccagccatccagccctgcacggcccagcgcccccaaacccagtacccytaagtctgcagaaccttctgccaccacacctagtgatgctccgcagccccccgcaccccagcctgcccaagacaaggctccagagcccaggccagaaccagtccgagcctccaagcctgcaccacccccccaggccctgcaaaccctagcgctgcccctcacaccctatgctcagatcattcagtccctccagctgtcaggccacgcccagggcccctcgcagggccctgccgcgccgccttcagagcccaagccccacgctgctgtctttgccagggtggcctccccacctccgggagcccccgagaagcgcgtgccctcagccgggggtcccccggtgctagccgagaaagcccgagttcccacggtgccccccaggccaggcagcagtctcagtagcagcatcgaaaacttggagtcggaggccgtgttcgaggccaagttcaagcgcagccgcgagtcgcccctgtcgctggggctgcggctgctgagccgttcgcgctcggaggagcgcggccccttccgtggggccgaggaggaggatggcatataccggcccagcccggcggggaccccgctggagctggtgcgacggcctgagcgctcacgctcggtgcaggacctcagggctgtcggagagcctggcctcgtccgccgcctctcgctgtcactgtcccagcggctgcggcggacccctcccgcgcagcgccacccggcctgggaggcccgcggcggggacggagagagctcggagggcgggagctcggcgcggggctccccggtgctggcgatgcgcaggcggctgagcttcaccctggagcggctgtccagccgattgcagcgcagtggcagcagcgaggactcggggggcgcgtcgggccgcagcacgccgctgttcggacggcttcgcagggccacgtccgagggcgagagtctgcggcgccttggccttccgcacaaccagttggccgcccaggccggcgccaccacgccttccgccgagtccctgggctccgaggccagcgccacgtcgggctcctcaggtgaggaggggcaggggtagggcagcaggtgcagaggagggtggggtgcgctggagagaggctgtgggaggagcagagggctggggacacccaccaggggcaggctgaggccccgagggtggaatcagcagggctggaggggaggaaagcaggaatggcggcagggctgggtgggctaggggttccttctggttctctgggctgagggctgcagagaggtgggaacttgctggtactgactgaacaaatactcacgggcctgagtcttcacagccccaggggaaagccgaagccggctccgctggggcttctctcggccgcggaaggacaaggggttatcgccaccaaacctctctgccagcgtccaggaggagttgggtcaccagtacgtgcgcagtgagtcaggtaataagaggcctgctgggtgaggaccctcctcccctcctgccctcccctrcccccatcagggagcrgtcatggctggtgagaggtgggccaccttgacaaacctagtggaaggggtctgctcagacaactataacaatagcagtagctgacattcattagataagctgagtgttctattaaacactttacaagcactgcctcattcaatcctgcagcactgtttgggaaatattagtatcattgtctctaytgtacaggtgaggaaacgggcttagtgatgctaaggatctgtccaagtcrcagggctagtaagtggagcagctgaagttggactgtgtgaccttctgcagccaggtccctgaaacggcttcaggacaccacttaygtctgtcgggctggcctcctctctcctgggagaccctagaatgtttctgtaactggctgtacttttcaaggagctcaagatatagggccctcctgcctccacagtccccctttagatgtgtgtgtgcttgggtgtgtacccaaagacactcactttctctccagcctagaggaccacgacctggattgtgccccctaagtctccattgctctgcagctccgaacacctgactgcccctccctgacccttctgcacagaaaagcagcctttggagctctttgctagctctttgccctcttctgtttctctgcctgagtgtcctggagctccagatagggaggcattccccatgtggggtcaccccatcccccctgaaaaaggggcattactcaaggacgacaagcaaaggcttcgggaggttgggttttccaggccagcatgcaggaagggagcgagtccatgaagccaggctgtgtgcaggatcttgacragccaccagtcctgttcttcccccatttcctggtaaaactcagaatagagtggctgtcgagtcttgcctcagctgggcttatagggattgtgtccagccttggccagggcaaagggggctgcagtgagagaaaaggatggagggaagggctgctggtggggaggggagggtggagagtgagggggaaagaaagcgatcagccagcagagaggcctggggacagctgatcccttcccacctggggcctccctcccggcccagttttgcttatgcagctgatttcctgctgaggcagtgtccccttacctcatccgctccccgttccctgcagaaacaaggctgtcccaggctactttaacaaccagggctggcacctaggaatgggggtggggcyggcggggctggcagggctgggcccgggtcactttcacctctgagagaggtggcctctctctctctctccctgctacccagtaccctcacttggcctggaggcagccattgagaaactgtgttcacattgccttgttggaacctcagtgtgggacccctccttggggagcagtggggtacagcgggaagggggcacactgccatcctgatcaccacacctgctgagtactcctcttctgcctggctcatccccactcccagtcccccacaattcttcagacaggcagcagctggggctcacaaggctcctcagctttctcttcccaggtgaataaaatccacccccaagtcctcccctatccccacccttcacccaccacccccatggcccagctgggattcttctaaagggacattcccagggatcatgcactcaaatcctcagggcactaaagaggcacaggctggctacattggaggaaggaaaactggtcgcatccctagccctgcatgtgcacagccaccagctagctgtgaaggcagcttctctgctttgctgraacagcctttctctgggggtctgtctgctccaggcttctctgctggccatattattgagawaatgataacaacaagagaagttagtatttatgatcagttactctatggcagacactttacatgcctcgtaattgtcacagcaagcatcctgtgggcgtgggattattttccttgatttacagattagaaatggagcttctgagagagtaaatgacttgcccaaggtcaggcagatactgtctcttgccccttcaaaagctctcaccacttaattgacctgaaggagtatacagaagacctacgaccctgtcccccgatggcaggtgggaagaggggccaggaagccgacacgcttccagggtctgcccacagttttcctagactgcagctcttttgagactgcacattctgatagaacattcctcatttggtcccatctcagctcgggtcactaactcatctcaattctcttctcacttgccctgtggtgccccagagagggtaggtcttgcaggatcttaaccattatagtttttcagtatttgtttgcttttattttatttaacaaatgcttatagaccacttacttagtgccaggccctgctctaagtgatttacaaacccatgacataagtagcattgtcagcagtcagtgcaaggaaaaagcagttctgcacacagtgagggcctggggaaagtgatgcttgccccaaagaaaattatcgaaggcatggcgtggggttccactttccacatctgcctgggaagagacaaagtttcatgctgcttcctgatggctgtttgcaggccttctccacccctccctcagcagtaagtgggccagggtccctacagatagatggctgtctctgcttttcctccagacttccccccagtcttccacatcaaactcaaggaccaggtgctgctggagggggaggcagccaccctgctctgcctgccagcggcctgccctgcaccrcacatctcctggatgaaaggtaaggagactctgtctcccacagagagggaggccagcaagtggccctgagcccaggggatgggaggggctrggccggagtggggactgagcacggttaggggggatgctggagtggggagtgagtgasggggcctggacatgtgctgcctcactcagcagcaactcstgctcctccctgtccccagacaagaagtccttgaggtcagagccctcagtgatcatcgtgtcctgcaaagatgggcggcagctgctcagcatcccccgggcgggcaagcggcacgccggtctctatgagtgctcggccaccaacgtactgggcagcatcaccagctcctgtaccgtggctgtggcccgtgagcctggggcagggccccaggggggtagtgatggggatggtgggacagggcttgaggggttcttagctagggtataggggctcactgggactcttctttctcttgccaggagtcccaggaaagctagctcctccagaggtamcccagacctaccaggacacggcgctggtgctgtggaagccgggagacagccgggcaccttgcacgtatacgctggagcggcgagtggatggtgaggatggggcagctggagggttgggggagcggcagggggagggtagaggagtctggtaaggccagtgccctcccaggctccacagatagcaccgtgggagctggggccaccgcttctgtgacctcagcccctcccccatactgcctataggggagtctgtgtggcaccctgtgagctcaggcatccccgactgttactacaacgtgacccacctgccagttggcgtgactgtgaggttccgtgtggcctgtgccaaccgtgctgggcaggggcccttcagcaactcttctgagaaggtctttgtcaggggtactcaaggtcagtgcaatggtatggggtgggaggaggaagggggctctgagcctagggttcttgtggagcaccatggccttgccccaaggcaccacggtgatgattttctctctctcttagattcttcagctgtgccatctgctgcccaccaagaggcccctgtcacctcarggccagccagggcccggcctcctgactctcctacctcactggccccacccctagctcctgctgcccccacacccccgtcagtcactgtcagcccmtcatctccccccacacctcctagccaggccttgtcctcgctcaaggctgtgggtccaccaccccaaacccctccacgaagacacaggggcctgcaggctgcccggccagcggagcccaccctacccagtacccacgtcaccccaagtgagcccaagcctttcgtccttgacactgggaccccgatcccagcctccactcctcaaggggttaamccagtgtcttcctctactcstgtgtatgtggtgacttcctttgtgtstgcaccaccagcccctgagcccccagcccctgagccccctcctgagcctaccaaggtgactgtgcagagcctcagcccrgccaaggaggtggtcagctcccctgggagcagtccccgaagctctcccaggcctgagggtaccactcttcgacagggtccccctcagaaaccctacaccttcctggaggagaaagccaggcaagcagggctgggraaggraagaggacagaggggagtgggccaaatgtctggagcacatggcttcggagagaagaccagactgtcctggctggsgtggggggaggtgctgagacctgggttattagaatgattgcgttcaaatgtgccagacactgcactgcgtgctttagccatatgatctcatcaaatcttcacaactctgagagacactgcgctattagcatcacccatttcacaggtggcaaagctgaggttagagaagctatgggatttacctaaggtacagagccagtgagtggcgaaggtgggactcgaaccctggtttctaggattgaactctggagcccacactggaaccactgcattcttgcccctaggggtccctgctctcctccgttagccctcaytatggaagtgtccccctcctctcctctgagccggtggtgtccctccccccgacacacaggggccgctttggtgttgtgcgagcgtgccgggagaatgccacggggcgaacgttcgtggccaagatcgtgccctatgctgccgagggcaagcggcgggtcctgcaggagtacgaggtgctgcggaccctgcaccacgagcggatcatgtccctgcacgaggcctacatcacccctcggtacctcgtgctcattgctgagagctgtggcaaccgggaactcctctgtgggctcagtgacaggtagctgggaattctaggggagtagggaggaagaggtaggggaggctgggccgggtatcatctgctccatccctgccctcccaggttccggtattctgaggatgacgtggccacttacatggtgcagctgctacaaggcctggactacctccacggccrccacgtgctccacctagacatcaagccagacaacctgctgctggcccctgacaatgccctcaagattgtggactttggcagtgcccagccctacaacccccaggcccttaggccccttggccaccgcacgggcacgctggagttcatgggtgaggggaccagctgccagccagggtggggacagggccctgccagagaggcagcagccagggctcaccccacttcacttacatatgtgccacttattgagtgattactgtattcaagcaatgaacgaagtatgtggattgatctttacaataaccctggagtgtggcataatattagcccccttttacagatgaggaaactgaggggtactgatgttagggatttgtgcaatcagacaattataaatgctagaggcaggattcactacagccaaaaagacaggagaatcaattattattttatttaaataaggagaaccagctaccatcgagcaccctgctaaatgcttgacgttcatgatctctcttccttggtgtggttctacaggccacactttacrgatgaggctgtggagagccaggcaggtttagtaaatcgcccagggtcccatagctagaaggggcaggtctgggattagagccagccaggctgattttgaaggcttttaatcttggtgtcagccacactctttgtgaatgggagccataccttggagccgatccaagggagcttgtcaccctgcttctcagcccctctggagttctggggaccccgccattttgtgcctgggttaattcctcaggtgacccatatgtctcttggggtatgccaccacctctgtcctgcctactggccttcagggcctgccactctggacattcccatggtctggtgaccaggacattgtcctgctgctcaagcacccaggsacctcccccgcccccacttccctgccaccaggaagctgggtcagcttggcctctgtctcctgtcagctcckgagatggtgaagggagaacccatcggctctgccacggacatctggggagcgggtgtgctcacttacattatgtgagtgtcccctaccccaccgcagccctctctgcccatayagtgagctcccggactcaccttctgccaacaccctctccccygtgccccacctcccctgtacacacatccacactgcacactcacactcaggtgcacagtagcatggccctgagcactgtgcacctgacactaatgtccttctgggtctgggtgttggcctccggtctgcataygtcaatcaagctatcttccccaacaggctcagtggacgctccccgttctatgagccagacccccaggaaayggaggctcggattgtggggggccgctttgatgccttccagctgtaccccaatacatcccagagcgccaccctcttcttgcgaaaggttctctctgtacatccctggtgagtgagccccacacctgctatcccccagtgttacctgcccctggcctggcctgtgccagagatctcccagctcctcccctgctcctaggaagaagtctgctgcttctactaaatggtcatactacccaccatttaaagcctgaggcagccccgtgcaaggcagactcactgtccccattccggagactggggaactgagctcttgagctgcccaagatcacacatgtaggggtgggatccaggactgggacatgggtctgcgggaggacagagccccggcagctcccagagcttccttccaggttcatcatccctggctctgcctggcaggagccggccctccctgcaggactgcctggcccacccatggttgcaggacgcctacctgatgaagctgcgccgccagacgctcaccttcaccaccaaccggctcaaggagttcctgggcgagcagcggcggcgccgggctgaggctgccacccgccacaaggtgctgctgcgctcctaccctggcggcccctagaggcacggaccacagccaggcctcgggcttcaactggggttcccaccaatgccacgggacattccagggcccacgctgagccaggmgggcctggggcttcggttaccaccagcagcaacatctggctgggctcttacctcatagaccttcaaggacagagaccccagggcctggacctgatgccaccccaggccaaagccagagtgggagacccattggtcaggctcagcagggtgggaacaggcagagggacaagaggggaatggagaagtggagaggaaaaggaatcgagggacaggaagggggaggctctaggaaggttctgggttgggggtcagtgcatctcagggagaaccaaggaaggtgggcatggctggagaggaggaaaaggaaggagccccaggtgtcagggcagtaggctgggagtcagtgtggcaaagcgggggcaggacacagatacagtggcaggggcccagggctgggacatgagagaaggcagcgaggcggcagagggagaagaraggactcaggtggaggtggggtgggtcagctgtcagcatccctcagaggagaaatgtggagagctggaggccagcagtcactcacactcgctctgtcctcctgtccagtggatacagccctgggcgctctgctggcccaaggatgtccccactgcccctccatggcctytggccttcttcccattcatatttatttatttattgacttttatgaagtttccccttccatccgatccctactgcccatgttgtcctgaccatccctcccagccatccagctgtctgtctgtctgccacaaggaaataaaaatggcaagcagcataacctgtgtgtctattgggagggatggctggaggggaagatggctggtgaggggtgagtccgggacaggggcatttagccctctctgggtattccccaacacacacattcaggaatataccagctagcactttgggtccttccaaccccctcccgtgaccctcctggcccctcacctctccttattcctggagggaggggagactgtggtctgcttctccccttgcagtttccggaatgttggcagatccactgaacccctgcaaccaggctctagtagcccccacctcttgtcacgtgttccctcatcacaatgtgggggatgctgggctctgaaataggccagccctcaccccaatcctggctcagccttgttcactctccccagaagacaggcaggagctctggtcctgacccctggagcagagtgggtttcatcctgatggttggtgagagtaggtagtgtgaggagctgcagaagaaaccaggacagggaggctaaggtggctggatcacctgaggtcaggagttcaagaccagcctagccaacatgatgaaaccccgtctctactaaaaatacaaaaattagccaggcgtggtggtgcacacctgtgatctcagctactcaggaggctgaggcaggagaatcgcttaaacctgggaggtgaaggttgcaatgagccaagattgcaccactgcgctccagcctggatgacagagtgagactccatctcaaaaagaaacactaggacaggctcacaccccttgccctccatgtcacagcacatatcagagcacatggagagcaccagctgggagtgctctagtctgctgtgtccagcattttcctagggctgagggacacaccagcctggaccttcttgtccacatggcaagttaggaggtctgctgggtgctaaagcacctcaattctagccacacccgtgccatagaatggtcactgggacctaggactgagctgctctgccctgaggttggggacgagggattggggggttggcagggacccagacctccttgtctccagaggaaatgtttccctcatccccaccttcaaaattctgttcttggcaaagtaaaaggaacaaagcctctgaccagggtagacagagttgtcactgctgtgttgctgatggaggttgagggccccttggctccagcccagacaacccttttgcccagcccagcccagcctctctagcttctcaggaccccagggaagaggcaagccccatcatcataaaataacaggatgttaaagccagctggaagggaccagaacgacaccttgcctacctgtcattttagcgatgaagatatacagtttgcctgtaagaatctccaatcccctacacactgcaagtgttttgtataaaaatgaggtgcctgaactcatatcttgataaatggtaaaattcctctcccgtccccgctctgatcttgagctcccttcccatctccattggaaatggcatgtgaactgcttgttccaaacccggaggagcaaaggtaatttatgtcagcagagctatgtcaaaattgctctgatcaaaacgtgacagtgcccccacactagggcgggtagttccaatgaatggaagcaatgcttctgcccggtgcccggcctgggcagactggcctccaggcaatccccagaggggttaactgaaccccttcaccccaggtggtctgatgcccctatgcaccaatttatgcccccaaaaaggaattgggcagacctagggttggggccagtagtggtgctaatctccaaggacagtgcagtctaaacagcccccaccatgtgacatcgaggggagtgagtggggatggggaaggcatggaggggctgctattctcaaaaatctttcccgtcccctcccggtttatctcagtttaccgccagggggcacagtgtggaagtgacaaccctggactcctggggttgggggtaggggaagagtaaggagcttctggattggtcttgacagccacgtggccctgttgccgttagctgtaggggccctgaggaccaagtccgatgctactctggctgtattcagggaaaccccagaaacactcaaaccccttaaccaacagggtgtgttgtctgactatccagagcccaacctgattgaaaagctgccccagcaggaagctggatctcttgtcagctaggggctgaatctggtcctcctgggagtgggatggataccccctgccctgggaggggacagggcagcatccagctgtccagctgtccaggtgctgacgcaaggtgcacctcagagctgctcgggtttctccccacgggcctagcccagcggctgagccagcatcccaggcatccacaggctaaataaagagcctgcctgagtcagagggaggcggatggggccccggggggcttggggcaaccacgccaaacaaggcaaggaggggagcgatgtataaaaccgggcccagggctgagcacctgcctgcacccctactgtgccatccagaagggctctgtgctgcctgcaatccagccagtcgactcaagtccctaggtcaacccctccacggtgagtctgatcctcagagaagccgcagacacccccattcctccatctccctgaatgttctgaccagggaggaaaagggctgaaggtgggagcctctgtctcaacctggacccccatatttgtcgcccactccccagatgtctaaagcagctcctgccaaaaagccagtggctgtggccccagctcctggatgtaccctggacatcaatgacccacaggtccagagtgcggccattcgtatccaggcctcttaccggggccacaggtgagagggaaccccggagccctgtggaggaagggagctgcagagagcgcactcttgagtggggtttgagtaagcgctgagcagcgtcaggagcctttagaatgagtggtctcaggggagggtcgttactgaggtatggaggagtggccgggaggaatgcatcatcctatcagggcagcagttcaggagcagtcctcttccctaccaagccacacgtttaggggtctggcgggtccagggggcaggtaggagatggtgcgctcgcggtaagggctgtggccgggcctgtcttaggaactctgggccctgactcggcccgcgggtaggtcccggaaggagctgcgcgagaaggggccgccgcgggtgctggagccgctgaaggacgtggtgctgatcgaaggcagcgcggccaagctcacttgccgcatttcggctttcccggacccattcatccgctggagtaaggacggcaaggagctacgtgacggtcccaagtaccgctacgtcttcgaggaccctgacgtggtggcactggtggtgcgcgacggcgagctggcagacctgggccagtacagcatcaacgtcaccaaccccttcggccagtgctccgactcggcgcgcatcctcgtggaaggtacgcgcgccccgggcgcagcgccagggcgcagaccagcaccactcagccagagcccgcagcccggtccagctgcgcgtgtttacctctgggcctagctacagggtccccgccagcccagctctgggcacggcctggggcgcatcgccgcgccagccaagtgcgtccttccctacctcgggatccagctccacccgggctgagcagtcagctgtggacttccatcacgcggctccgggtccccaaggtcacacagcaagccagaggcagagccagggttggacccgggtcttctggctcccaactctggcaatttccactacccggagcggtctctgaggcaccgcgagatgtgtgaacattcaggggctttcgcccgccttatctctcttgatcctctattcgaccccgagaagtaggagaggcagggataagtccctttaacagccaaggagatgaaaccagagaggctaatgatttgctcaacgtcacactgcgagtttaaatgcatctgtatttagtgccgggtattagccggtgaggtgatgccctgcctcatctccgggtccttcacggggtttcgctcccctttccttccgctagtcccgacgaagattcaaaagggacccgacaacactaaggcgcgcaaaggcaccaccgtgacgctgactgcggagatcctgggagagcctgcgcccgacgtaggctggaccaaggacggggaggacatcgaggaggatgacaggcgagggccgggacctgcggcacggccagggcctggggctggaacctgggtgggactgagcccagaaatctggctggagtgacgggggcggggactgggcagcgaggaacagagctggctaaggagccccgcccagtgcgcccgtgtactgaccacggctccgccctcctccccgccgcccttccgcagggtgttcttcgagatcggcagcaccaccacgacgctgaccattcgccgggccacgcctcaggacagcggcaagtacgaggtgtacgtggagaacagcctgggcatggaccagagcttcgctcgcgtcgacgtggcctgaacggcacccccggaccttccgccctggcgccgagcccgggggtggtgggacccacagccctccaccagcttgcttaataaagctgctctctgaccctccgcgtctgtcctgctcttccgcgtcgccattccctctcccccgcaccagcgcccacacgtattccagacccccacgccaaggtcacagcctgttggagtcacagggaggtctggagagcgcctagcgccgtgctgcatttcagacagtcaaactgataagagttgccctcgccgtccaaggcgccctcacttcccagcggtaccgccggctgggcctgggactccgccttctccgcttttgagcgcctccagccccagccccttgtggctgtttgcccctggccccgccccttccagggctggccacacacccctgctgtccttagtcccgttttcctgtgggacccagttcctcacttcggctgctgccccgaggccgattccccaacagctcgggtcccagtcttaagttccaggctgggcttctcaggccccacccttcttcgcatttaaccccgccccgcgatcccttggtcacacccctggacttcagcacctctttcctctcccataaagttagaaagcgggtaaagggtcagactacaattcccggcagaccctgcgaatgagttctcgcgacttgcgagaagacacgtgcgcggaaggagcttgcagtagcgggcggcagagctggagtgaagggagctagtggtaaagggagctggtggaggggtggcggcaggggtaaggggcaggggacaccctctagacggagagcgggctccgaggtcctggctggccctcggtgcgcccgcccctgtgttggtcccacaatccctggcaatgagaggccagggtttattggacagagtcagttgtggggttcagagggtcagcaatcaatcaatcctccgaatccagagatttagacccagtcgtccgtattaggactggaggggggtcaataggttcagtgtttgagatgccaagggaacctgtcttttgatttggggttcaacatacagaggttagttttaggattcatgtttagcatatagaggatttttgctgggattaggggttcttcaaattcagatcagtgttagttcagtacttggggattacgttcaggatttaagttaaatatctgaggctcactcagggtttgctgtccaatattcagggttcactattggggttcagggcttaatatctagaatgaagacgcaacactttgggaatttgaggcttcagtattttgaggtttgggtctgagaagggagtctctgccaggtttctgaatttgcagaatttgttcatggccagagggaagtcttttagagatcaaattgtggggtgtgaatttcagaatttgggaggaatcactgtgaggtttgaaggc

SEQ ID NO: 96716 - DNA, 51129 bp, Homo sapiens
ttctttttttttttttttttgaggaggggcgaaagcttcctaagtgatgataaagtgcaactggtttaaacccaaatttgccacccagggttgctgccagagctctcaggccctcatttggatgaggcaatgtagtttctttcagcgcaatgttcaggctctgggactcctgctggaaatttgccagggcccagggcttggggtggcagctccccacaaatatgacaaggctgaacggacaacctctcttgccactatcctggccgccttgcaggtgagcctccagcctcttttatacattttcccaaaatgtaaaaatctatctttgcacatgcaattcttcaccgtcccaacatatatataaccttggtgtgtaaagagcttacagcatccctccccccacacctataaatagcttcattcagataaaagtcacatgccatatgcacctttttttttttttgagacagagtctcactctgtcgcccaggctggagtgcagtagcacgatctcggctcgctgcaagctctctgcctcccaggttcatgccattctcctgcctcagcctcccgagtagctgggactacaggcgcccaccaccacacccggctaattttttttttttttttttgtatttttagtagagacggggtttcacggtgttagccaggatggtctggatctcctgacctcgtgatccgcccgcctcggcctcccaaaatgctgggattacaggtgtgagccactgtgcccggccgccatatgcacctttttaaagtatacaattcaatggcttttagtagattcacagagatgtgcaaccagcatcacaatcaattttagaacattttcatgaccccccagagaaaccccatatccgcttagctgtcaccctatgtgccccgcaccccccgctgcccgctctctgccagcctctggaaatcactcgtctactctctgtctctatggatttgcctattctggacatttcatagaaatggaatcacacactttctgaccttttgtgattggctgctttcacatagcatcatgttttcaaagttcatccatgtttttagtggatcaatactgcatttctttttatggctgaataatattccattattggatattccacatcttgcgattcctttcatcagtgcatggacatttgagcttgccacagtttttggcaactgtgaaaagtgctgctgctgcattctggatccaacatgaaatgcatgggcaagagggggacatgttccctagagatctcaagaaatgccccgttgttattattttgtgtaccattttaaaaaatagactttctgttttagaggtttacatttacagaattgcacagaaagaacagagtttgcagtgacctcgtgacctccacccccacctccccaccagtttccccattgacatcttgcatgaggatagtagtacgtttgttaccactgattaacaagtattgacacactattatgaactaaagtccataatttacattagagttcactagtggtgttgtacatcctatgggtttgcagaaataatgcgaggtatccaccattacaggatcctacagaatagtgtctctgccctaaaactcctctgtgctccacctgttcatcccgaacccccacagcaaccactgatcttactgtttctatagttttgccttttgcagaatatcatagagttggaattgtacagtatgcagccttttcagactggcttcttccaattagattagcaatatgcatttgaggttgctccatatctttttgtggcttgatagctcatttctttttattgatgagtaatatttatttttatttatcgtagcttttctccagatggaaaggcccaccatcttccagcacttggcagtgtcttctgggggtcttgctgccacttgctgagggctttgccagctggctctgtctctcccctggcctgcaggattgggaggggtgatgtcagctcagggactgagccctggtcatttctaggggtgcagcacctgggcctggaaggtgcccagggagaccttgcgggaggagggagagaggaagataggaaggggtgagggatggagggagagggtactaggtggaggcagagagagagaggcagctgccaaaatctatgagacagttgaggaggagtggaggaggggcgcctcagggatttagcagttgttggtcactgtctggtgggagacctgggggacgaggcagggggcggacagctcaatcctccccaactgtcctttgccctgaatgtggggctgagccatcagccagagtccccaccctcccaagggagaaatgggtgttttgcagtcaggaggcagcggagaggggttagaggaaaggacattggtccacagcccttgtggtgcatgtctctgggagccaaagggcaaatgcaacacctttgggcccagtgaggtgtaaccaagtgagaaaaggttaacagaggccctggacccagactgtacttggcaggactccaggaaattagtcacgtgaaggcagggcccaaggacctggcccttgcccccagcaggctccgagcctgcaggagctgagccctcaagtgagggggacttcctggcatgcccacatgcctcttggctctgcctcagcgaggctgctggggctgggggagcagctccccctgggtcaagcttcctcttgctggctgggagcctccctaatcccagggtgtgtgctgggggcttgccaggactctccactcccttgcctctccctgtgcctcctgccattcctaggattttgtagctttgggtcctccttccccaaagaggtcctcgatatgcatgagtcctctcatcactgacctcaggggtctttatctgcttgcccttgctcggggccaagtgtggacagcgggtggcacaagagagagcagaagagagaatggagagggaggaatagaaaggaggaagaggagagtgctggttaaaggcatggcctctcggccactcccacctagaagtggaggctgttccctctcctgtgaaatttgggcgagtccatgattagctgtggtcaacaggatgaggcagaggggcatggggacctcccaggctggctcttgacctgtatgcagcttccacttgcaccatcgaatgtcctgtcttctgttccagctccatgctgagatgcccgtggtgcacggggaggtcgctccatgctgagatgcccgtggtgcgtggggaggtcactccatgctgagatgcccgtggtgcacggggaggtcgctccatgctgagatacccgtggtgcatggggaggtcactctatgctgagatgcccgtggtgcgtggggaggtcactctatactgagatgcctgtggtgcgcggggaggtcgctccatgctgagatgcccatggtgcgtggggaggtcactctatgctgagatgtccatggtgcgttgggaggtcgctccatgctgagatgcctgtggtgcacggggaggtcactttatgctgagatgcccgtggtgcatgaggaggtcctatgaggggaggtggagatgctccgactgacagtctcagctgatagcaggcacccaccgcggcctggacatgagcctggaagactggccagcccgggccagtccccggtgactgcagacacagctagactaggggaggcagaaggaccacccaactcgccgcacagactcatgacacagatgataatggttttaagacaccaattttgggggggctggtaatagataaatgaggcagggtgtgtagccatgttttcactttcatagcatcccatcctctggggggccccctgccccacttcaggtagctcacagcttccctccttcccaccctttccacctccattcttgttcaggttggctcttgccccagtcttccaggaatttgcctctgggactgaaggtgtttgggctgagtcacctttccctgaatcaccctgagagtccagagtctcccttctcaaggctggcggctcagccctcttctgtatcacctggcaataatgatctcctctcccccttcctcccttcttccatctgctgacatgatcccagttcgtttctactgtttccatcagagaacgtggctgacacggcaactggcatcgggagaatgtcataggccatgtgccccaggaaataagggccttggaaacaagtgatcagctgagaagggaaagggtccagcatcgcccggacttgcttgtatattctaggggattggcagccctgttcctgagagtgagctgctgatccgtctgttgtgtgcagtatctgagaccacagaagatgcaggactgaagggtggcatgttgctcctgacagcattggaagctctggagagagggcagaggctgaagtctcggaggctccccccgccccagccacaggatggcgcacaggggccatgtgcagctccgctcaaagtatctcaggttccggggcagaatcctggaaaacccaactcggagctgagtctgcaggtggctgcagggcggtgctgctgagtctgcagttaccaccacaaaaggagggcctgaaggcattgccaggagactatggaggactcacggagctctgacacccctcacctggaggaggtggcttccccccaccccccactctgcctgcaccacctttgcctggggcggccaatgcatggcagtggagtcagtaatcgcccttgctcctccccagggtcaaacccactggggtctggggattgaaattctgagaggagtgtaggaggagagtgtcttcccgaagaaaatgtaggaatgcattggcttctatcacaaaaatcctgggaatgttcctgagaagggattttggagatgctcggcctaggactggccctcgggaagatgacccgacctttgtcctgtgcagctgagtgctgaacactggtcagctctggataaagcctgatgtcaccgagctgatggcggggcgtctgcactgaacaccttccagcttggtgggggcacgggaaccagctgtcctcattaaaagtgacctggagtgagatggattcttctgcctatacctccacgtgtgggctccctgaacacccccatcgccatgggctcccaagaagtattgcttctggctgcagggctcactgcaatgctgcgacaggaggtgacaggccaaggccagcaggtgactgctctccccagaggccctgtcagctggaagcagctggtttcacataacagagaccccaggcccaggtcccctggatgcaggaggatttgcggctgcccttttggaagaggtaggctgaccatgagaactggccaaaggtgagaaggacgtggagaaggtgttggaggagggaagtcagacatactagcaatagcctggcctgcagggctgtagctttcacctgtacttcctcctgtttggtgtcatcatcacaatcacgatggtgataaaatgtcttctttcctctaggcaggtggtaaaggtactatttggtgcacaggttggagagtgctgtgataagaaccatcagaacaagggcaggaatgtgacctcccaggtgatcctgggaggatccagtggagcgtttcagaattctgtgtcaaaaaagaaggctgcgtgttgactggggtggggctgtgcctgtgtttggggccgcccatgggtgtagcaaaccctttttttttttttgtatttgtcctgcctcctctccttcagggtctgctccttcctcctcgcggctctgggggctgcatctcggaatcctgccggccactcctccgctgcaggggtggacatgggaaccaagtggggcctttgggatgtcttcagccctcccacagccactggccagcctgcctgctgtcttcctgcccccctcgctcactcctccttctcctgggctgaaccacacccaaaagcttgatccaggactgggctaggtgaccggtgcaatccttagatgcctctcttggttcccactgccctgctggtcttgaggcaggttgaggggggagtcacaggccatccctgcaaggaaaagcagagagggcaatttgggaaggtgacagaggaccctgtgggacgtcgagacacagccttgctgggcacagtgactggcgtgcatagtgagctgctttcccaagcactgccacccctggctctcagatatgctgctgaaaggggtgacgggcagtggggggcttgggactccgccgaggtgtcctagctcccatccccatccccaggcccaggcccaggcccctccagcatgaaaggctagggaccgcactgccatggggtttgccaggcccctgtctcttgggaagccacccctcccagggaaaagcagggctgagggctgttcaggctctgccaccacctgctctgtgacttcgggcaggccaccaattcttctgaaaaacgggagtcactgtgggcaccatcacgcccgggtacaggacgcccagtggctcagctgccccagccaggctgccctgtcctggcctcagcacacctcccacagccactgcaggcagccctggaccttctcctgctgaggccttactgccaatccctctgggagaccagacacaacaggcagcggtctgggtgactcccaggaacctgtcctccctagtggctgaggcagtaggcttggcagcagggactcagtgccctaggaggcagggctcatcccacaagttgccatggtagcccctcctcctgccccttactcatcagccaggctgtaccgacacgggctgcccaggcagggggtggctcgctggacaaagctggccgtgcaggcgctcaggcgtgcagggtagccagtgccccggccaggaatggacagcctccaggacacagtggccctggaccatgggggctgctgccctgccctcagcaggctggttcccagaggctttgggactgagatgtggactctctttgccctttctggacccctggtaaggaggaggagctggggggcaggtagggagtggaggaagctgagaggctgagggtgtctgccttgcaggcaggatccagaaatgtgctcacattttccccagaaactgcccatgttgactgccaggtccagagtctggggacagcaggatggctcctgaaagctgtctctggacaatccccagtggcagtggggcctgactttgctcagcagcaggcagcccccacacagaaggggtgggtgtgcctcagctggaaacccacaaaagcctgagttggaagatggctccaggacaaatgggasccagagatgcatgaagcctgcagcaccttcgcagggggaagaaggggccggctacccatttcatttccaaaggggaaattgttttaaatacatttattttttctgatcatgaagaggaataggctgggcgtgctgcctcacgcctgttatctcagcactttgggaggccgagcagggaggatcacctgaggtcaggagttggagaccagcccggccaacatggagaaccccccgactctactaaaaatacaaaaattaaccaggcatggtggcgggcgcctgtaattccagctacttgggagagagaggcagagaatcgcttgaacccgggacgggtaggttgcagtgagccgagatcgcgccactgcactccagccygggcaacaasggsgaaactccgtctcaaaaaaaaaaaaaaaaaaaaaaaaaacaaaaccaaaaaggagtaatggaattgcacttcctgtaaaacttttagaaaaaaatgaaagatataaagaagaaagaaatttaactcaaatcctagtacttggaaatagccattactaagattttggtgtatttaattcccctccttttttgggggtgtgcggcctgaccaaattattgttataataggaactgcaatagcagtatcagacacttgggtcaagctcagggcgccaggcactgcgctgcgccaggcactgacccttctgggtagggacgtggaggccaggcgtgactgcagctgcagaacgcagaatgggagctgggctaggtcatccgacctccagccctggcttccccaggcgtaggtgacctctcggggcactggtgcggggccctcaaagctggagaggcctgtcttgcagggctcggctgtgtgggcacctgtggccccgagtctgacctggccgctgtcctccagttcctgttccaggtgctgacttttatgatctacatcgtgagcactgtgttctgcgggcacctgggcaaggtggagctggcatcggtgaccctcgcggtggccgtgagtacccagcttggcccagagcagggacgttctctccccaggcttctccaccgggttcccgggtgggcccgtcttgggtggctggtcagggatgggaagacacagcccacgtggctggacagctgccttcacaggtggaacctgagggccggagatggaggcggtctggccctggggcacacagcacatgaggctgctgagcagagcctctgccaccgctgcctgctgggcagcatttcctgaccctggctcagcccagatgcaggggcctctcttcaggcctcacctgacaagctcttgtttcctcctgtgtgtggcgccagtttgtcaatgtctgcggagtttctgtaggagttggtttgtcttcggcatgtgacaccttgatgtctcaggtgggtggcctcctggagctgggcagraagccaggcaagggcagagccaattccacaggtgccatggagatggcaggtgggaggggcgcagccaggtgatctgggagcaatgggccctggggtcagctgcccctgccctacctccaaggaccacaggctgtcagggaaacagaccctcccctttgaaagagtctgggccaggagaaaggggtggagatggtggagacagttctctgatctcttgcccccagaggaggtcaccaagtagagaaagacaaccggttccccagcctcaatcctaagttcggctgcctacatgcaggcwtgtgtcgaaggccaaggggacacagaaggaacctccctgcttgcaggggcctgcagtccagcaggggctgcccaggtggccatggggtcacaaagcggcaaggcctcacctctccctgggggttttagcttcacggtggacctgggctttgtcctggctccacttaacctgccgctgacatgtgatgaagccccatgtgccttcgtcctccttggagctttggaagaacagtggagacagtggtaggcccaggctcaggaaggccgctgtgccattacaggctgcgggcgccaggctgtggtcaccagaggccgcmgggtccgccacacaccgctggcgccgctgacagcccgctcccygcgcgggatttaggaatgtcccgggcagtggaaacggctgacgcggggcgggctgttttgcagagcttcggcagccccaacaagaagcacgtgggcgtgatcctgcagcggggmgcgctggtcctgctcctctgctgcctcccttgctgggcgctcttcctcaacacccagcacatcctgctgctcttccggcaggacccggacgtgtccaggtgcgctgggctccggctggggaggtggggcttgctgggaaacccgggccgccgagggaaaccctgaagatgcccagccctcacaccccatgcttctctaggccacgagtgctcacagtgcacggtgcctgtgggtaccttccaggctttggtttggggattctccccatggctgcggctccagcagtgaccagcagggacagaggcggacaaacgcccagttttaatttagaaggcaaggcaagaaacaatttgggatttgcattttatttgcatttgtgtgcccggacacagttggagctttacagatgctttcgaagaaatgaagtgtgtgcattttcccatattccgaaaaggagaaagatgacaaccactttttgatgaattatagatgatgatgatgatgatgatkatkattattattattattattwcttgagacagagtctcgctctgtcgcccaggctggagtgcagtggtgcaatcttggctcactgcaacctctgcctcccaggttcaagtgattctcctgcttcagcctcctgagtagctgggactacaggcacgtgccaccacaccaggctaatttttgtatttttagtagaaacggggtttcaccatgttagccaggatggtcttgatctcctgacctcgtgatccacctgcctcagcctcccaaagtgctgggattacaggcatgagccaccgcacccggcctatagtttattattaaatttattttataataaatccctctcatagggatgccttgttcatttatattatgtacatttcatttggttattcctttttaagatataacctttttttcttacgaaccacgttactctgaatttaagttccctcatcctgaggcctgggtgtttgggtgtttcggctgcccctcctggcacctgcttaccatctggaagcagcagcccctgatgctgaggtttcacagtcctggctgagaccctgggacagcggccgagcacccagtcctggaggacacaggggagagggccctgcctccccgggccacagcctggtcagctccggagcttctccctctcttgcaggttgacccaggactatgtaatgattttcattccaggacttccggtaggtgcccctgtttgctgagcgtggaatcacattcccctaaattctggctttttgctttcccactctatctgctgcggaagatccctatcctgctgtgacttcctgctgggccatgagggtgactgacaaaagttcccgttgcagttggtgcaaattgaatttaaaaaaaatagtataacatgtttttctgatttgaaaatgtttattggagaaaatacgaaaagcatgaggcagagaaaattcaaatcacctataattctaccacccagagagaacatatgttactatctctctccaggatttgattttttttgagatggagtcttgctctgtcrcccaggctggagtgcagtggcacaatcttggctcactgcaacctccgcctcctgggttcaagccattctcctgcctcagcctctggagtagctgggattacaggcatgcaccaccacgcctggctaatttttgtattttttagtagagatggagtttcaccatgttggccaggctagtcttgaactcctgacctcaagtgatctgccacctcggcctcccaaagtgctgagattacagatgtgagccaccgtgcccggccctccaggattatttctattcacgggtgtgtgtattcaaacacacacataaacacaaattggaatgggatcagtatgtgtatattgggttataatacgctttttccctttaaaatatgtcattagtctctttataggactaaataaccttccacaatattaattccaaaggttatctggtacccatagttaggccataacttattaaccaatctctatttataatacgaactattataaataagatttgtggtaaatattcttaaaaaaaaatctttgtgaatcatcttacagatggttttcaaggaaactatcaattacagaaatgcattactggaagtggacggctcagtgaatggctcttgagacatattgccaaactaccaatttctactcccaccagcaaaaacttccactagcatagactattattattaaaagatttcttccaattagaaatagtattaacatgcatttcttttttcttttcyttttttttttttttttttttttttttttgagacggagttttgctctgtcatccaggctggagtgcagtggtacgatctccgctcactgcaacctctgcctcccagattcaagcaattctgcctcagcctcccgagtagctgggattacaggcacccaccatcatgcccagctaatttttgtatttttagtagtgacagggtttcaccatattggtcaggctggtctcgaactcctgacctcaggtgatccactcgcttccacctcccaaagtgctgggattacaggcgtgagccaccacgcctggcctgcatttcttttactgataatgaagttgaacattttctcatgtacttattatgtgaatagctcttcgcttattttagtgggttaatctttttctaagtattgtacttcttattaaataatatcttaatcctttgtctcaaatattttccaatttgtcatttgccttttattctgcttatgtttctgacttaaagaattttgagctgggcgcagtggctcacgcctgtaatcccagcactttgggaggctgaggcaggcagatcacctgaggttgggagtttgagaccagcctgactaatatggagaaaccctttctctactaaaaatacaaaattagccgggtgtggtggcgcatgcctgaaatcccagttactcggaggctgaggcaggaggattgcttgaacccaggacgctgaggttgcagtgagctgagatcccaccattgcactccagcctcacaagagtgaaactccatctcaaaaaaaaaaaaaaaagatttgtgaatgtgtatgtaagtcctattccttatgtctttaacgagcttaaaagacttaacccagccgggcacggtggctcacacctgtaatcctagcactttgggaggctgaggcgggcagatcacctgaggtcaggagttcgagaccagcccggccaacatggtgaaaccccgtctctactaaaaatacaaaaattagctgggcatgatggcgggtgcctgcaatctcagctactcgggaggctgagtcaggagaattgcttgaacccgggaggtggaggttgcagtgagccgagattgtgtcactgcacttcagcctgggcaacacgagcgaaactctgtctaaaaaaaaaaagacttaacccactgcaagattatatacacatttgcttatacttttttggacccttccagggtttctatttttacatttaagatattaatccaactaaaatttttttgaacaccatttattacatattctctcctttctgcattaatttgttaattaatcaacagtacatctakctaggtcagtgattgtatgtccagtgacccggggatctgtatgtctcttctgcagcccagtgcttcactgtttgacttgcagcttagtgatgcctgttacgactggcagttctgtgtgctagacagccctaccaggctcagctcactttctgacagtgtagcctccatggcaccagggggaatgtttggggcaagggagctgggcagggaagaggtcagggtgaaggtggggtgtcccaacagygtgcagtcccagcagacccagccacacccacctctctgccaggccagtgccatgacctttttggggcctagctggttacagatttttttctggtttacggaaacccccttatagggctgctcttctcctctgagtcttccacataatccatactttggcttttcagaccgaggtgatggcatcttgtcaaccaggatttttggggctgggtcggggggaaatgccctgtaaagatgtcactgtggtgtcttctttgtcaagccaaagtccttccataaaatgcagctgcaaaagttaattgccaataatagtgactaataacactaacatagttatgttagtggctaacacttggaatgcttaaatgtcccatatatcatttggtaagcactttgcaatattaactttgcaatatttatgtatgtaaaatattaagtgtatattaagtacacacacacacactattattatccccattacagatgaggagacaaactcagggagattaagtaacttgcccaagatcacacatctcagaagaggcagagccaggaattaaacccggtctattccagctctgtactcttaatcagtacactatgctgaaaataagtgaagagctacaggaaggaatgggacaagggccctgggctaggtttcagttgatgcctattctattccccttaagagaggagagaaagggtaggtacagtgccccccaacacacacactgccacgtacactcccctatggtcctccccagccagggaagggcccgccacccccgtagggtcttgaacctgcttagcataggctgcccacggccagcatgtctcagtacctgccattccctcgtccgargtcacaycttcaaatcctgtctctaaggccagaaccaaagtgggcccttctgtgaacaggtccttgggtcacttctcaccttcctaagctgatggaagcctggcttagcagccggaaggcctaccaggcactgtgcactatgagcatgtgtgcaaagagtactctctctgagccaaagcatgcctgctcatctcccctgtggcagaagggagccctgagggggcctcttccataggctgggcccgagcatgagtccaggtggctgggtaggctttggccgcacctgagaggtcccagacatactttgatgaagtaatttccccaatctggggtactatgtcctggaaaggaatgtctgttaatgctcatttggtgagttttggtcattattgttgatttgtttgggtttgcttttcatacaggtgatttttctttacaatctgctggcaaaatatttgcaaaatcaggtacaggtctttggtgtgtggggaggcccttctcccagcacactgccctattccagtgggaggggggcctggggctttccccttctctccaccatctgtgaaccagctcttgaaaggggtcacttccaacccacctgccatatcctgacctcccgcacagaggcaggtgagaggctgtgcgtcccagcctcttccaactcctcaacagggatggctgaaggggcaggaggaggagtccccattccaaaccccrggtttgtccatcctccatccatctcactcacaccttagcagggccagttttcatttatttcagaagatcacctggccccaagtcctcagtggtgtggtgggcaactgtgtcaacggtgtggccaactatgccctggtttctgtgctgaacctgggggtcaggtgagcccgggggctggtggggcctggtcaggggacactgcccactgagctctccacccctggtggagacagatcagtcaccatcctggccctgcctgtgycgtcctgaagtggagggttatggggagttggaggggcctgatggtcccttggggacctcagtttgacgcttgattgggtgagaggacagccactccccgctcctgcccaagcccaccaggagaggtgaagtgggcactggcaaggtggcccccaggacactgtagtcacggctgccttggtagagccaccatggccagaggtgcctgtgggccctggttgagtctgatcccaggatgggggaagagcagagccatgcctgccccacacgggctggccgccagagccacctctctctcaggcagggcggtggcagagagttggcatcagtcgcagccctgttctccctccttacccaggggctccgcctatgccaacatcatctcccagtttgcacagaccgtcttcctccttctctacattgtgctgaagaagctgcacctggagacgtgggcaggtgggaggcctggcctgctctgggaggctgagcaggccagcggtggtgctgccctagccttggggcagggtggtcagcaggcagagggtgcagtagagcctgttggaggaggtgcaggaccctgcacggccccctccttcccctttgcttccccagccccaagggcccagagtccctccacccaaggtgtcacgatgcagagccctgctgggtccatcacagaagcctggcccagggagctttcttgcccagcctctgctctcaggatggcggtgagagcagtgacacccgtggaataccaggcgtcagcagtgcgtggggtgcctgacattcctgaattcatttaaacctcaccccacctcattagccccattttacaaagaggagattatgacagacggaggttaagtaatttgctgaaacagcaggcgtgtaggggcctgcctgtccttttctgcctcttgagagccaatcccatacaaggaccttctcctgccaggcatttcaggaacagctctgcaggcccctggggcctcatgtggggcagggccctggctgagccccttccaagcttgcccagtgcacctgtggtgtgtttcccttcagcatccttgatctcatgccgcctctgaaaactccccagggaggcagggcagctataaggcctggggttttcagatggaaatggagcctgcagagtggtgggtggtggagtggggaccaacacccatgccctgagccctggggccacaccgtggactggccaggtgagcctggtgccctgttcctgcatcctcctcctccgtaggccccaacaccagctctagaccagctgcattccctctgcaaaatgcccagtgcctgagcctgctaagccccagagcaggaagagccaaaggggtttaggggcctcctggcagtggggagcaggaatgaggtgggcaagcagggcagrctgtcagctcatggggcctctgtttccaggttggtccagccagtgcctgcaggactggggccccttcttctccctggctgtccccagcatgctcatgatctgtgttgagtggtgggcctatgagatcgggagcttcctcatgggtacgtggaagagcatggggggcgcaatggcgtgtgggcggctcacccagcccagaagccccctccccaggatggcggctcacccatcccagaagccccctccccaggatggcagctcaccagcccccttccagcttcactggccaggccctcaggcttggacccagagaacaccactgcccagcggggctgatccgtctgttgctggtctgcctccccagtaggctgtgagcatccaggaggcagacttgggccttttgtgcctgaatcccagcatgggccaggcagagcaggtgcccgtgggaggtggctgaggcacggaggagtgagagattcagttggtttgcgggtgtgagcagaggtccaggcttgccagtgtgaggctcccacctgctgccttgtgtgtgctcattagagcactcggtgaagtgaggactccaggcagcctgaatgtgagaacccctgccctgccccgcatttgcagatgagaaaacggggccccaagaacacaggaactccacaaatagaaaatcagtgggagggccaagaaccgaactcgagttgccggaccctggtcctgttctctgtcccctccctcacactgccaccctgagttcatctggaaagacagaccacacagggaagcctgcaggggcctccggggcactgggcagaattttcctaacaggctgaaggccaggcaggaatgtctttttgttgtcattgttaccaatctgcccttcaaaatcagccgggctcagtggctcatgcctgtaatccctgcactttgaaaggccgaggtgggtggatcacttgaggccaggagttcgagaccagcctggccaacatggcgaaactctgtttctacaaaaaaatacaaaaattagctgggtgtggtggcaccacctgtagtcccagctacttgggggcctgaggtgggaggatcacctaagccaggaggtggaggctgcagtgagctataattgygccactgcactccagctcaagygacagagtgagaccctgtctcaaggaagaaaaaaaaaaaaagcccctgagtccccaaagcaaagcagcgtcctgtcggcgcagggtctgggtgtctggggctgcgggccggactcacggcgggcctcttctctagggctgctcagtgtggtggatctctctgcccaggctgtcatctaygaggtggccactgtgacctacatggtaaggctcctgcaggggtgccttccccacatcccccacctgatggctggaggtgtcataggaggggggcaggctgtcacctgaagctatctctgtctcccgaaggaccctccccgggcctctcgtgcccaccaggtccagaccctgctcagcttacgccaggactcacacacaggtgcccacaacctgacgaccaagggtgatatttcactcacagatgttggaattttaaaaattaattagtatcattttaaaattgggagatttcacatcacaatcttatttttggattttctttaaaaatgcacattccaggctgggcgcagtggctcacgtgygtaatcccagtactttgggaggctgrgggcggatcacaaagccaggagttcaagaccaacctgggcaatatggtgaaaccccatctctactaaaaatataaaaagttagccaggtatggtggcacaagcctgtagtcccagccacttgggaggctgaggcagaagaatcacttgaacccgggaggcggaggttgcagtgagccgagatcgtgccactgcactcaagcctaggcaacagagtaagactctgtctcaaaaaaaaaaaaaaaaaaaaagcacattccatcgagcagcaggccacattcctgcacactgcagtcggccaragctgggtgacagcgtccccagcagggccatgggctctcctccaccacagcccccacctcccctctactccccacagagacacagccatcgtcttgcttatgcagcccatgtcactcgggtacgcatctgcatgttatccctgaccccagctttaagcaaaggagtcacaaaaatctacattacaaaatcaatttagagattcttatttttacaagtggtttctgctgaaatatcttttttcttacagggagcttttctgggactaagaccacagtcacctctttaaaatctgtttactcatttgatttggacaacacagtgatttcggttgcaaggcccgcctgcctgtgctgcttctgatggcgcaggtggtggtgggactggctgtgtcactgggggtacccccacccttctcccagccccagccctccctgcctcattgtcagcagcaagaatgtgacgtgcctcttacactgcatgcctgagatctgctctgccttcccgctcacgtccctcttggcccaggctggctcaggacttcaggggttggagggtgggcccactgacagtgctttcttatctttgatcccagattcccttggggctcagcatcggggtctgtgtccgagtggggatggctctgggggctgcrgatactgtgcaggccaagcgctcggccgtctcgggcgtgctcagcataggtaggtggagtcctctcctggtgggccttcaaacgttggcctgagtcaccagcctgggccacaggaaggctggcatgctggaggcagggctggcctcgggagctgccaggtttatcttccaagcctgctggacctgccatctgacccaggtcagcctctgctgataagctgacagctgcccctccctgagcagcaggcgtccctcccaccactttctccccatccccactcactccttccctgctgctgtgattctgggactcttctggagacagctggcttctaccacttaccttagagcaaaccctgactctttgacggcccttcctgcccagcactctccttccagctgtccagagtccttctgcaggcctggccctcccagcacccccatgagcttggcagctgccaacccactctggagaaggagccactcatgtcctctgacatcatggctgtgctttctgagactggaaggctcagaccggcttccctgtagaaagcagtggttcttaggctgtagcctgcgctggaatccccttggagggctggtcacagattgctgggcctcaccagcaggctttggttcagcaggtcggaggcagggtctgagaatctgtttctaacaagttcccacgtgatgctaatgctgctgcgccagcgtgccgcccactctgagaaccactggagtggaagcattttccacactgcccttcctacaagactgtctagcccaaatgaacgcctcagatgcgggggacatgaaggcctgtgacaaaaggcacctggttgcagagggctgggctgacttgcactgacataggggccagccctttgctgatctgagcaagggtgcttcctggcttggggtctgtcattgctgcaccttttgtctcttccagttggcatttccctggtcctgggcaccctgataagcatcctgaaaaatcagctggggcatatttttaccaatgatgagtaggtaatcagttttctgtgctgactsttggaaaatgtcaaagtggttcccagtgtgtcctcagatttatcacattcctggctcartgctgggcccaaaggaagcaggaagagcccaggcttggctctcactgagaggaagccaacttctgtctatccaccccaggcctttagtgcctgtccatagacaagaggctaattgaagggcagtccaaaattgtgggggctcttctgaagttttaggtgtgacccacagacacagaaaactctgggctagcagtgccagttacatttgtgtggggcaactacctctattccaaagctttttcttgtgggggtggggtgtggaatagaagggatataaatgggtctcaaaggatacatctgtgtcttaatgctttctcatttcttctgcagagatgtcattgccctggtgagccaggtcttgccggtttatagtgtctttcacgtgtttgaggccatctgtgtaagtaccactttgatccaaagcctgactccctgggacatgatttatgtacttgtgccctccccaggacctcgcagggctgtgaggatgaacttgttaatacacatgaagggctaactgtatagtaagtgcccaaagtatttgctgataatagttccattcttatttcaaacagtgacttccctcttcttctgcaatttacacgagctcaaaagtgaatgcagattagcaaagaactgaaaaattgcagcagtgtaaagccacaaatctttttcttccggattcctcatgagctgggaccatgacattgacctgtgccccaggctggccaggagctgaatggcaaccatatcctgttgccagcacagagggacatttctacaagggaacgagcccacccagaacacagaaggaactggactttctgctcctttgatcactaaaggacaggtgtcatttaacacagatttgaattatgtaatttttttttttttttgagacagggtctcgctttgtcacccaggctggagtgcagcagtgcgatcatggctcactgcagcctcaacctcctgagctcaagtgatcctctcacctcagcctcctgagtagctgggactacaggtgcatgccaccacatccagctaatttttaaattttcgtattttttgtagagacagggtcacactatgataggtggaatcctctcctggtgggccttccaacgttggcctgagtcactagcctgggccagaggaaggctggcatggtggaggcatggctggcctcgggagctgccaggtttatcttccaagccctggctggccttgaactcctgggctcaagtgatcctcccatatcagcctcccaaagtgctgggacaataggcatgaactactgtgcccagctatgattttttaaaaacacaagaaaacaacaaaacccaaaacactaaactcttgcttaataagcagaatttgaactcatagctctcctactttgcatctggagttacgtgaattcttcaggaacacaccccttgcatacattcccatagctctgcagaaggatatgcccttacttagcaatactggcgcattccagccctttccctacctggggaaaraacacttgcataataattaccaactcattacaaatctactgaaagaaatcatatttatggaggatatttccaaaggcctctgtgtactccatccagttcgctaactattctaggatttatttttgaatatagccgggcattcagaaagcgacaagctcgggccacatgttcttagcctcagcagaaattccctctctgggctgtgttctggcatcatatttgtggcctttatcaaggaacattaaatgaaactactttatggagcccattattgcttttgtcataggatactatttttttttttttttttttttgagacagagtctcattctgtcgcccaggctggagtgcagtggtgtgatcttggttcactgcaacctccacctcctgggttcaagtgattctcatgcctcagcctcccgaatagctgggattacaggcatgcacccccatgcctggctaatttttgtatttttagtagagacagggtttcaccatgttggccaggctagtctcaaactcctgacctcaggtgacccacccgcctcggcttcccaaaatgcgctgggattacaggtgtgagccaccgcacctggcctggatactgttaaaagacactattcatactttttctctagtgtctgggtgagaccacacctgagaaatcattcttgaaattgaaagctaggaatagctttgctttttttttttttttttgagacaggtctcactctgtcacccaggctggagtgcagtggtgccatctcagctcactgcagcctcgaccacctgggcccaagcaatcctcctacctcagcctcctgagtagctgggactacaggtgtgcactaccatgcctggctaattttctttttaaagttttgtagagatggaatcttgccatgttgtccaggctagtcttgagctcctgggcttaagcagtccttctgccttggcccccaaagtgctaggattacaggcatgagccatggcacctggcccagcatttcttaagaaattaagtatgcctccccttccagggggcagtagttctctagtcacttggctaccaagaaactccgagtcaggtttacagagaacagttaccagggcctgagggcttgtgtatgtgcagcccatcatttttcctcctggctagtcggttttttcttaatttacattttccatgagccttatttttatattttgtaaacttttagtgagttataatttacatatgataaaattcatatataagtatacaactcagtgattttaaatgaatttggagttatgtaaccatcaccaccatctagttttccatcaccccgcagaatttcctggagactgttttgtagttaatccctgctcccatctcctgccctgggcaatccactgcattgctttctgtctgtatgaacaatttcatataagtagggtcttatgatatgcagtcctgtgtctggctgcttctccttagcatactgtttttgaggttcatcaatgctgcagcatgcgtcactgcttcattccttttattaccgagtagttccattgtatggaaatactgcctttgtttatccattcatcagtggatggacatttgggttgtttctagtttttgctatcatcaataatgctgtttagaatgttcacgtggaagtctttgtgtggatttgttttcatttcttttagtagagttctgggagttgaactgttaagtcaaatgataaytttatttttagctttttaagaaactgccagccaggtgcagtagagctcatgccagcataccagtgctggtaatcccagcactttgggaggctgaggtgggaggatcatttcaaccaaggagtttgagaccagcctgggcaacatagggagaccctatctctacaaaagtttttaaaaattagctgggggagggggtcggcggggaggcggggttggcacacacctatagtcttcgctacttgggaggctgaggcaggaggattgcttgagcccaacagtccaaggctatagtcagctatgattataccactgcactccagcctgggcaacagagtgagacccccatctctaaaaataaagtaaaataaaaaattttaaaaagtcacggtgtaacccaaattcacctaaattttctattattttgtaggagttttatacttttgcatgttgcttttatgtctgtggttttaacttttgtaaaacaggatatctaaattcattattttgtatgtggatgtccagttgttccagtaccatttcttggaaaaaaaaaactaggctttctccagttgcctttgctcctttgtcaaaatcagttgactgtatttgtatgggtctatttctgggctctctcttccattccagtgatcttttttgtctattctttcaccaatagaatcattcctaggtatccttgggcaattggttccaggaccccgcaaggtaccaaaatccacagatgctcaagttcctgatataaaacggcagagaatttgcctataacctatgcccatcctcctatgagtttaaatcatctctagattacttataattcctagtacaatgtaaaagctatgtaacagttgctatgctgtttatttttttattgttgtattattgtttttcaaatatttttgatccatggctggttgcatccacggatgcagaagctgtgggtatggagggctggctatatacttaacactgctgacctgtacacttaaaaacatttaagacagcacattttatgtgtattttatcaaaattaaaagaattttttttaatcaaccctgacataaagtattgatacaaggctgggtgcagtggctcatgcttgtaatcccyggactttgggaggctgaggcaaaggaggtcctcacttgaggtcaggagttcaagaccagcctggccaacatggcgaaacctgtctctacaaaaaatacaaaaattagccaagcatggtggcacatgtctgtaatcccaggtactccagtggctgagcatgagaattgcttgaagccgggaggtggaggttgcagtaagccaatattgcgccactgtactccagcttggatgacagagcaagactctgtctcaaaaaaataaataataaaaaaagtactgatacgagaagtaactgagctaacatgtatgaaagtgtctgaaacacagtagccatttaatagacattagggttgactataatgcaacagacaagaccttgtggacaactttaccatgctgtcttgatcactgcagctttatagtaattctcgaaattgggtagtatcactcctccaacatcgcttttctttgtaaatgttgcgttttgagtcttttccctttctacataagctttagaatcagtttgtcaatatctacaaaacaagctgctggatggcttttcctttcttgttgcagccatcccagtggggatatgctactatgtcactgtggtctcagtgtgcatttctctaatgacgagcccctttttgtgtgtttatcattcattcatatgtagccttcagtgaaatttctattttagtcttttgcccattttaaaaattaagtaggctaggtgtgatgactcaagtctataaaaccatcactttgggaggctaaagaaagaggttggcttgagcccgggaggtcaagaccagccttggtgacatggcaagataccatctctacaaaacattaaaaaaaaaaaaaaaagctgggcatagtggtgcatatctgtagtcccagctactagggaggctgaggtgggaggatagcttgtgcccagaagttcaaggctgcagtgagctatgactgcatcactgcactctgggctgggtgacagagcaaggccctgtctcaatctacaaaataaataaaacaaattttaaaaatatgaaaatataatatttggtagctggttgtatttgcttgctaagtgctttggtttgaatgtgtcctccgaagttcatatgtttatgtaacagtgttgagagatagaactttttttggttgtctttttgtttttttgagacaaagtctcatgatgtcacccaggctggtcttgaactcctggcctcaagcaaccctcctgcctcagtctcccaaagtgtgccctgtcgaggtgggacctttaagagaaggattaatgtcattatctttttcctttgagacggagtcttgctctgtctcccaggctggagtgtagtagcacgatctcagctcactgcaagctccacctcccrggttcatgccattctcctgcctcagcctcccgagtagctgggactacaggcatgcaccacctacacctggctaattttttttatttttatttttagtagagacagggtttcaccgtgttagccaggatggtctcgaactcctgacctcgtcatccgcccgcctcagcctcccagagtgctgggattacaggcgtgagccaccacgcctggccttaatgtcattatcttaagagcaggttagttatttcaagagtcggttcctgacaaaaggatgagtctggcccccttcccctctttcttgtgtgctcttttgcccttcaggcattgggatgatacagcaagaaggccctcaacagatgttgtcacttgatctgggacttcccagcctccagaaccgtgagccaaataaatttctgttcatcataaattactcagtctagggtattatgttatagcaacacaaaatggactaagacactagcactgccataacaaagtaccaaaaattggatggcttacataacagaaatttactgtcttacagttctggagaccagatatcctaaatcaaggtgtcagcagggtcatacttatacttcctttgaaggcactaaagaaggatctgttctgggcctctcttctagctctggtagcctcaggggtttcttggattgtagatggtcatcttttccctgtctcttcaagtcttccttccatgtctgtctctgtccaaattctctctattttttttttttttttttgagatggagtcttgctatgttgccaggctggagtgcagtactgcaatctggccttactgcaacctccacctcctgggttcaagcaattctcctgcctcagcctcccaagtagctgggactacaggtgcgcaccactctgcctggctaatttttttttttttttttgtattttagtagaaatggggtttcaccatgttggccaggatggtcttgatctcctgatctcatgatctgcccacctcggcctcccaaagtgctgggattacaggtgtgagccaccgcaccaggcccaaattccctcttttaataaggacaccagtcatattggattagggcctaccttaatgactccatcttaacttgatcatcagcaaaggccttatttccaaataaggtaacattcacaggtactgagagttagaatttcaacatcttttggccagacacagtggctcacacctgtaatcgcagcacttagggaggctgaggtggcagatcacctgaggtcaggagttcaagaccagcctggccaaaatggtgaaacccccatctctactaataatacaaaaattagctgggcgtgatggcacacacctgtaatcccagctactcaggaggctgaggcaggaaaattgcttgaacctgggaggtggaagttgtagtgagccaaggttgtgccattacacaccagcctagatgacaagagcgaaactccaccttaaaaaaaaaaaaaggaatttcagtatcttttgtgggagacacaattcaacccataacatttattattagttataagagttctttatatattctggatacaagtcctttatcaagctttatgatttgcaaacccaggctgtggcttatctttttaaattaaattttattttttaaattcacagataaatatatttatggtatacattttttcttttttttttttttgctgttttttttttttgttctttgttttttttttaagacaggtctcactctgttgcccaggctggagtgcagttggcaccatcatagctcactacagaactcctgggctcagaccattctcccacctcagcctcccaaagtgctgggattacaggcatgagccaatgcacccagccactatgtttgtatatatgtaaacatttcactatgtttagacattgtgaaatggctaaatcaagctaattaacatatgcattaccttacataattctaattttcttgtggtgagaacatttaaaatatactattaccaattttcaagtatacaatagttaacatgttgtacagtaggtctcttaaactttttcttcctgtctaactgaatcattttcttaatggtatcttttgagttgcaaaagttttcactttcaatgtagtccaatttcttaatttcttttatggctcatgcttttgctattttatatataagaactctgcctaacccaaggtcacaaagattttctcctctgttttctttaaaaagttttaatgttaagtctttcttacatttaggtttatgatccttttttttttttttttgagatggagtcttgctcttttacccrggctggagtgcagtggcacaatctgggctcactgcaacctctgcctcccgggttcaagcgattcttctgcctcagcctcctgagtagctgggactacaggtgtgtgccacctcgtccrgctaatttttgtatttttagtagagatggggtttcaccatgttggccaggctggtttcgaattcctgacctcgtgatccacccgccttggcctcccaaagtgctgggattacaggtgtgagccacagcgcctggcctctgatccatttttagttcatttttgtgtataatatgaggtaagggtttaaattcattttttacatatggatatccaattgtcctggcaccatttgttagcacatgaaagactcatttctccagtactaagtttcttggaaacacagttgaaaatcaactgaccataaatgtagtggtttacttctgaattcacaattccgttccattgatttatgtctatgctatgccattgtgacagtcttaattactgtagctttacagggagttttgtaatcaggtactattaatataccaactgttcttttctgtccccaaactcttttgactcttttaggtcctttgcatttttgtatgtattttagaatcagcttatcaattcctactaaaaagcatgctgagattttgaaaagaattgtgttgaatctatagatcaatttggacagaactgtcatcttaacaatattgaggcctccaatccatgggcacagaatgtctctagttatttagaacttctttatctcggcaatgttttatagtcttcaatggacaaatcttatacttcttttgttaaatttatcccaaagaattttattctttggatgctactgtgaatgaaattgttttcttaatttcattttagattgttcatgtttataaaaaatcaattgattttttgattattgatcctttatcctgtgaccttgttctaatagtttgtgtgtctgagctccttaagattttctacatgtaggatcatgtcatctgtgaatagacacttttacttctgctttccaatttggggagaacctccaatacaatgttgttttgttttgttctgagacggagtctcgctctgtcgcycaggctagagagcaatggcgcgatcttggctcactgcaagctccgcctcccaagttcaagcgagtctcctgcctcagcctcccaagtagctgggactacaggcacgcaactccgtgcctggctratttttatttatttattattattattattattattatwatttttagtagagacggggtttcaccattggccagggtggtctccaactcctgacctaaggtgatccaccctcctcagcctcccaaagtgctgggtttacaggtgtaagccmctgtgcccagctctccagtacaatgttgaatccaagtgtaaagagcatacatctgagccttgattccactattaaggggaaagtattcgaagtattcagtctttctgtgttaaattttatctgtagcatttccctaaatgccctttttcaagttgagaaagatcccttctaattcctagtttgttgagatatctcataattgggtgctagattttgcggaatgctttttctgcttctattgagataatcatgtggttttgttctttattaatatggtgttttgcattaattgttctttattaatatgctgttttgtattaattgattttcaggtgttataccttgcatttctgggataaacctctttttttttgagacagagtctcactccgtcgccaggctggagtgcagtggcgtaatctgggcttactgcaatctctgcctcccgggttcaagcaattcccctgcctcagcctcccaagtagctgggattacaggcacgcaccaccacacctggctaatttttgtactttgagtagagatggkatttcaccatgttggccaggatggtcttgatctcctgacctcgtgatccacctgcctcggcctcccaaagtgctgggatcagaagcatgagccactgcgcctggcccggataaacctctcttgatcatggtgtatatattttctgtatattactaaatttggtttgctaatattttgttaaaaattctgagtctgtgttcatgaggaacatttgtaatttttattttttgttatcttgatctggcttttgtgtaagggtaacattggctttacagaatgagtttggaagtattctctcctccagtactttctaaaagagtttgtgaagaactgrcattatttcttgtttaaatattgaatacaattcatcggtaaggtcatgtgggctttggcttttgtcagaagagtttaaattataaattcaatctatttacttggtataggtctattcagatttcctatttcttgttaagttagtttcagtaatttgtgcctttctaggaatttactcacttcaccttaattgtttaattcctttgcatgaagttgctcttcatatttcctttaattttcttctttatggtcagcagtgatgctctcattttcatttctgattttggtaatctatgtctaactctctttgttttttggttttattttaccaagatcagatccttggtaagcrtgggtcaattttatggatcttttctttttctttttttttttttgacatggagtctcgctctgttgcccaggctggagtgcagtggcacgatcttggctcatttcaacctctgccttccgagttcaagcgattctcctgcgtcagcctcctgagtagctgggactacaggtgcccaccaccacatctggctaatttttatatctgtggtagagacggggtttcaccatgttggccaggctggtctcgaattcctgaccttatgatctgcccacctaggcctcccaaagtgctgggattacaggcgtgagccactgcgccagccaattttatggatcttaagaactaacttttgtttttattaattttctctggttgtttatttatcttaataggtacatattagatgtatatatttatggggtacatgagatattttgataaggcatgcaatgcctaataatcaggataaatggggttttcatcacctcaagcattaatcatttctttgtgctacaatcaatccaattatacttttattttaaaatgtataataaattattgttgcctataattacgctgttgtgctgtcaaatgctagatcttattcattctatctaactacatttttgtacccattaaccatccccattccctctcccactatccatcccagcctctagtaaccatcattctattcactatctccatgagttcaattgttttaatttatgtctcctacaaacragtgagaatgtacaaagtctggctttctgtgcctggcttatttcacctaacataatttcctccaggtccatgcatgttgttgcaagtgacaggatcctattcctttttatggctgactagtactccattgtatatacgtgccacattttcttcatccattcatctgttcatggatacttaggttgcttgcaaatctcggctattgtgaatagtgcaataaatatgggagtgcaggtatctcttcgctatactaatttcctttcttttgagtatatacctagcaggattgctggatcacgtggtagttcttagttttgtgaggaacttccatactgttctccacagtggctgtactaatttacattcccaccaacagtgtacaagggctccctttttttttttttagacggagtttcrctcttgttgcccaggctggagtacaatagcgcaatctcggctcactgcaacctccgcctcccaggttcaagcaattctcctgcctcagccttcccgagtagctaggattataggcatgcaccactacgcccagctaattttgtattttttttagtagagaaggggtttctccatgttggtcaggctggtttagaactcccgacctcaggtgatccgcccacctcgaccccccaaggtgctgggattacaggccgtgagccaccgtgcccggccaaggggggttcccttttcttcatgtcctccctagcatccattagtgcctgccttttgaatagaagccattttaactggggtgagatgatatctcattgtagttttgatgtgcatttctctaacgatcagtgatgttgggcaycttttcatatatgtttgccatttgtatgtcttcttttgagaaatgcctattcagatcttatacattttaggattattttttctatttctgtccatttttaaatcggattagatttttttctatagagttgtttgagctccttatatattctggttattaatctctcatcagattgatagtttgcaaatatcttctcccattctgtgggtggtttcttcactttgttgattgtttcctttgctgtacagaagctttttaacttgatgtgatctcatttatccatttttgccttggctgcttgtgctttgggggtattattcaagaaatctttgcccagatcaatttcctggagagttttcccaaagttcttcttctagtagtttcatggtttgaggtcttcagttcaagtctttagtccattttgaattgatttttgtatacggtgagagataggggtctagcttcattcttctacgtatgaatatccagttttcctggcattatttattgaagagactgtcctttcccccatgtatgttcttggcacctttgtcaaaaatgagttcactgtagatgcatggatttacttctgggttctctattccgttccattagtctgtgtgtctatttttatgccagtactatgctgttttggttactacagctctgtagtataatttgaagttaggtaatgtcattcctccagttttgttctttttgctcaggatggctttagctattctgagtcttttgtggttccatataaatttcagtattattttttctatttctgtgaggaacatcattggtatcttaatagggattacattgaatctgtagaatgctttgggtagtatgaacgttttaacaatattaattcttccaatccatgaacatagaatatccattttttgtgtgtcctcttcaatttgttgcatcaatgttttatagttttcattgtagggatcattcatttctttttctttttttttttttttgagacaaggtctcactctgtcacttaggctggagtgcagtggcatgatcatggcttactgcagccttgacctcctgagctcaggtgatcctctcacttcagcctcctgagtagctgggaccatgggtgcatgtcaccacacccagataatttttgtattttttgtggagacagggtttcgccatgttgcccaggctggtcttgaactcctggtctcaagagacccactcaccttggactcccaaagtgctaggattacaggcataagccagcgtgcctggccatctttcatttctttgattaagtttattcctaagtattttacttgtagctattgtaaatgggaatactctcttgatttttcagattgtttgctgttggcatacagaaatgctactgatttttgtatgttgatttgttggatttatcagttcaaatagttgtttggtgggggtctttaggtttttccaaatataagatcctatcatctgggccagacatggtggctcacaactgtaatcccagcattttgggaggctgaggcaggaggactgcttgaggccaggagtttgagaccagcctgggcaacacagtgagaccctatctctccaaaaagatttttaagttagccaggaatggtggtacatctctactaaaataaaaaagtaaccaggtatggtggtgcatgcctgtagtcctaactacttgagaggctgaggtgggaggactgcttgagctcaagaggtcaaggctgcagtaagctgtgaatgcaccattgcactccagtctggatgacacagcgagaccctctctcttaaaaaaaaaaaaaaagatatcaccagcggggcacagtgactcacgcctgtaatcccagcattttgggaggccgaggtgaacagatcatttgaagtcaggagttcaagactagcctggccaacatggtgaaaccttgtttctactaaaaaaaatacaaaaattagccaggctttgtagtgcaggcagtgcagtgtaatcccagctacttgggaggatgaggcagagaagtccctgaaccctccagcctgggcaacagagcgagactccatctccaaaaacaaaacaaacaaacaaaaaagatgatatcacctgcgaacaaggataatttgatttccttttcaatctggatgcactttctttctcttgtctgctctagctaggacttccagtactattttgaataacagtggtgaaagtgggtatccttgtcctgttctagatcttagagggaaggcttccaattctcccgtttggtatgagctgtgggtctgttgtataaggcttttattgtgttaatgttcctcctatacccagtttttttgagtttttttttttaatcatgaagggatgttgaatttcatcaaatgcttttcagcatcaattgaaatcatatggtttttgtccttaattctcttgatatgatgtatcatactgattggtttgcatatgatgaaccatccttatatcccagagataaatcccacttggtcatgataaatttggtatgctagtatttttgttgagaatttttgtatcaatgtttatcagggatactggtctgtagttttcttttttttgatgtgtctttggttttggtatcaagataatactggcctcattatagaatgagtttggaaatattcctccctcctttatttttttgaacagatttaataggactggtattggttctttaagtgtttagtaaaattaagcagtgaagtcattgggtcctgggcttttgcttgctaggagacttatgattacacttgatcttagccaaaaggctgagaagtgataggagacttattattacagcttcagtctcattatttgttattagtctgttcaggtttcagatttgttcatggttgcattttggtaggttgtatgtgtctaggaatttatccagttctaggttttccaatttattggtatacagttgctcatagtaacgtttaacaatcctttgcatttcttggtattagttatgtctcctttttcacttctgattttatctggatcttttctcttttttttcttcatctggctaaagctttgtctattttgtttattttttcaaaaaaacaacttttcatttcattgatcttttgtatttttttggtctgtttccatttaacttatttctgctctgacctttattctttcttttcttctactaattttgggtttggtttgctcttgcttttctatgtttctggctggcctcacaggacacagactactaattttgggtttggttttctcttgcttttctagttctttaagatgcatcattaggttatttattagatgtttttccactttttgacgtaggtgtttattcctataaactctcttagtactgctttcattgtatgacatacgttttgatatgttgtttccattatcatttgtttcaagaaattttaaaaatttccttaatttcttcattgacccactggtcattcaggagcatattaatttccatgtgtttgtatagtttccaaaattcctcttgttattgatttccagttttatttcactgtggtcagagaaaatacctgataggatttcaattttttctgaattttttaagacttgttttgtgactcaaatatggtctgtcyttgagaatgatccatatgttgaggagaagaatgtgtattctgcagcagctgaatgaaatcttttgtaaatatctattaggtctatttagtctctagggcagattaagtccaatgtttctatgttgaccttctgtctggatgatctgtccagtgttgcaagtgggatgttgaaatctctagctattattgtattgaaatatatttctctctttagttctaataacatctgctttatatatctgggttctccagtgttgggtacatatatatttataaatgtgatattctcttgctgaactgaccccctttatcgttatacaatgaccttgtctctttttacagttttggtcttgaaatctattttrtctaagtataaactactcctgatcacttttggtttcaatttgcatgcaatatctttttccatctctttattttcagtctatgtgtgtctttgtaggtgaagtgtgcatcttgtaggcaacagatcattgggttttgttttttatccattgagccactctatgtcttttgactagagagtttttagttcatttacattcgatgttattattgataagttaggactcagtcctgccattttattatttattttatggtttggtggtcttctcttcctttcttcttgtcttcctttttgtgaaggtgattttctctggtagtatactttttattttttgtgtatcttttgtaggtttttgatttgaggctaccatgaggcttgcaatattatttatttatttgagacagggtctcgctcttgtagcccaggctggagtgcaatggtgtgatcttggctcactgcaacctctgcctcctgggttcaagcgattctcctgcctcagcctcctgagtagctgggactacaggtgctcacctccatgcccggctaatttttgtattattagtaaagacagggtttcaccatgttggccaggctggtcttgaactcctgacctcaggtgaggtcttttgcttttgcctcccaaagtgctgggattacagacatcagccactgtgcctggccaataatccattatttttaaactagtgacaactaaatactgattgcaaaaacaaacaagcagagaaaattaagaaaaactttaacttcatcccctgctgtttcttaactttgttgtttctatttatatcttacactatgtcttgaaaagtagtttatttatttatttatttatttagtatttattgatcatttttgggtgtttctcagagagggggatgtggcagggtcataggataatagtggagagaaggccagcagataaacaccagaacaaaggtctctggttttcctaggcagaggtccctgcggccttcggccctgtttgtgtccctgggtacttgagattagggagtggtgatgactcttaatgagcatgctgccttcaagcatctgtttaacaaagcacatcttgcaccgcccttaatccatttaaccctcccagacggggcggccaggcagaggcgctcctcacctcccagatggggcgactgrgcagaggcactcctcacttcccagayggggcggccaggcagaggggctcctcacatcccagatgatgggcggccaggcagagacgctcctcacttcctagacgtggtggcagccaggcagaggcgcgcctcacttcccagatggggtggccaggcacaggggctcctcacatcccagacgatgggcagccaagcagagacgctgctcacttcctagatggggtggcgggcgggcagaggctgtaatcttagcactttgggaggccaaggcaggcagctgggagatggaggttgtagcaagccgagatcacgccactgcactccagcctgggcaacattgagcattgagtgagcgagactccgtctgcaatcccagcacctcaggaggccgaggcgggcacttcacccgaggctaggagctggaggccagcccggtcaacacggcgaaaccccatctccaccaaaaatacaaaaaccagtcaggagtggcagcgcgtgcctggaatcccaggcactcggcaggccggggcaggagaatcaccggagcctgaggcagggaggttgcagtgaaccgagatcatggcagtacagtccaggctccgcaagagagggagaccgtagaaagagggagatggagagcgagagcaagagcgggagggagagggagagggagagggcgaaaagtagtttttttaatagatgcatgttttagtcttctgctgtttatttcaatgatttcacactaatcttttatctatttattttttaacttttaattttttttttttttttgtagaaagagtcttgctatattgcccaagctggtctctaactcctggcctcaagcagtcctcctgccttggcctcccaaagtgctgggattacaggtgtgagccaccatgcctggcccacactaatcttttacattcttatccttttacttcatttaggtatagtttgttcttctttactagcttcttagggtagaatagtaggtcattgattcgagacctttctccctttccaatataggcatttgaagctgtacatttccctctaagcattgccttagttgcatctaataaattttgatgttcatcaaaattttcaagtttgaaatatttttaaatttctcatgtgatttattctttgacttatggtttagaagtgcatttaatttccaaatatttggggtttkatttctggcaggcatctctaatttaattctgttgtggccagagaacatactttgtatgaattcagtctttcaaaatttgccaggcatgatggaatgtgcctgtagtcccaggtactcaggagactgagatgagagcactacttgagcctaggagttcaagaccagccagggtaacatagcaagactccatctcttaaaaaagattgttttaagtttagtttattgagatttgttttgtggcctaccgcaggtctatcctggagaatgctgcatgtgagacccaaggaatgtcattgtgttggttaagtaacttgcttagactgattctgtgactcctgtctcctctacaatgtacagctgctgatgtctcttgctcagttttttcccccttgttcttatttttttaagtctagctttctagtttaaaatgttctttctaggattaaaaatgtctgcagagcttagtgttcagccaattactggtcagagactgtgttcaacacctctgatagctagcaaagcttccattctctgctgacagatccatgtgtgggctagagacgtattcagagttccagctgttttcaagtgagtcctggcttttactttcttctgggtactacgggtctcttcagcccatgtggacaggctccattgtccaggaacatgtgggaggcttggtctctgctacaccatatgcacagcctctggtcagcttgggatatgtagagaacttaccagtacctccccattcccttggctgttttacctcatcaaactccctcttaaatccctgcctagtccactggtcgatggcttctcccaaacaggcccacaacctcaggctagcaaagccactggcccttcctgccactgaaattgccactttaattcacaatactctaaatcagagtttctcaacctcagcactactggcactttagaccagataactctttgtttggtggggggagggcggtcccctgggcattgtaggatgtttagcagcatccttggtctctacccactagatgctgtaacactttcccccaccacacccccacagttgtcacaacaaaaacatcccagaatttgtcatccccatttgagaaacactggtccagggtacatcaatcataatttgggagaagtctttagccaaaaaagatcatgccatgacatataataaccagaaatatacataccatattacaaagttcaagaggcatacatctcctaaccccagtgcattacctctttgttcaaatgtgtacaaaccacaaaatactccccacctctcacaggaacaaaataaaaataaccaaatatctattggccaataatcctgaccaaggatgagctgtgcctgtagttcagaagatctggaatcacgttgggaaaatgagactaatgaaataaacagtactttttccagagcaattctcatctttgagatgagacataatcacagacagcagtgggtgagggctgcttgtctcatatggaataagctaacaaccactgtttgccatgcatggtaggcaaaataatggcccccaagtttcaacgtccacatcataatccccagaacctgtgagtgtttcaaggcaaatgggactttgcaggtgtgattaagaatctggagatagggggattatcctgggtcatccaagtgggcccaatgtaaatacaagggtccttagaagagggaggcaggagagtcagaggagatgtgaggctggaagcagaggttagagtgatgtggggccaccagccaatgaatacagaaggaattctagaagctagaaaaagcagagacacattctcaactagggccttcagaaggaacaagctcttgattttggcacagtgagacccaattcaaacttctaacctccagaactgtaaaataaaataataaatttgtgtgtgtgtgtgtgtgtgtgtgtgtgtgtgtgtgtgaccaagtctcgctctgtcgcccaggctagagtgcagtggtgcatcctaggttcaagcaattctcgtgccttagcctcccaagtagctgggattacagtgccaccttgcctggctaatttttgtatttttagagatggggtttcaccattttagccaggctggtcttgaactcctgacctcaagtgatctgccctcctcagcctcctaaagtgctgggattacaggcatgagccaccatgcccggcccaaatttatgttattttaagccacaatatttgcagtaatttgctacagtagccacaggaaaccaacacaccacctctgtatcatgtgaagttagtccagtctcccagaccaactggttgctggccaccaattctacctttactttctagggaggccatatggtgtggcagtgaagcctgagtactgtagggttgtgttcaaaacacagttacttctgtgtaacayggacaagtgatctgacctgtcttggacagccaccctcagggaagaaagggagataagggcacccatccagtgctgtgagaactcagtgaagcaatgccatgcgaatggcttagcacagtgcctgctgcatgacacctgctcttagtctcatcatcctgactcttgcccatttctgtctcccctcctagtgtgtctatggcrgagttctgagaggaactgggaagcaggcctttggtgccgctgtgaatgccatcacatattacatcatcggcctaccactgggcatccttctgacctttgtggtcagaatgagaatcatgggtatgtggtgtgaggaagtcgggagaggcctgggtggtcgtcggacattgttcccatcatcacttgtctcctccaggcctctggctgggcatgctggcstgtgtcttcctggcaactgctgcctttgttgcttatactgcccggctggactggaagcttgctgcagaggaggtaagtgggtcagctgaccctggccacaagacaccctgcacctgaccccagcaggtggagkgactactcagccagaaatgcccagagcacatcagaacttggcagcagtgtggtataagctgcaggtgttttttttgtttgtttgtttgtttgtgagatggagtctcactctgtcgcccaggctggagtgcagtggcgcgatctcagctcactgcaagctccactttctgggtacatgccattctcctgcctcagcctccccagtacctgggactacaggcacccgccaccacgcccagctaattttttgtatttttagtagagacggggtttcaccgtgttagccaggatggtctcgatctcctgacctcgtgatccgcccaccttggcctcccaaagtgctgggattacaggcgtgctgcaggtgttttgtgggggattacagaggggccacctgagcctcaacagtggctcctgtcactgtaattggccagtataagaagcatgctctgcagttataaacagaaacaaaaccaaaaaccttccttagacagccccatctgtggaaaaccaaacaaacgcaaagaactcaaattagtctgaacccagatgaacccccgagcgtgtgccttgactttggaaggggtcataaaatcaccctgcccaccatcctctttgatgtcctttttaaacagggcagggcagcctttgcatctcaggcacagcaaaggcacaactcaagtctgcaagcagagcacagaagcagtgttctctcaaagaccctgaatcctatcagggtgtggttttgcctttgtgcacagaaaaagtcatcctgacacttaagatgctggataaacagatatttaaaatgatacatttatttatttgagatggagtatcgctctgttgcccaggatggaatgcagtggtacaatctcggctcaatgcaacctctgcctcctggggtcaagaggttctcctgcctcagcctcctgagtagctgggactacagacatgcgccaccatgcccagctaattttttagtatttttggtagagacagggtttcactatattgcccagactggccttgaattcctgagctccagcaatccacccgcctcggcctcccaaagtgctgggattacaggtgtgagccaccatgcccagccttaaaatgatactttctaaaagccccatgactatgaatacatgcatatatgctgcttcagcttgcaatgttttaaaaacagagaatgcgaggctagcagtgaaggggtgaactgttgagctggcaggttgacccaattgagttctttctcctttaggctaagaaacattcaggccggcagcagcagcagagagcagagagcactgcaaccagacctgggcctgagaaagcagtcctatcttcaggtaatactgtcaccgctgcttctactttggtacacatataaatgtcagtggcatgttgctcttgtctgccctctgtgcctcatgcaaytggaaattgtacaagcccaagctatttttcttcccattattatgaaaatgatgtcctragcaccaggaagacaacaacatctattgtctagcaggcatgcaagtaccaggccccacaccaagtctttggccttgagaggcaactagatgtatgcccattttcagatgaggaagtgaggctgaaagaacttaggtatttcctccctcatcccacaacttgtaaaggccagacataagatctgcgcatcaacccgtcagattcaagagcccatgatctcccccactgaactctgctcaagacggaaggccaacttttaacttgtggggagcctggcttgtcagccagcctggcttgactcattggctttgggggggcacctgctatctacctctctccaccccatcaggcagacaaacatctctctggtttgtgcccagtgtccatgtcatgaagtgatggccccagctctgccccagggctggtcctgagtgccaggcgtgtgtgcacatggcccaaagctcacacagatgatgtctccatgacctcatccatcctgggctaatccttgatcagggcagtagtgagccagctaaaactctgggagcgtaagttgtcatgagagaatacggtaagacatgattaattgtgtttcccacgtgcttttgaagccacagatcatcacagggccaagcgttgacaagaacactcctcatgagatcctagtagtaagcattatctgcacgtgaaattcacagtttaagatgctttcctgcatatctcctcctctgatcttgcttgtaaagtagataaagcagttatttttctactgtataggcatcgtcccttgtgaggtgtaacaaacacagccaggtggttaacctaggtttcccgattccaaggccaaagctctccctctgacccctgacctgctgagtttgctcctgtttgcttccgcagtggctacaggcagttcccctggcattaccttgacaacgtattcaaggtctgagtgccacgtggacttcttcaggactccagaggaggcccaygccctttcagctcctaccagcagactatcagtgaaacagctggtcatccgccgtggggctgctctgggggcggcgtcagccacactgatggtggggctcacggtcaggatcctagccaccaggcactagcaaagaagcttggaaatagaaagccaggagtggctgtccccagtatgcaaacacaccacggtctgccctgcaaaaacaccaatggggtctagtgcaggtggacactttgaaccactcctcaaaaaaagaactttggctgattccttgtggtgacactcagaggggtctgaacagacttgacaattctgttctggtcaagctggagttttcttctgtgacttggactgctctacagaagacatcagccaactgcacgagtcagagtccagggattgtcactattattaataatgtaaatggcttcaaatgggacactgcagataaaatcacaaaaaccactgttatattaaagattacacatttcctgggcacagcctgctgctcaagtctgtcataaagcctctgtgaagctctgagaaggggaccagtgggccctgtccagacaacccgtgtgctcctggcagatgcaggtgctgtgagaccctgaccagggcagtggctgtccatacacccttcttccccttttctacagttctttcattccatcagcattttcacttatcacagactttgagaaatacttgttcttactgaactttttcttctagtagtgacatgatataaataagggcacaaaacaagtaggaacagagcacagcaaagtcatcatggaagcaattccagactctatgccactgtttgcccaagtgtggtccatggttaacaggtattaaggtaaacggctccgcggtcaaggaagtctgggagctgcacacactagcacttcagaggttccaaatgacctgggtcctttagtttgctgatgtgctttacaagccagtggtatacaggactggtggcaggaccatttttttgtgtaaaatcttgcgggattagtgttctacaaatatgcttacagaaacacttgttctagatcagcaactgggggtaggaggatgccactggaaaaacctatttactatagctaccaaccaccacccccaacacacacagcagaacataaagtttgagaaaatcttctcagctaagaattttaaaatgagaaaaaaaaagttgacaaataccatctatgataaagacataaaatgatttatagttggggagaatttatgatcaaaggattgtctccaatagggtatatctgaggttccataccaggagcgtcattaaaattgatgccaattttatgaaatatgttcattttgaagcagatgtgtattagtagacaagccaataatttaaacatactcaatgaaaattccatagtgcaattttatctaaggtattttatgattactctcttagagccacagttttaagcagctttttcctaaactaggctcgttattaattttcaacacttcatactatgatgaagacatcacatactttagacagccttaatagaacaaattattcaacaaagttgattatacgttctataaagtaaatcacattctctcattgagtgagctgagtctttctgagtgtggggacagagtccctgcagtcaggagctccaaggcatagaactgcctgccctgctctgtccagcaggtaatgctgcattccacaggcctcttcttcagccttgcccactcagcagagtacctcaggttgtgaccatgaacgactgatgagagtaacttctgacttgctcaggggatcctcttgccatcaattcccttcagtatgaccaaccgcagtggcttactcgcttcttgtccagaccatccaccatctgtctgccccatgatgctctcaaaccccaaagtcctaatatcccaggcctctttgtctgtgagaggaaatggttccctcactttaagttctgtaggctaatcagaaagggatctctctatagtttcaaaaagtgaaattttacttgcactacagaaataagaaacttacagatttgtccttgaagacctactaacctgcaactttagggtcctgaaagaggattagtatgtttataagtacttttattacagtattttttatttgtttcggagacagggtcttgctctgttgcccaagctgaagtgcagtggtgcaatcacagcctgctgcagccttggcctcgcaggctcaatcaatcctcctgcttcagcctcctaagcagctgggaacacaggctcatgccaccacatctagctaatttttattttttgatagagatgaggtctcactgtgttgtccaggctggtctcaaattcctggactcaagcaatcctcccacctcggcctcccaaagtgctgggattacaggcatgagccaccacgcccggccacagtattttttaaatgccagttaggttttataagatgtagaattctataactccaacacaagaatgacaggtgatgcttgcatgactttggcaactaacttccaggaagccctaggatttacaagatgctttgagtgacattagtcacaagagattgttgcaactaaacagaacacaggatgataaagaatgaatgaggaagaatgaagaccactggtgagatggcacttctgaccaggggcctactcctggaggtcaagtccttgagtcccattggaggaggagtaacccctcccttccccacatagagttttagtgcctgaaacctcacagggaaccaagaagatctaatctcacctctctggactacagaggactgccggtagccctgggaagtaccaagctcttgaaagcttcacacagtgatggtggcagcagaggcaggaagtgagcagtgccattaactggagtgaaggattcagtgaggttctgagactcccttacaaccccgcagtttgtatttagtctaatacattctcctcccctagctcaaagttccaagatttagataagcacaatttaagacaggttccctgaataccctattagggaatgttgggacgtagttgaaatggcaacttttattaatgatgaatggcaatgacttttaagtttgatcacagagtgtttgcatattttcttactatttttggtatgatttaaaaattattggttcattaaccatttaaaagaggaataattcagtagaggcactaggaggttgaacaggatcattcttcagtaatattcagcctggagagaggaaaaaaggattcagtttactcagctgctttaaaaacctacccacaaccagccttgcaacacaagctcagcactgggactcagacacctcctgtctgaagagactctacatgcattgtacaaaaaaggactacatatccctaggaagcctaggaagcacggtttaggccaaaggattatgcccttcctcaaaaaacaacaataacaataagagtaagacaacgtgataatgaaggctatattctgtccactgtcaactagctaatgtcagagtagagacagaagatgagagtactaacttattatcctagcattttcagtaggaagctgaagtctctacatggaattcaaaaactggtatacaattttgtttctaaaattcaaaagtagtactgaatttaatccttcctattgaagactgaggaagggctgctgcaatctcaaggttcaaatgtcatatttagttgtcaaaggcctaatgaaatttatcaacattaacctcttatgtttctcgaccttttaaaacccacatctcccacaatgccttctgtagcttataagctttattggaactttactttgtgtacaatacttctgctctaaatcccttctaattctagtaaggtaattaataaaataaaatccaagagtgtaacaaaataaggaaactattaagtacataaaagccatttcagaaaaatgtaattacaataaatagactattcaggtaaatatacagtacagattcaaagtcatttattttaaataaaaggtaatttgataaaaagaggattaaaagctcagaaaggagcagaaaagcagcaaagtggaaaagaaaaccaaatctctacctagttccagattgaatccaaagaaatattaacaactattagtaatgagaattgagcggaagggttgaaagtggcctggggaatcactgacacctactccctcaccctgtagatgagcaagctgaggcccaagaaagagctcagaaaaggccttgcccaagttcattgagccaggaatcaaaccacatttttttgtttctgctaaaggttttatatattgctgcttcttttatatattgctgcttctctagaccctcacagagaaacatgcctgccaaaccctttgggaactcgaacctgcctggcacactgcactgcacctgagggaggcttcttgggggtttggtaagattggagaatgcagactcagcctgggcctccgtattttccatgaggctaaaatattctatcctaccaagatgcattatcaaactgaggaaccgaggtcttgggaaaagaacaaaagagacagatattgaccagagacccaagtaagcttccgaccacacctccagcctcaggaaggcaaagaaagtagcccctaaattgtatactacaccttgatttcacgacatttgctgccatgaattccaaagtcaaacctttttttaaaaatgaaaacaaatcaaaactacttagtgatttaaaaaacatattcttaaattatgacataaagagttcagtgcctagatggtgacaagtctgaattagtcagctggcacctcccccaggagagctgagtagaaggggaagagaaatgaggctcacactcagctgcccttttccaagaaatgatgtatgcttcacctggacgcagctaagccattgcctctgcacacttctcttagattcctagcaagtcacttcacccttttaaaattgtggataagtggagttttaacaccctgatactctgggcccaggtccaaaatgtctagagataagtaagttaaacattcttttttctttctttttttttggagacggagtctcgctctgtcacccagggtggagtgcagtggcacaatcttggctcactgcaacctctgcctcccgggttaaagcaattctcctgcctcagcctccctagtagctgggactacagtcacgtaccaccacacccagctaacgtttgtatttttagtagagatggggtttcaccatgttggccaggctgttctcgaactccggaactcaggcaatccacctgccttggcctcccaaagtgctaggattacaggcgtgagccactgcgcccggcccattcttttttcaataacccttaagcctccaactgtagcaaaaaaaaacaaaaataaaaacaaaaacaaaaacaaaaaaaaaacaaaccaaaaaacccttgaaaacataccccaacttggcccaccttacatatagaaagaaaacaaaaagttcctacctcactcttaacagacagggctgggttttgaaatctggtgttcatctctgcttactggaccaacgcagtctgtgaactaccagaaaaatcaacagggcctttctcctcagcacagcttggtatttctgagaaaacccaaatgatttcaaatgcaactggtatctccaattccactaaggctgggatactgtaagatgagccaaacccctttcaaatttttgttgttgttgttgttgagatggagtctcgctctattgcccaggctggagtgcagtggcatgatcttggctcactgcaacctccacctcccgggttcaagtgattctcctccctcagcctcccgagtagctgggactacaggtgcgtgccaccatgcctggctaatttttgtatttttagtagagacagggtttcaccatattggtcaggctggtcttgaactcctgacctcgtgattcccctgcctcagcctcccgaagtgctaggattacaggtgtgagccactgcgccagccccctttcaaattttaaacaaaacataaacacaactattaccattgccttttccaagcccattcttcactgatatggtcaatattttcaatgttatatcctcagttgaacggctgagggcaccacagacacaattgccttcctcattccatcttaactttaattacggatttcctctttcatctcaaaatacgcaaactgctttgagaaggcagctatcatgagggcctctttgcaagcccatccctataatgactaatcaccaaagataaactttatcaggtagtgaactttggaggaaaaaaactcaagcctaataaaatatccctcaccaaagctgttgtaccagagttctcgccttcacctctgtggtaagctgatttcatgcacattcaagaacaaagctgtaagtgacaaggaaagtccaataccaaaaggatcaaagggct

SEQ ID NO: 96717 - DNA, 181765 bp, Homo sapiens
acagttttattaccataggatcatttatctagatctttggtatattaatctagacttcaaaaattgaaggaagtaattagtaaaatcctagggaatgaagacaggttgattaatgagcacaaataaacagtttggagaaataagaccatattttgaccatatcaaaataatgtttgatatgtcagtagggtgactatagtgactatagtttacaataatctattgtatatttcaaaatagctgcaagagaataattcgaatgtttctagcataaagaaaagacaaatatttaagggggatatatttaaatatttaaggtggtggatatccctgatttgatttttacaaactgtatgaatattaaatcatcacatgtaccctgaaaatatatacatctattaaatattaatttaaaaaatttaaaaataaataaatacttctgaggaatgagaaagatgaatatctgtttgtgaagagtcattcatgagatgtttgagggaacctgactcagtacaagataacattttaaaaatggtttgtataacaagatacagcattcactagtgggtgaggtgccttaaagaactgggttaaattttaatagcacatgtacattttagagattcaaggaaaatggtatgattgaattacatattgataatttactcatgtgaaaactccagaagaccacatgctaaagaaaaggcaaaaccagcattgtaagggaaaaatgtgatcttcatttaaatgaaaatgaggttaataactcaatcatgttatattgcttttaaaatatgtgtgacacaaataggaattaagcatatatgaaacacaagtatgctatggagagacacataattcaaatatttaatgacaatcatttggttacttaaattagttatttgagaatttggcagagattcagagaatagcaacaaaaatgatcaaatatattttaaaaagacctagtaagaaatggccaaagaaatattatttaatccacaagaaaataggctaaagacaaactgtaatgtctcgcctcctgatttaggaggtatattttgtcccagacaaaataggagagttttttaaattattattattcttgacagaatctaaggaattgctttaattgctgctgcagcttttgtgaggtcaaggtttaagtgatatgtattggtgactaaaatgaaatgactgataggttgtacctgactaatttgtgaaagatcaaataacatggaaatgacaacacatcctgggagtagggtggtggggtggtggagaaagctcaaaatatttaactacagtattagaacaatcttgtttgctgattcacataggtatcctacatacactagtttgctatcttaccaatgaagaactagtaccattcaagtggaaaatataaaaagtatctttagaaatcttgaatttaggcctggcacggtggttcgcacctgtaatctcagcactttgggaggccaagaagggtgtattgcttgagctcaggagttcaagaccagcctgggcaacgtagggagatcccatctctacaaaaaaattttaaaaattagccaggtgtggtggtatgcacctatagtacctgctactcaggagcctgaggtgggaggatcaattgagcctggagggttgaagctgcagtgagccgtgatcgtgctactgcactccaccctgggcgacagagtgagaacctgtcttaaaaaaaaaaaaatcttgtatttaatctctcaggggaaatgagtgttgtgcggtattcttactattggaaggcacatcaacactaaaagaaatgtagcttaattaaatcatgaattttacagatgttataaacagaatcactagaatgtaaccccaatagaggagaccaattagattttatttcccttttcaattctggtccattggacatgactgccagaggctctttattgagaaggatactgaagcagtgcttgcactcatttggaaataattaatgattgatttacagtgccttctatggaagcctccagtgaccttcaccttgctatatccaatcctcattttacgtgacctattagtagcagttgtcttggttcatcactccctcctccttcactttcttcgcttggctactgattcctttcacatatctagccactgttctcagtctcatttgcagattctgctcaccttgcctccctcttagagttgaagtattccaaaactcagtctttgtaacacctttctatctaaacttgctccttaaagcagcatggtccaatagaaaaataatgtgagccacaaatgcaagccacatatgtaatttgaaactttgtagtaacttcatttaaaaaaaaaagaaactggtgaaattaatatatattttattaaacccaataggtcccaaatataatcattttaataatataaaaatagtgcaatattttgttattttattttaatattaagtcttccaaatccaaagtgttacacttacagcacatctcaattcagactagctaatagctgttgtattgaatagcatggccctagattatctcatccaattccttaacttaaaataccatctacatcctgaatactgactactctcacatttctatttctagcttggacctgtctcctgaatccagactaactgatgtcttagggtgacatcagttcttggatgcctaatgtgtatgtctaaattaccatgtccaaaactgaacacttggtccccagattttctcttctccattttggttactggcaacttcatcacttcagttgctcaagccaaaaatgttggagtcaaccttgacttttctttttgtctcaaacctcatatccaatatacaactcctatgatactattggttctatgttcaaaagatatccagaatctgattccatatcttttcctccactacagtactatggcccaaattcccattatctgggattactgaaataacatccaaactgatccccctttctcctcatagcagccaaatgtccgtgaacaacataagccaaatcatgtcattcatctgctcaaaattctccaatggctcctaatcttacccagagtaaaagctgaagtccttacaatgacctttagaactctacaggatctgaagccgggcatggtggatcacctgtaaccccagcactttgggaggctgaggcgggcggattgcttgagctcaggagtttcagaccagcctgggcaacatggtgaaaccctgcctctacaaaaaatacaaaaataagctggctatggcagagtgcgcctgtggccccagctactcaggaggctgacgtgggaggattgcttgagcccgggaggttgcagtgagccaagattgggccactgcattcagcctgggtgacacagtgaggctccgtttaaaaaagaaagaaagaaagaaagaaaagaactctacaggatctggccccctgttacttttctgacttcatctcctactatttcccttgtttattccactctagccaccctcacctcctactcttccttgagaaggtccatcatggtctcgcttgagggcctttctttggatttgctgtaccctcaactatctccgtggctctctacccccacccaccacctgcttgttttttgggacagtgtcacctgttgtctaggtccttactctagagtgcagtggcacaatctgggctcactgctttggcctcccggcctcaagtgatcctcccgcctcaggctctggagtagctaggactacaggctcccgccaccacacccagtattttatttttatttatttatttatttattttgtagagacagggtttcgtcatgttgcccaggctggtttcgaactcctgagcttaagcgatccaccccgctcagcctcccaaagtgctgggattacaggcgtgcaccaccccgcccagcctcctcatctctttcaagtctttgctgaaatatcttctgaaagaatcacctgagtaagtgaatgacatgacatgaattaatgattggtatgacaagttatgacagaataggtgccataaggaagagtcagaacactagtgcccaatgcttgctcttctaatagaagttaacacaaatctaactttcaacattgattgagcacccattatgtaaactagacatgtatatgattggctgctatcagtgaaggaaacattgaaataatcttgttgctttggaaggtattcttgaacattctcagcacctacaaacagctgacttatttagtcaccgagaaagcagtatcctttaacaaacaggaatagctttggataccctggggcttccccctcctaggcaatcagcatctacactcataatccctcaatccaggcagtatttaaatcactgcactattagaacacttagttctagtccttactcttaatttgatgggtgactaagtaaatcacttattgcctcaattctttcatccctatgataaaatgtctaattttacctggttcctaattcaggttgagataacaggacaatatgcacttggctgttagaagttggcagaatgtatgcattacggagcttaagaaaaaaatcttttttaaagctaagatttctaaatgagggctatttaaaactcatcttcagtttgtggtagacttaaggtctttattatctccttttttgttttttaacctcaatttttcacttaacaccacttctacgcttgaactcattttagcctattttttgttcacaactgctagtttttcagtccaacctagctcaaagcaacggagaaacatgataaatctgagtaatcaaccagagacattaaaatgtgtagttcactccaggaatggatgtgagcattggagggcagggagacgaacacaaaggactgagggagcacatgtcggggaaacaaggaaagatagtaatgttaaatttataaacactgctcaattcaatccaaaaagcgtttattgagtgcagagctctgtgctggtcattttagtaaagccaagatgagcaagacttatgatgagtctctgtcatcaaggagctgggagtatgagctgaactaagacgcacacaaattattaaaatatggtgcagggtacttaaaggaagtccaaggagaaataaagctgacattattcaggacgttttaatatgtcagggcagtcacatatattaacaacccttccaaaaattccaggtaggctcagggaggataggtaacttgtcattaacgctagaaagttagtgtagtctggcattgtccctaaccgaggttctaaagctcaggctcctttcagaacactactgttaaagggaagccccaaagagtcgggggaggggactaagttttgactggatgtgtctcggttgccgtggagggaacaagaggtcagaaaagccatttggaggcagcgtgtgcgatgggactataaggatgaaccggagattgagtgggaaccagtggagggaagagggagggacttttcaggctaaggaagtaataagagcaattagctgctctcataattcttgagtcaagcagttaatgtaggtagaaaacctggcgtccgcccccccaccaccccccaccggaacttttccgttggagcttgtaggtgttcgccaatttcaccattaggtgtgttagttttgtaacctgaaggaaaaaaaaaaactcatgttttaatagcagtggattcctcggacggagggtgggggtcaggccaggagcctctggcacactccgtctctcctacccctcagctcggccgccacctgtgagccgttgatgtgcgggaagggcgctctctacggcgggatcctcgctggtaggaggcaggtcccaggcctggcaagggttgaccccggagggctgggccggggcggcaccccaggagcacctgcccacgaggcggctgcgcggacagacgttccagcccctcccgcctcgccgtgtgtttacgtggagacgaagatggcggcggcggcggcggtgacggcgcttcccgtgcggctgaggacgatccgccagtgagcgcggagactgcttccacttcgggcgggggagcsccggaccgaatcggctctctaggccgtggagcttgccgtcccacctccgtccaaatcgacctttcctttctatccccaaccacccctcaacccctgttttcccctgccttccttgcagaggccatggaggacgaggagagacagaagaagctggaggccggcaaagccaaggtaggagagcccgaggcaaccgggcctgcggtgggaggcggtggctagcacggggtgggagggggcctgggaagcggagttcgccgcagccccagtgcactgcccgagagggaggtgctgcagggtcttagggtctgcatctctcctcgccctmctcctttcccctttttccagttgggggacaaagccttgtgctagctgataatacttccgcgaggattgaatattgtggctcctttctcgtgaatgtccaaataaaactccccttttactgtattgctgtaaactagtgtttagttgcttctaaacctccgatctttcattttttwaaggagttttctgggtggtgcaggcattgtgctttccagggtggggatttagggcttttctttattgggttggggatttgtgcgctgatcatcagcttgtcttccttaggtagcacgctggcactcttgggtgtgtgtgattggcctgtgacagctgtctcagcagtggcttgtgtgtgccacaagtgccagctgtgaacttggctttaggggcgtttttagaagcgtgtctttgtatgtttgtacttgaaggtctttgtcatggcatgcgcttttgtgtcctrtggaatgttaatgcagtctgtgaatggaacttctgaggaccgaaaggttccatatgccaacacctatagaattcctgctttaaataatttagttgttatatatctctctggcgaatcctggttgtgtgtgtgtgtgtgtgtgtgtgtgtgtgaacggttatggaaaagcctgtaaagcaaacaatacaatacacaattatacacaggcatcgttcattgggcttcatgagaaatttaacatatacagaatataagctgcgtagcatatttcttttaaaaattacatatttgagcatatattttgtctgggctcaaaagcccccttcctcccttcaatgaagtcttcttttatggattatattatttttagagataattgttagcagtcatacttggacaaaaattgtattacaggtaactgtttttcctctcttcctttctcttctcctcacataaacaaaggaaaccaggttagtgatttattatcaatgaagggccataccgcagagatgcagtgatagaagctcaacacaagtttgttaaatgaatatatatataaaaactagcttcatatttctaaaatatagttgactttcctrtaagctccctctatttaagatcaaggtttaaatgcttgtatatagccaggtaaatttttactttcgaatctataaatggtgggaaaggggaatcagggtatctttagaagtccaaagcctacacttgtgcaatctgaggggctgagcaagctctatgcatctacggaagtagtggaggtgaagtgtgtgcccctccaaaagcattgaagatctgattagatgtcttacttgtctgttacctcacaatttttattgcctgcccccagaaatgtctttcctgaatatatgtgaagcagtcctacaaaacatggtttactttggacatacacatttcataatagaggatttatttaaattgcttgcagttgtagttgatgtggcaaaatacaattctagtttctttgtgtgtttctttatctttcagaattctatgtatggggtaaaaacctgtttaaggtgaatttttgttgtaaaagattatcttcttttagaatttagccctttttccagtaagatataaatctatgagacttgtaaggcaaggtgtgtttgctgcaacattagctatacaatataaaaatgctgacattgggagcctggggcgagaggattgcttgacaccaggagttcaagaccaacctgggcaacatagtgagactctacaaaaaattaaataaaaaaaaaaaatagcagggcatggtggtgtgcgcctgtatgtagtcctagctactcaggagtctgaggtgggaggatcacttgagcccaggagttcgaggctgcagtgagctatcatcatgctactgcactccagcctgggcaacagaatgagatcctgtttcagaaaacaaacaaacaaaaaaaaacccctggaaataacttttaaagacaacacgaagggaatcattttctaagttatataaatatgatggaatattttaaagccattaagattatgaagactgataggaatatgaaaaatagtgtgaaaagggcattatcaaaaatagtatgtacattatttcatttgtataaacgtgtgctttcagattagaactgaaaaactctggattataatkttattcagcaaacgtatattgaatccctattttatacctagaggtggtgacagtgtctgctctcaagttgctcactgtttagtgggagagacagactctgggtgataagtacaaagagggatgagctgcagtaggatttgggggatattcttccacgttttgttaaagtgttttaaatactactatgtcattttatagaattactaagaaagctttactattgatattaatgcaccataatataatgcctttcaaatagttattcatacatatttgcttaatgaatgaacagaatgattaatgagtcattaataagtgttactttcctagcacggttgtaatttaataacattaatctagaattctcttaatgtgaaatccatattgctggcatcagaaacaactttaaatgatcattttccaaagtttatctgagacttcattctgcaaatgtctcatttgttcactggacttaagtattgtatttgataatctagttttgcaaaccacaacttacaaatctttttgggggtaatttattgataaacagttccattgraaaattccctttctgtatctaaaccttataaatgatcactttttaaacagtttgtcatgtatgcagtataatatatagtatactgtataaaatgttttatactaccccaaatctgtaataatgggttaataaattatgatatgtaaaataattctacaaagactttttgagtgtggaaaatgcccacaaataatgccaggttaaaaagaaaaaagttaccaggaaaaggtatatgtacatatttaaatatgaagacacctgaaaaaaagcaccaagatgtaaatcgtggctatctctgggtggtggcttataggcaattttaattttctttatacttttagtattttccaaattcttgatacaatgtatctcttttatgaccagaaaagaatattcaaatgccattttttttttttttgagacagcctgtctcccaggctagagtgcagtggcaggatcttggctcactgcagcctccamctcccaggttcaagcgattctcctgcctcagcctcccaagtagctgggattacaggcatttaccaccacgcctggctaatttttgtatttttagtagagatggggtttcaccatgttggccaggctggtctcgaactcctgccgttaagtgatctgcctgcctcgacctcccaaagtgctgggattacaggcatgagccactgcactcagcctcaaatgccattttttaaaaaacataaaggcttatcaaatacattatattaaacacatgttatagtgtatgaccattatccagaacaggaaaatgaggcacagaataaccaggtttcctattttagcgtaggcctggaattgtaattgctatttcagtgcagagtgtataatatagttgggattatattgttagacattttatagatttcctttctgtttttgttgtgcttattctttccttgctgttagttcgtattgctatgggcatgctcttactcctcatctgcctcttttcctaatttgctgttttagatttgctacgactaaggaacccagaactgaggttgacagaatactatgtaaaaagaaaaaacaacaacaacaaagaccttaggcggggtgtgatggctcactcctgtaatcccaacactgggaggctgaggtgggaggatcgcttgagcccagaggttctagatcagcctgggcaatgtagtgagaccccatctctaaaaagaaaaaagtataaaaaacaaaacaggtggggcgcagtggctcacacctgtaatccaagcactttaggaggttgaggtgggtggatcatctgaggtcaggagtttgagaccagcctggccaacatggcaaaaccccgtctctactaaaaaatacaaaaaaattagccaggcgtggtggcaggtactaatcccagctactggggaggtggaggcaggagaatcacttgaacccaggaggtggaggttgcagtgaaccgaggttgtgccactgtactccagcctgggtgacagagcaagactctgtctcaaaaaacaaaacaaaacaaaaacagaggccagtgtagcctgcccagtgggctttagggcagtttagtttttctgctgcttgttggttgttttggtttactgttgggtcctcagctatttcctcagtattgatgttgcaagaagcatgaccctgggagatgtgagacattactgcattatgtattaagtaaatattttcagagctgggctagctccctctgcagtgttttgacgaggatggcactacataggttgtccttgtgttgaaccaaactattttaactccattttaaatgacttcatttttttccaagtataattattcatggcacgtaaaggaagtattgtaatttaagtgaacagaattaaatagaggacagttgtatatttaatataaaattattactcatgtaaatttgcattaggtatactttttaaagttattcagtattttatataatgggcattatttgctgaataattataaaaaactactgtctattatattcagtaatttgtaattacatgacttttgtttaacaaacattttcagtgtgaagagtagttccaattgtgtacaaaaaaaaggatggtgctycatgcaagctgtatattgattattgatagcaggacttttcagttactgtttccactgtgatagacaaagctggttatggtgtaaaactgttctttgcatatttcagatactttgttccacagctaagaaagtgttttcccttcctgttttaagcattctagtttttcatacttagatgtggcagagcttacttagcattccgagtagatgcagcagtttgatagcttcatcaacatttattgcagcaatagtgcagtgcctgtgacttaaaactaattcataaccttcaggctttttttttttttgagacgagatctcgctgtgttgtccaggctggagtggcagcctgccttgacctcctgagctcaagtgatcctcctgcctcaacctcctgagcacctgggactacagatgtgcaccaccacacctggctaattgttaaaatttttttgtagagatgggatttcaccatgttgcccaggctggtcttgaactcctgggctcaagcaatcctcctgccttaacctcccaaagtgccgagattataggggtgacccactgcacccagcttaggctttgtcggaatgaagcaaaacatggtgtttagagagagaatgtggaggaaggaacgtgatgccctgtcagtgaaactgaaagttgaatgatagctcatggaaagaggaagtgaaaaaggtaggatacatccaagtgattgaaatatgacaagaatggaacaaaaattttttcaaacaaaaacatctcttattttataaataaaaaggttcatagtaaaagctaaactatgtctacaaaatatctattataggctactgaatattgaaatgtaaatgaatttcttctaatatagctagaaaaggttatggtaaattgctaaacaataagggacattatttatattcatttcttagtaagattccactaaaattaagattagtcactttatgtaattgcttaacatccatttaaaaactataatttggaaaagctacggaatttttcaaaacttatttataaaagtggtttggtgtctggggtgtgtgtgtgtgtgtgcgtgtgtgtgtgtgtgtgtgtgctggagagagggagaaagagaatttataatactgctatctggtctggtagaaatggcactaggactttggagacatttatgtgttcatttgttcaaccaacatttttgaatgcctacgactgcagctatgaacttttacttagcaagcatttttttttccccccgagatggagtctcactctgtcacccaggctggagtgcagtggcacgatctcggctcactgcaacctccacctcctgggttctagctattctcctgcctcagcctcccgagtagctgggactacaggcgcccaccaccacacccggctaggtttttatttttagtagagacagggtttcaccatattggccaggctggtctcaaactcctgaccttgtgatccgtccaccttggcctcccaaagtgctgggattacaggcgtgagcaaccgcgcccggccgcaaacatttatttaaatgatcacaaattctgtgccttattgtctgttggaataatcttatgatgtgtacctcaacaggtgttttgaaggataaatgaaataatggttgggagctttttgagttctctaggtgctagatataaagaagctataattttttttaattgaggtgaaattcataagcaaaattaaccatctttaagtgaacttaacacagtggcttaacacaatcttatgcaactactgcttctgtctacttcccaaacatctttccatctcaaaatataaccctgtgcccattaagcagatattcttcattgcttcttccctctagccactaacaatcaccaacgcactctctggatttaccagttgtagatatttaatatgaaaggaatcatataatatgtgaccctttgtgtctggcttctttcacttagtatgttttcaaggttcatccattttgctgcatatatcagtacttcattcctttttatggctgaataatattccattgtatgtatataccataatttgtccaatgataggcatttgggttgtttctgtcttttggctattgtgaatagtgctgctgtgaacatttgtatggatgtatttgagtacctgttttcatttctcttgggtatatacctagtagtagaactgagcaaggtcatatggtagttatatttcaactttttgaggaactgccaaactgtttccatagtgactgtaccattttaccttcccatcagcaatgtataggacattccaattttcccataacctcattaacagttgtgttttctgttttttttgtttgtttgttttgtttttttgtttttttaatactcatccttgtgggtattaagtggtttctaattgtggttttggtttgtattttcctaatgaataatgatattgagtatcatcttttaatgcactttttggccacttgtagatttcttttttttttttttttttttttgagatggagttttgctcttgtctcccaggcttgagtgcaatggcgcaacctcagctcactgcaacctccacctcctgggttcaagtgattctcctgcctcagcctccctagtagatgggattacaggcatccaccaccatgcccgattaatttttttgtatttttagcagagatggggtttcaccrtgttggccaggctggtcttgaactcctgacctcaggtgatctgcccgcctcagcctccccagtagctgtgattacaggcatccaccaccatgcccgattaatttttttgtatttttagcagaaatgggatttcaccatgttggccaggctggtcttgaactcctgacctcaggtgatctgcccacctcggcctcccaaagtgctgggattacaggcctgagccactgcgcctagcccatttgtagatcttctttagagaaatgtctattaatatcccttgcccattttttaattgggttgttaccaacttcttttatctaatattaattatatatgtatataaaatatatatatatcctttccgtatgtgtggagagagagagaacgtgtgcactcaagcaccagagaggaatgggtagaaatacgtatccccagtgggattatcttccatatatatatatttttaggctttttgggctttgccaaaatttaaattgttgcttcctttgartgataggttcttggtgagttgataacagcatgatgctgaagcttgatttctttgttggccagtgagtcattccattccatgagcagctgttttacaagtgcatgcagttggttaaaggggcacctgttggatttttggcttgatcattgccagtccatttacactgtgagaaaaaagtaacttagtgttcaaaaatgaaaagacctgtcattttaaacatgggggatctgtagctacttcactagtatgagatgtctttgttgtcatattgacaccccttttattttttgtcttagtcatcaccaaactgtaacttacaacacttagtgcccttctaggtacattgcataaagctttggttgatttttgcatgggtttaacagtattcaaaagtgttcaatattcagagtattcaaaaatttaacattatttcaggagtagttttgcttaggttctttgtttaaatttatagattcttttgtaatatgtaaaattcctttttcctccttgttcactaacaatgtagtgtttgttttcagttaccatcagagttaagattcttattgtggtttactgttctctgagatttttgtgtggtgtgaaagtttctctgtaaaagtctaagagtttttcccccttttaagaaataatttcttaaagcccccaagattattgttttgatgattcagaactataatcaactttactatacaaagtcctaatctgtaaagattgatttcataggttctctgatttacagatctctgaaaaactaatagggtataaaatctaggctctctctcctattagtactgaacacactataaaattccttgttgtttactaggattgctcattgtgggctctgtggttaggctgtatttattcctccagggtctcacttttttttttttttttttttgagacagagtcttgctctgtcacccaggctggagtgcagtggcactatctcggctcagtgcaagctctgcctcccgggttcacgccattctcctgcctcakcctccccagcagctgggaccacaggtgcacgctgccaagcccggctaatttttttgtatttttagtagagacggggtttcactgtgttagccagtatggtctcaatctcctgacctcrtgatccgcctgcctcggcctcccaaagtgctgggattacaggcgtgagccacaacgtccaggctagggtctcacttttattcaagttagtattgccttattagttgtttccccagagaagatagtgacagggatcaattataactaaaatagtagttctccatatgtatcatgaatcaaattttgtgtgtggagaccttgtggggattgcagtgggcatggggcagagatctcagttaattcttacgccrtttatatcctctactccatttcttgagagccaaataaattagtagatcttcttctaaatggcaagatattagaaaatatgttaaaactgcattaggaaatatctactaggagtttatatatgaaataatgagttttggctgaaagttacagaaactcttttctattcatatacaacttaaaaatactggaaattcttttggtgtgaaattttttatatttgccaaaataatatttaattttaatttgtataaattcmtttcacaatgaaaattcatatctgagcatttctaatgactcaacaagagaactctcacttttccactttaaacaaccattagtaatttttataataaagtttgagaaaaagaaaagataatttgaggttttttttttagttgagaagaatgcgtaattttttaataaattcaaagggtgaaataaggtaggcaattttaatargcctcagaattttaattgtatggcaggagagtctgtctactttttctctaggatttgtacttaaatttttttaatgttctragctttctcttctttctttctctatctcactctctttctctctattttcttttatttctcttttttttcttttctttcattttttgagacaggatctcactctgttgccccagctggagtgtggtggcatgatcacggctcattgcaacctcgacctcctgaattcaattgatcctctcacttcaggctcccgagtagctggggctgcgggggctcaccaccatgcctggctaatttttaaattttttgtagagacagggttttgccatgttgcccaggctggtcttgaactcctgggctcaagcggttctcccaccttggcctcccagtgtgctgggattataggtgtgagccaccacgcccagccaattttctcttttctgtctcatgtatcatcatattttctaggctcagtagtttagttcatacctattaatatattcagaaagcatcttgattgaaagatcctttgaattattctgtgattattttcctttattctatatactcataaccacatcctactttttaaattaaaaatttgtctcamacgcttgcagtgagccaagatcatgccactgcactccagcctgggcaacagagtgagactccgtctcaaaaaataaaaataaaaaataaaaataaaaaaatttgtctcccacttaacctttttctttctattctaatattgcagtccaataaaatcaggcccacatcccctcatctgtctagttcccttgcctctattcatcttctctggttcatcctatatattgtcactgggttcatcttaaaacacccttttcattttgttaatcctctactccattcttttcagtctttcagatcaaatcctagataacttagtatttactcgagcctctactttatgcaagtcagtgggaattcagagatagtcacaagcttgcctctgatactttcacattcgagtagaaagtcaatcacgatacaataagttaagtattcagagtgawctacagggagctatttatttactcattcagtaaatatgattgaacacttactacttgctaggcactttgctaagatgataggatatgagagacatggactctgccaagcataagcattatttagttagtaggcagacacataaagagataattataaatacacaatgggtaatataattctgggtccatgaaaaacacagaagagggatatctgattctatcttggcagttagggaaggctttctggatggataaacactgaatgaagccttaaaggatggggaggaactgcccaggtgagaagggagtggaaggtgagtagaagcttccagaagaatgagacaaaatggaaaaagcacagagatgtggaatcgtttgacttgttttggggaaggtattgtattacctaccttgtttggtattattggagtataaagctattagcaagatgtggcaagaaatgagactataggctagggctccatcttgaaaatccttgaatctatgttaaggagattggattatatcctgtagattgtggggatctattaatgaggggtatttttgtgttttatatattttttagaggcagagtctcactctttcacccaggctgsagtgcagtggcgtgatcatagrtcattgcagccttgaactcccaggctcaagcagtcctcctgcctcagcctcctgactgaggactacaggcatgagccaccccacctggcttattgatgagtgtttaagctggggaataatatggttagctagatttgcattttagatagatgtatttgacagctgtgtggaggataggttgaggaggataaaaccatttacgaggctgttgaaagtacaaatgacagacagtgaggcaggaacagaggggatacatcagtaaatatttagaaggtaaaatcagcagaacttggtgactggctggatctgaaaggtaaaggatagtgagcatggagaggaggtttctgttactactaagaaaaatgtggtcaaggtttcagttgttgacctaggcaagattgtgaaatcagttttgtacattttttaattagaagttctttattatacatctaaatggaatttttcaaagattttgaattgataattgtagtggttatgaggttggactggaccagaccgtctaggctcaaatcctgactgccatttactagttttttggcatcaggaatttacttaacctctctgttgctctgttcctcctctggaaaatgagaacaataatagtacctgccttggtacttgcggttgttgtgaggattcactaataagtctaaaacatttagaacactgtcagtctataagaagtgttcaagaagtgtcagtcattatcatcattatcgtcattctggagcatagaggattaagctatatagcagaaaatgggattggagaactagggatcagataatgaggagccacatatgacatttaaaatggtgtggatgttatcctaacagtagtggaaaactgttaaagaatgtctgtcattgataacttctaatgttatttctttaccccccgccccccaccacacacaaaaatctcatcttaagataggtatgctgccaccaggtggcagttatatgttatgttgtacaaatgaagtagtaaaaaccattatgtgtttcttttttaacataaaatatttacttgattaaaatagccaagtgtaagcagtctaattctagtaggactcttttgttccaaaacaaaacaaaactcgttaagygaaggagagaaaagagagggttattgtaaagatgtggagatttcagaggaaggtcagtgtatagctgggtctcatggaaactgaaaagccattggaaactggtgccattctctccatcattttttctctcactttcacaatatgttatactcctctgtttgtagatcagcttccttgcctgcatgtcagtttgcacatgaccaaaattatgggatgagtctccaaatctgttctatccaatggaattgtttcctactaaatatacccttatttatttattttgagacagggtctcactctgtcacttaggctggagtgcagtggcatgatcattactcactgcagcctcaacctcctgggttcaagtaatcctcccatctcagcctcccaagtaactgggactacaggtacacaccaccatgcccaattattttttayagaggcagggtctcactatgttgcgtaggttggtcctggactcaagtgatcctcccacctcagcctcctgaagtgctggggttatgggcgcaagccactgtgcccagccccagtaaatatactttaaaaagaaagaaggggaaaataaaaattatataaatcatagaaacacatctactcatagagtaatcatctagcctagaggctcccaaattttgctgcatataggaaacacctgggaagctttacaaattttttgatgcctacattacatcccataccaaaatcagaaaatctgcagtgtcaggcctcactattttttgtaaagatccccagtgagcaatagactttaggacccactaacatagccactttacttgattctacaatactgtgccagctactttacttggtgtggaactaaaggaatagggatgattcaatgccagaaggaaaattgactatgttggatacaaagagaagtgttttatagtctgtaacatgtttartaggttgattatataaactgtactttatagatgattttaggagtatctgtagattgatatgattattgtatgacrcactcattttagaatcctttatataagatgaatctcctcgtgttatctttctggacagcttcttacctccttgttccctaattctaagagaagaatctaagtgactgacctttctttccttatcaaacttagggtgggaggagaggcaggggtgtcatggatgggagaagctatgagcactgaccagttccctcagaaggaagttctacttactttaaaaatacttaaatatttcttctaaaaaagaatatatgtaaaatgtatgtataaaataaagactgatgataaaaagaacacctctatacctatcaccctgctgaagaagcatacacatacgaatatatttgaaacctttcctcatctaatcccaacccctcaccacttgaggtacctatagttctaaatttgtttatttccttgcttttctataccacatatatgtacacatacaacatactagttttcctgtgcttgaacttaatggtatcatatgaagtcatcagtgatttgccttttgttcagtatcatgtagagcatgttcacgtctgcatagtattccattataggaatttacgtcagtatccattgtgaggtcagtaagtatttgggttgtttccagtttttgctattgtaaatactgccactaagtgacatgatcttggcttgctgcaacctctgcctcccgggttcaagtgattctcctgcctcagcctcccaagtggctgggattgcaggcacctgccaccatgcccggctaatttttgtatttttggtagaaacagggtctcgccgtgttggccaggctggtctcgaactcctgacctcagatgatcgcccaccttggcctcccaaagtgctgggattacaggtgtgagccactgcacccaaccgccttgaatttttttctaagtttactttttattttcaaaaaattattatgtatttcctcattttccataagaacattttagtagtgtttcctcatcaataaacacaaaaaagagtctttactatgctattttcactattaactttaattcagtaataagcaaatctttgttaaaagtagagatggaggctgggcgcggtggctcacgtctgtggtcccggcactttgggaggctgaggcgggcggatcacgaggtcaggagatcgagaccatcctggctagcacggtgaaaccccatctctactaaaaatgcaaaaagttagccgggtgtggtggcaggcgcctgtggtcccagctgctcaggaggctgaggcaggagaatggcgtggacccggggggcagaacttgcaatgggccgagattgcaccactgcactccagcctgggcaacagagtgagactctgtctcaaaaaaaaaaaaaaaaaaaaagtagagatgggatttctagcctcctaaatgccagacaaacaatctaacataaaatttaccttgaataagatatatgatattgattctgagctgctttgtattttttctaactttggcatctgtatcttggtgctttctattagactgatagagttttagaacctaaggagtatgcattgtacttcagcgcttttttcttcattactttctgtgtatatagacagcatatttttttttgtagaacattaacccagattgctaatagcttcatgttatggcattcttccacacagtccagattgatttaaggaaaagcagaaatggaagtcaaagtgtgttataaattgagactgaaaaacgtgctctaaaaaaatagatttaatttcttacactgtgaatagccattgtattgttttgtttctgataaatcagttgttttgggcttctatttttgaactgttaaaaaattttgatgctttttgtggataaaagtagtgcctctctttatacaactgatggggttttgaaaagtatgtaagttgccttttttgttaaacttattttaaatgctttagtatttaaagggtatatgtttttaattaatctgcatatttaaaaactttttgtaacgcgaataactacttcctgatttacrtctcaatatattctcctttcatttgcccaattaaaaaaatatgtagtctctattattgctgtttactaatagttttagatcccaatgtgtattagaattatagctacaaaaagttgcaagtaaaatttaacaatttcctattgaaacaggatctcattattatgtttttaaatgtgtagaattaacactttaaataaacaggtgtgaaaattgtaaaggaatatatatgacaactattttctgtacattaacgtccaaacattatacttgtttttcataataaaaaacattttgaaacaaaatttgctgagtttagcataaaagcatctttgaattatttctgagtttcctaaaatatgcaacattttaatcttggcatatctaatcctatgtgctgttctataagaggtacactggacttctaaccactatatgtatttagtagaataatggaatcacaaaggaacaagaattccagacttatagtttgaaatgtatcataaacaaccctttcatattttaggttagtagctttggatagctatttaacacagatgagtacagttagctttatatatattatcctctgagtcttatctatgacaatgtatatttagattaaatatgttcctcctgtaactaaagttgcatctttgcaaatgatgaaagttcatttcagcagacacaaattctttaaaagatttgggctataaactaacacttcaaattttgtaataatcagtatacttttatcaagaatgaaattatttcatgcttaattaccctccttattttgtttccataataaaactattttcagaaaaaaaaatactgcccctgtgctatttttttctgttctgacgtacagcacatgccaagggtttagagatatgcagagattatgatcccaaggtccttcagtccttggggagtagtgactacattcaggaatggagtaagaagagggagtgaagtcaaaagcaaactgatattcatgtgtttattacatgcctggtttcatcacataaatgatctctgacagatgtccatgggagctgatgatggatacctgatgtccatcaacatgsatcactatgctgaccagatgcagcagttcttttattttttagtaaatatttcctgcaaaaatatatccatatgaaagggaataatgtataatgtaggtttataaatgagttaacctcagatggtaaactggcatgcattttatgctgttgagagagtgtctatttgttacaaatataccttgctttgggcattctcctttacataaactgtgcagtgttatttgttgtttatttttaatgggattaaacttaataatatacttagggtagataacgttaggggtaaagtgccgttcttctcactgttcattgttagcagtaactgagatgactgtaaaatgaagcagagataggataggtgacatctaaacagcactttctttagggataagatttctagtaggtatgtagttgtatatatcctttaaaaatagtgatattagcatatgggcccacgataattttattagtaaatatactttagagttgtgtgagggaggcaggcagtaaagatctttcaaagagaaaaacaattacctgttgtgttataacctgcaagtaatgattttgaatagtttgttgtttattctttttcttctatgcataagtaaaacgttacttaaatcttactctatatatgcagctttgttcttttttatccaagtttatgttgagagcatttttgctcattaagattttttttttgaaaacatcatyattattattattattattatttgagacagggtctcactctgtcacccaggctggaatgcagtggcatgatcttggctcactccattctccacctctcaggctcaagtgaccctcccacctcagcctgccaagtagctaggaccacaggcctgcaccaccacgcccrgcaaatttttgtattttttgtagagatgaggtttcactatgttgcccaggttggtctcgaattcctgggcttaagcaatatgcccacctcagcctctcaaagtgctaggattacaggcatgagccaccacactgacttgaaaacattatttttgacagctacatgttattacattgcatagttgtgcaatagtgtaaccatggacctgatattcaccttggtttttaaaataattttaattttattattactactatttttgagataggatctcactctgttgcccaggctggagtggagtgcggtgatgtgatcctagctcactgcagcctcgctcctgggctcaagcagtccttccacctcagcctttcaactagctgggaccacaggtgtgggccaccactcctggctaatttaaaaaaaaaaaaaaatttacttttttaagagatggatcttgttatgctgttctggctggcctcaaactcctggcctcaagtgatctttccactttagcttcccaaagcacatactctttttgaaacattattttccaacaaacatttgtgtctactatgtggcaggcagtgaaattgtgttaaaatatgtaacattaagatggttccttaagctgcagaatttgttttctttttagacatgacggtggtccaaaacctttatttaaaaaaaaattatattaaatgagattataggctataagtaggactggactggtcactcaatatgtaaagtcctgtggtcttttccattcctgattccctcaggcctgtttggcactgttattttccaacagtttgtatctttgtgatatttaagaatactttaaagcatccttaaaatgttgcttttgtcttctttactttcagttgccttacttcaacttcatttacaaatggtctttgggacaactgttataatctttttatttccctagttaggctactggagttttgttgtagttgtttgtattagcattcatgtttatcattcattaaggaatactaaaaacgtttaaaggcagcattgacaagtatatatagtcatcataattagaattaattggtatttcttagcttttctacagcaaaaacaaaaaacagctctatttactgctatttttgaatactggagaaactaggtaacacatttaagtaatattttgtaccattctctcgagtatatttgtttcatcgtgtttgtttttattttctctccagtcttgtcaaaaaagcacttgtctgtttggtgatatcacttgctcatgttctttaagttactgttctaggattggggtgtaatgacagatgaatgaaaagcaggatgagaatgcatggaaagcaaatggtataatggaaagttggattttgagtcagatattgttgttccattttattttgctgcttactgcttatgatcttgggcagataacccatattcatctttaaatcttggtttccacattctttcaacatttcctgacttctccccacacgaccccatttaaattaaattttttctgtgtgaggctctcctaatacctttttcttcaaagcactttttatcacttgagatgatatatttctgtgtttatctatatttaatttgtttttcccacctgtattacaattcatgagagtagggtttatacctcttttattcctcactacatgtcttactttagcacaaagttgcatgcatgatgggcagtcaataaatatctgttgaataaataaactacttactacctgacatatgccaagttattttcttcacaggtaaaactctacaaccacatctcttttggaaagacttatatgaagaaatcaggacaagggaggttcccataccacctccttaaatatatataggactgctgagtttatgaaattgtgtattaacttttatctcatttatttctcacaacttgatgaaatgagagactgttattaaataatagtagactaaagggtcctactgttaagatcatatattttgacacatgtctagcacagtgcctggcacataatgaacaatgaacactcaagaaactgaagagattccaaatagttgatttttttgaattgacattataaaaacttggctttttttttttgagacggagtctcactctgttgcccaggctggagtgcagtggtgccatctcagctcactgtgacctccgcctcccgggttcaagtgattttactgcctcagtaaaatcccgagtagctgtaatcccgagtagctgggattacaggcgcctaccagcacacccagctaatttttgtattttagtagagacggggtttcaccatgttggtcaggctggtctctatctcctgacctcaggggatccacccgcctcagcctcccgaactgcagggattacaggtgtgagtcaccacacctggccaaaacttggcatattttatacagcattttgaaaattcattgttttattcagaatgatcatttgttaagttaaaaatattgagtttggctgggcgtggtggctcacgcctgtaatcccagcactttgggaggcctaggcgggcggatcatgaggtcaggagattgagaccatcctagctaacatggtgaaaccccatctccactaaaaatacaaaaaattagccgggtgtggtgccaggcgcctgtagtcccagctactcgggaggctgagtcaggagaatggcgtgaactggggaggcagagcttgcagtgagctgagatcgcgccactgcactccagcctgggcaacagagtgagactccgtctcaaaaaaaaaaaatcttgagtttaaggaataagttattatttgtattaagtcatttattcatgttctgatcagggtaagacatttgcttgagatccgaaccagttttgaaaggcaattatatatggacataatatctttccagtaaatcttgcaactatttctgtgactacatatgttaacatttttataattggcttccaaataacaaacacagatggctgtagtctgaattttcaccatgttttagaataaatgttttctcagaaatttaaagtgcatcatttcagtataagatgattacctaattgagtagaattttttccttatctgctagcttgccatttttcagattgagagtaaatagcttaaatatctattagtataagaaattggatatatatgatcttgttccctctctcacatttttaccaaacagaactcttgctaaaaagttattgtagatattatttttctgagaatttaaattttgttttgctttttgtcttttggtggaggagggagattataattttttgtgttttaattcatttaataagtaactagaaatttgttaattttgaaaccatgagtttttaatgtagtagaattaaatatgcccgttaaactgttttggttctcaagtcttgtgaagtggtgcttgaaatcattgcttagtggtgacttttctgtaaaagataaattatctttttttactctgaatattattttaggctttgtatatatagcagagaacaaaagaaagccctaaccctcagtgaacttaccttccggttaatctgaaaaataatatgacttcatataatcagtaacataggcctaaaacaatgccatggtaatttaatgtccttaaaagtgattcgttctaagcactataatagaaaaattcctattttgattccatatctatccattatctttttaatttgggttcatttagtaatgaatattattgtttcagatttttaatcgaactgtttatgatgcaaagttttagtttttctcatttattatgtgtttgcacatctgaataaatattaaatataaattatgtataccctaattacagttggaatctcaaaccaaattttcacctttgccctgatatattttgctgtctaaatgtattttctaatgcagacaatgtggaattttaagtttctgaaattgagcataaatatcaaaaatgctattaatttcttttggttttgcattctctctgagggatcttttctttttaaacaatgcacctagaattctgattccatttacagataatatatttagcagtattccagttggtttatttttaagaatgaatttgctaccctccaaagtagtttaagtgcattccagtttcttaatgtacaagtagaggcaactggtcttgcacctgttcctcaaggagacatgaggtggaataactgtgtagttgctgaataactgggaaaaaatttaaatataatttatttttatatcctactaggctagtgattagctatttctgatttataaattagatgtctttattaagtaaatagtacatatgctttccttcatccacagcagacaaaataagyataaaatatgttgtgtgttattctgtagataacatatttgtcacacacacacacacacacacacacacacacacacacacacacacacacatatttttgagacggagtcttgctctgtcgcccaggctagagtgcagtggcatgatctcggctcactgcaagctccgcctcccggattcacaccattctcctgcctcagccccctgagtagctgggactacaggcacccgccaccatgcccggctaatttttttgtatttttagtagagatgtggtttcgccgtgttaggcaggatggtcttgaactcctgaccttgtgatccgcccgcctcagcctcccaaagtgctgggattacaggcgtgagccaccgcgcccagccatttgtcacatattttgatagtaatatgagcatcattaaaaattgctttatttttatgataaattttctggccattgttgtaactggtctaattaatagttatattaatactagtagtatatttcctttttttaaagcacaacaaagcttacaccttttcttattctttggtttctctcctctcagaatgaccaaagagctcaaattcaatttaggaataggtggctaatagttgcttcttagaaaaattagaaaatctattgcataacaaaaggaaatttcacattagcaaaaggaaaaatacctgtaatctcaagtcagagatacaccaaagttctcagttatattcttccagagtttctctatgcctacaagtacaatgttattaaaattcaagctagatacgattgttgaaggatgtgagtttgagtcctgccttctctgttaaaagaagtgtacattatttttttcataaaaatagattatgcagcagtaatatacctactactgtgtcatgaacatctttgttagcaataatggtttacataaatattttaatatggcgtcatcatagttaacctaatgttgcctaaagcatgtaatacatacttctgatgttaggtggtgatattttaggtctatcctgatccagtattaaaaacattggataaatgggtacaatgtacactatttgggtaatgcctaccctaaaaactcagacttcaccactatgtaatatatcgatgtaacaaaactggatttgtaccccctaaatctataaaaataaaaaaatagaaagagaaaaacattagatagtattgtaagaaagttattatgtttgccagttttcttttagttcatctgcttgtgatagccaagagtctgtttgatactcatatatctttaacacccttttaacacttgcccatttctctcatacccttcaacaaaatctaactaaaattttaataattttttcattgtatttatttttgtttacttttctaaaaaagaaatgacagtgatactgacttttagtttgtgccaaggatagaaagtctccttttagaataaatttactttaaaatttttattgwtatgtaatgtatatattttgggaatacatgtgataatttaatgcactcatatagtttgtaaggatcaaatcagtgtaattgggatgtccgttagctttaattagtgaaatattcaaatattttttagaaatattcaaattattttattctagctattttgaaatatttagtagttttttgtaaactatagtcaccctaccaatctatcaaacactaggttttatttcttctgttaaactgttctttgtatccattgtcagcccctcttcatcttctccaccytcctactcttcccagtctctggtaaccaccaatctactcactatttgcatctactttttcagctcccatatatgagtgagaacgtctgatatttgtctttctgtgcttagcttatttcacttaacatagtgccctccatttgtgtccatggtgctgcgaatgacaatttgttctttttttatggctgaataatattccattgtgtacataccacattttctttatccgtttatcaattgatgggcacttaagctaatttcatattttagctattgtaaatagtactacaaaaaaacatgggaatgcagctatctcctttgtatattgattttctttcttttgaatatgtcccagtaggggaattgctggatcctgtggtagttctatttttagttttttagaaatcctccatacagttttccatagtgtgtgctgatttacatttctgttaacagtatacaagggctcttctctctccacatcctccccagcatctgttattccctgtctttttgatgaaagtcagtttaactgcagtgagataatatatcgtggtggttttgatttgcaattctctgatgattagtaacattgagcattgtttcakatacttgttgaccatttgtawgtattctcttaagaaatgtctgttcagatattttgcccatgttttaatcagattatttgctcttttgctgtccagctgtttgaacttcttgtatattctggttgttgttaactccctgtcagatgaatagtttgtagctattttctcccattctgtgggttgtctcttcactttgttgattgtttcgtttgctgtacagaaactttttagctttaaaaacattttttaaattatttattttttgtagagatagatctatgtctcactatgttatccaggccagtctcaaactctcaggctcaagtgatcctcctgcctcggcctcccatggtgctgtgcttacaggtttgagccaccacactcttctgaaactttttagcctggttccatttgtctgtttttgtttttgttgcctctgcttttgagatcttagacaaaaaaaaactttccccagaccaatgtcctagagtatttctctactgttttctttttgtagtttcaggtcttagatttttaaatccattttgatgtgattttttttgtatgtggtaagagatacttatgtagtttcattcttctacatatggttatccagttttcccagcattatttattgaagagattgtccttttctcagaatatatggtctattctggagaatgttccatgtgctgaggaaaggaatgtgtattcttcagcagttggataaaatgttttgtaaatatcaatttagcctatttagtgtgtagtttaactctgatgtttattttctgtgtggatgttgtatattcttggcacctttgtagaaaatgagttgactgtaagtgtgtgaatttatatctgggttctctgtttcgttccattggtctgtgtgtctgtttttatgccaagaccatgctgatttgtttgtatggctttgtagtatattttgaagtcaggtaatgtgatgcttccagctttgttctttttgctttggctgtttgtgatcttttgtggttctatcaaaattttaagattgttttttctatttctgtgaataatggcattggtatttcaatagggattgtattgaatctgtaaattgctttggatagtatcatttttacaatattcttctaatccacaaacatggatttctttccatttttaatgtcctgttccatttctttcatcactcttttatagttttccttgtatagattttttacttctttagttaaattgatttctgggtattttatattctttgtagctatagtaaatgtgattactttcttgatttctttttcagattgtttgctgttggtatatataatttctattgatttttgtatgttgattgtgtatcctgctattttactgaatttgtttatcagttctaacagtttttggtggagtctgtaggtttttctaagtataagatcatattgtatgcaaataaggctaaattgaccttttcctttccaatttggttatcttttatttttttctcttgcttagttgctgtggccaggacttccagtatgttgcatgaaagtggacctccttgtcttgttccagacttagaggaaaggcttttaatttttccctattcagtgtgatattagctgtgggtttgccatatatggcctttattactttgaggtatgcatcttctgtatccagtttgttgagggtttctatcctaaaggcatgttgaattttaaattttttttcagcgttaattgaaatggtcatagggttttgttcttgattctttcaatgtgatgtatcatatttattgatttgcacatgtttaactatccttgtgtctttgggatgaatcccgcttgatcatggtgaatgatctttttaatgtgttgttgaattcagtttgctagtattttgttgaggatttttgcatctatgttcatcagtgatattggcctgtagttttcttttttgttgtgtccttgtctggttttggtatcaggctaatgttggtttcatagaatgagtttggaagtactcccttctcttaagttttttgaagagtttgagtataattgttattctttaaatgtttggtagaattcagaagtgaagccatcaagtcctgggcttttctttgatgggggattttttgtgtctgtgtgtgattgggtctcctgttgcctaggctggagtgcagtggtgtgttcatagatcactgcaacctctgcctcctgggctcaagccgtcttcccatgtcagcctcccaagtagctgggaccacaggcatgtgccaccatgcctggctaattttttgtattttggtagagacgaggttttgccatgttgcccaggctggtctcaaactcctgagctcaagctcaagcaatccacttgcttcggcctctgaaagtgctgagattacaggtgtgagccaccgctcccagcttgatgagagactttttattaaggctttgatttcattgttggtttgttgaggttttctatttcttcatggttcaattttggtaggttctatgtgtccaggaatttatttatctttttcttctaggtttttgaatttgttagcatatagttgttcataatagtctgtaatgatttttgtatttctgtggtctcagtttttacatcttctttttcatttctgattttatttgacctttctccttttatgaaaattagtatagctaaaggtttgttgattttgtttatgttttcagaaaagcaactttttgtttcattgacttctgtattgactgttttggcctcaatttcatttgtatctgctctgatttttgttatttmctttcttctactaattttgggtttggtttgttcttggttttctagtttcttgcagtgcgttgtttggttgtttatttgaagtctttctcatattgttttattggtataaacttccctctcagtactgcttttgctttatcacatagattttggtatgttgtatttccattttcatttctttcaagaaatttaaaattttctcttttaatttcatcattgacccatttgtycttcaggattatgttggttttttgtttgttttgttttttgagacagggcctttctctgttgcccaggctggagtgcagtggtgtgaacatggttcattgtagcctctacctcctgggctcaagcgatcctcctgcctcagcctctcaagtagctggcaccacaggcgtgggacaccatgcctagccaatgttttgaaattttgtaggtttgagaccaacctgggcaacaaagtgaaatcttgttgcccaggttggttttgaacttctgggctcaagcawtcatcccacctcagccactcaaagtgctgggattacagacatgagccaccatgcccagcaggaacatacttaattattatttgtttgtgttttctgaggtacttcttgtgactgatttttagttttattccattatggtcagaaacgatacttgatatgatttctaccttttgaatttgttgagacttgttttatgacctaatatatggtctattctggagaatgctccatatactgatgaaaacaatactcttcaggagttgggtgaaatgttctgtagatgtcagtttggcctatttggcgtagtgtatagtttaattctgatgttttctttaattttctctttggatgatctgtccaatactgggattggggtatttaagttccctatattactgtattgcagtctatctctccctttagatctattaatacttgctttttatacttggggctctggtgctgggtgcatagatatttataatagttatatccgcttgctaaattgacacctttatcattatataatgaccttctttgtctctttttatagtcttgactggtagcctattttatctgatacaagtatagctactcctgttcttttttggtgtccagttgcacggaatatccttttccaccccttcactttcagtctgtgcgcattcttaataggcgaagtgggttttttgtgggcagcttatggttgggtcttacttctgtattcattcagccactctcgccattttaattgaagaattgagtgtatttaccttgagtattattattaataagtgaggtcttactaatgctattttgttgcttgttttctggttgttttgtaattcctctcttcttcctttcttactgtctttctttgaagttaagtgatttttttttctggtagtatgtttgaatttgttgattttttatttgtagtgaatttattatagtttttggcattgtggtcaccatgagacttaaaaagacataggttcaagcagttattttaatgatatgacaacttactttagatcacaaagaaaataatggaaacaaaagaaaaaaaaaccctctatactctaactccattccctccacattttgactttactttgtctcaatttacatgtttttatattgcctatttcttgataggatgctgtagctattaatgtttttggtaggtttgtcttttggacttcatcctagagttatgagtgggcgctacaccacaattacagtattagagtattgtgggtttgtccacgtacttaattttactagtgggttgtatacctttacatgttttgttttttcacattagtgtttttttctttcagattgaagaactctctttagcttttcttgtcagacaggtmtgtgttagtgaattctctcagcttttgtttgtctgtgaaagactttgttcctcttctttgtatttgaaggatagctttgctggatacagtatccttgggtggctgtttttttccttcagcactttgaacatgttgtcccacatcctcctatatggtttcttcctcctgtatgacctgtatggtatctgttgagaagtctgttgccagacgaattgtagctcttttatacattgtttgcttcttttcttttgccacttttaggatcctctctttgtccttgaccattgagagtttgattattacatgctttggagtaatcttttttgggtcaaatctgctttgttctctaacgttcctatacctggatattttatctctttctcaagttttaaaaagtttttattatttcttgaataagatttctacccccttgcattaaagttaggcattatattatgtagtgctgaaaaacaggcggtgacatggtaccaaaaaaaagatacaaaaacaatacataaattgcaaagactctctaagtgaacacattcagtaaaaaacaagccagacagtgaagactagaactcccttttgaacactgataattcttagatttgatatttcgaggtaattttctgtgtcttctaggtgatctttgttccttttcattctttccttttctcctctgtatttttaaatagcccgtctttgagctcactgattcttttttctgtttgatccattctcctgttgagagcctctaatgattctttctgttcagcaaatctttctcagttccaaaatttctttttgatttataaaaaacttttaatctttgttaaatttttctaatacatttctgaattgtttttctgtgtaatggagatcactaatttcctttaaactgctgttttgaattcttgttcacagagttcacatatttctgtcttgttagggtcattcactgattcactggttctttgtgctttgtccatttgactaagtcaaggtttcccatttgctgttgtttcttgtggatatacatctatttctttttttttttttttttttttttttgagacggagtctcgctctgttgcccaggctggagtgcagtggcgcgatttcagctcactgcaagctctgcctcccgggttcacgccattctcctgcctcagcctcccgaatagctgggattacaggcgcctgccaccactgccgggctaatttttttgtatttttagtagagacagggtttcactgtgtcagccaggatggtctcgatctcctgacctcgtgatcctcccgcctcggcttcccaaagtgctgggattacaggtgtgagccaccgtgcccggcctacatctatttcttaaagtgaagattttgttatttattctagtcttctctgtctggcttgttttagcttttactggatatgtttgctcatagagtcttttatgttttgcctctcttttttttttttttttttttgcactatgtcactgcctctgtttcagtactacataatataatgtatatgatgtctttagccccagtttgcttcagttctagtaaacaatcagtgttatccatccttgatcggtaaggtcccaaaggcccctagtctggctaggggctcgtgcccagaggacctgtggcatgaacctcttacagtgtgatgctgctgaacagccagtctgatttggcgtctcctttggccaagttacaaagcagggtttttcagggctaggaatggtagtcttgccttcccgctttgtctctggctgttaggaatatttctcccttcagatattcccagtacttcctggttgtccctggttgagccagggacagatctcctgtcaaggagcccaagttgatggagaagctggttgtccaccttgatctcactttttccagtgtagaaactgtgagtcaggggaatattttccatgtttggtgatgggcagattaggagaatgggaatcatgaaaatcaaagtctaattcttttaacttctgctcagagttttttcacttctccatggtcttgaatactgtttcttcctcatatttgagttctgggatatcgccagtaataatctaagctctgtatatttgcttttggttttctgttaggggaagcgaaggcaacttgcttctgtgccaccattttggagctattaggttggtgcaaaagcaattgcagtttttgtaccgacctaatggaagcctctgttcttaaaataaatttaaataagaaaactacattggttaaaacatgttaagtaaatgatacataaaggtggctctaggataggacaaaaatcctgatgatgatatgtaaacgattaagggctggaaagcactgctgtttgatatttaagttatttccagttttttttcccattatgaataaggctgcagtgaccactttatatagctaaatctttttgcatgaactaaatctttttagtatatagtaatagaagacacagaaattccagaaagcaaattcatgtagtgctctgtgtgtgcatgtgtgtatgtgtgtgttttcatataatctaaaatccagagcttggccagcacactggctcacgtctgtaatcccagtattttggggaggctgaggcaggcggattgcttgagcccaggagttgaagaccagcctgggcaacgtggcaaaaatctgtctgtacaaaaaaatacaagaattaaattagccaggtgtgatgacatgttcctgtagtcccagctacttgggggctgaagtgggaggatctgtggagcccagaaagttgaggtgagctgtgatggcgctactgcactccagcctggatgacagagtaagaccctgtctcaaaaaataaaataaaatcttggtgagattatattctcactaagcagtgaatgacagtgcctgatttcccttattctgcctaattctgggcttattttcttttatttagacatgacattttcagttcttacccctcaatatttcagtaggtttattcagaaatgtttctttgcattccagtagttacattaaagactgtaataattgttctttattttttcatttttatttagtgatagtttgatctttaaaagagagactcccaaagctgcttttttcttggtggcaataaagaaaaattatctttgacaataacrgttattttcttttttcttagcttgcccagtttcgacaaagaaaagctcagtcggatgggcagagtccttccaagaagcagaaaaaaaagagaaaaacgtcaagcagtaaayatgatgtgtcagcacaccatgatttgaatattgatcaatcacagtgtaatgaaatgtacataaatagttctcagagagtagaatcaactgtgattcctgaatctacaataatgagaactctacatagtggagaaataaccagtcatgakcagggcttctctgtggaagtaagtattctcccagatttttaatcattatggttctcgatggaaagtagtcataacaacagtcattagcaactgtgcgcaatttgatcatgatttttatgtcctcttgaaagttttagtagtatggtaactaaacagtcataactaaaatatttgatcatctcagagagggagttttgtgagtttaatttaatatatgttgaacaactgcagtacaccaaagactgagcaccagagttacaaagatggatatgactatctctgccctttaggaaaattattctagtggagaaggcagacttaaaggtatgcagtgtgctatgattagacctttgctagtatgagagatagatgtccaacttcattttttttgtttgtggctatccagttgtaccaataccatttgttgaaaagactattcttttcccaatgaactgtcaatgaatataaaggtgagggtttatatttatcccctcaattatattctgtagatctgtatgtttagcctttgctactatgcccccaagtcttgattaatgtagctttataacaacttttgaaatcagtaagtgtgagtcttccaactttcttctcttttgggattgttttggctgttgccttgcatttccgtatcaattttagggtcaggtttttctgtttctgcattaaaaacaccacggattttgacagggattgcattgaatctgtagatgaatttggggagttttgtcatcttaacaatattaagttttcaacctatgaacacaggattttttatttatttaggtttttaatttttttaatgttaccttgttttcagtgtaaacgtctcacatttgttttgttaaatatactctcaagcattttatttttattttaattttcatttatttactttttgagatgggttctcactctgtcaccgagactggagtgcagtggcaygatcttggctcactgcaacctctgtcacccaggcccaagccatcctcccacytcagcctcctgagtagctgggaccacaggtgcatgctaccacacctggttaatgttttgtatttttggtagagatgggattttgccatgttgcccaggctggtctcaaactcctgagctcaggagatccacccaccttggcctcccaaagtcctgggagtacaggcatgagccaccgtgcttggccttgtttttgttattttattttattttagttttttgtagaaatgtggtctcactttgtgtccaggctggtctcgaattccaagacttaagtgatcctcccgctctggctcccaaagtgcttatgcctgtaaagttttatttacaggcatgaaccactatgcctggccaccaagcattttattgctattttatttctaagcattttactgctattctaaatataattgtattcttaactttattttctgattattcattatccatgtatacaaatacaactaaatttgtatattgatcttgtctcctgtacccttgcagagctaactcatctgtaagttctaataggttttttgttttgttttgttttgttttggtgaattccttcgatttttcctgtatgcaagaccatattatctgcaactaaactagaaatgttcaacttcttcctttccaatgtcgatgttcttttttcttttttgtaattgccatagctggaagatataagacaatgttgaaaagaagtgttgaaagcagacatccttgtattatttctcctaataaggggaaagcattcaggtttttttttaaccattgagttttatattagctgtttttgttttgttttgttttgtttttgtagctatcctttatcagattgaggaggttcccttttattcctggttcattaagtgttttcattataaagaaatgttgaggtttttttgttttgtttttattttttagtttattggtttgttttttgtttgtttgtttgtttkttttttttttgagacaaagtctcgctttgactttgcactccactgctggagtgcagtggggtgatctcagctcactgcagtctccacctcccaggttcgagtgattctcctgcctcagcctcctgagtagttgggattgtgagccatcacgcccaactaatttttgtatttttagtagagatggggtttcaccatgttggccagggtggtctcgaactcctgaccccaagtgatacgtccacctcagcctcccaaagtgctgggactacgggcattagccactatgcccatccacttattttattgttttttgagacaggatctcactctcgtccaggatggcatgcagtggtgcaatcatggctcactgcagcctcaacctcccagacttcagtgatcctcccacctcagcccgacaagtagctgggactacaggcccatgccaccacacctagctaatttgtgtatttttttgtagagacggagttttgccatgttgcccaggcttgtcttgaactcctggattcaagtgatctgcctgccttagcctcccaaagtgctaggattacaggcatgagccactcactgctcccaacctgagtgttgagttttgttaaatgctttttttgtgtctatttgcaatgactttaatacaaaaaccatcactagggacaaaagatgttacagcacacattttacattatataaattcagccttttaaaatattttgggtatttaaatggtctaacatatagtcatctttctgttcttcagagtggataattgcaattcatctatcttgaagtttgctgattctctctycctacttagatctactactgagtccttctagtggcttttcatttattttccttttcaattccagaatttttatttgattattttataatttcttcgttttattgatattcttcatttggtgaggtgttgttcttacaatttaaattttgttttgttttgtttttagattttatttcctttagttatttgactgtatttaaaatagctgagtcagaatctttgttggccaggcatggtggctcatatctgtaatcccagcactttgggaggcagaggcaaggggattacttgagccgaagagttcgagaccagcctgggcaaaaaagggatattctgtctttacaaaaagtaaaaaaaattagccgggcatggttgtgcacacctgtggtcccagctactccagaggctaaggtgggagaatcgcttgagcccaagaggtggaggctgcagcaagctgtgatcacaccagtgcactccagcctgggtgacagagtgagatcctgtctcaaaaaacaacacaagggccgggcgcggtggctcatgcctgtaatcccagcactttgggaggccaaggcgggcagatcacgaggtcaggagatcgagaccatcctggctaacacggtgaaaccctgtctgtactaaaaatacaaaaaattagcggggcatggtggtgggcaactgtagtcccagctactcgggaggctgaggcaggagaatggcatgaacccaggaggcggagcttgcagtgagccgagatcacgtcactacactccagcctgggcgacagagcgagactccgtctcaaaaaaagaaaaaaccaagacaaaaccaaaaataactttgtctgttaagtacaatatctgtgttcctcagggacagtttctattgaccattgtttttcttgtgcatagactatcctttcctttttttgtacatcttgtaatttttgttttattaaaactggaattttaaaaataatgcagtgtggcaactctactgcttgatttggctcaaaggtatattatttattttttaatataacaaaccaatatttgggttctctattctatagttttagcattttgaatgcaacaactgtcttattcaccatttaattctcagtactaccgtttctagtacacaatatgcacttaatgaatatgagggattgtatcatgaaagtatttcagatttaaaagataatctcggctgggtgcagtggctcacgcctgtaatcccagcattttgggaggctgaggtgggcagatcgctagaagttaggagttcaagaccagcctgggcaacatggtgaaaccttgtctctactaaaaatacaaaaattaactgggcatgttggtgcgtgactgtaatcctagctactcgggaggctgaggcaggagaattgcttgaacctgggaggcggaggttgcagtgagccaagatgatgccgctgcactccagcctgggcaacagagtgagactctgtctcaaaaaaaaaaaaaaaaaaaagagaatcttatgagttaggaaccactgttaataggattttagattacaggcaagtttatttttgttcttggcctcagttactacttcatggagaaggtagttttagaacttagacttgaatgttgaatagaatttccataggtgtagatgagaaaggagacagtgacagttaatatttgttgaatgaaagggtgaaactctctggagagggtcaacagtgagaatagtacttttggagtcagaaaatttggatttgttccttgactctttctactacttcttttagggaagcttgaaaaagctactcacttcatacccaaatccaggcatgtgatagtgaaacaagaatgactttaaaagtgcttttgtaaactgtaaaggtgttataacaaaagtggttattttttctttagttattactttttttagcatcatgatgatatgatttttctttcagagaaattgaacttttcttttttattgatttattttaattattattattattttttaaagacagggtctcactctgtcacccagaccagagtgcaatggcatgatcttggttcaccacaagctctcccttccaggcccaagcagttctcctgcctcagcctctcaggtagctgggattacaggcatgcaccactaccgcctggctagtttttgtatttttttttttttttttttttttttagtaaagacgagagttcaccattttggctaggcaggtctcgaactcctgaccttaaatgatccacccacctcagcctcccaaagtgctgggattacaggcatgagccaccacacctggccgaacttttctaacagtagcattttaggactttgtttcattttaaagaggtacggtagttcctccttatttgtggagagttgtatcattccattttcatgctgctgatacagacataccggagactaggtcatttataaagaaaaagaggtttaatggactcacagttccacgtggctggtgaggcctcacaatcatggtggaaggcagaaggcacatcttacatggcagcagacatgagaaaaatgagagccaagggaaaagggaaaccccttataaaaccatcatatctcgtgagacttactaccacaagaaccgtatgggggaaactgctctcatgatttacttatctcccaccaggtctctcccaaaacacatgggaattatgggagctacaattcaagatgagatttggatgggggaactcagccaaaccatatcaagagtatagtccaacacccccagtggagacctgaaaccacagatagtactgaactctgtatatactgtgttttttcctatactcatatacttatgataaagtttaattgataaattaggcactgtactcttgtgctttggggccattacttgaacacaagcactgcaatactgcatactgccataatgtatgatagtgcatctgataatggaggtggctaccaagtaactgttgggcaggtagcatatactgtgtggatatggtgtacaaagggacgattcatgtcctggatgggacagagtaagatttcatcatgccacttagaacagtgcacaatttaaaacttatgaattgtttatttttggaattttccattttaatattttctaaccacagttaaccatgggtaactgaaattataggaagcaatactgtggataaagagggggctactgtatgaggattggaggaatggtgtcttacttcatgcttttggcttacaaatgatatgtatataagaccctgtatgaaagtacctcttgatacttttatatttagaaaaatgcctactggtacattttggttgcattattttgccattgttatttataattaaatgaaaattttaaagatttgagtaatttttactagttttttagtggtattttatgtgacttttctatcatatgttaccaatagtaatggtttagtaaagtatgatatttagcacaaaaaagtcataattatatttggtttttatttttgttttagctggaaagtgaaatttcaaccacagcagatgactgcagttcagaggtaagactaaattatattgatttctaatatcataaatgtatatttatattattattgaaatcattgattgttgctacttgatttcttgtcactcatgcttctattttatttttataaatataatgttaagtgactagaacctgaggattatgtattactgacttttttttttttttttttttttttcagattattagctaaggtcttaagtctggttaaatagcttggtctctgttttagtttctggaaagtatttgatattgggtttcttagacatgtgactgttacaaggcatccatatttagcacagtaaaaatatcaaaaattttttgagactttgaataggatatttcattttgagtaatgcttttttataaatgcttgaattctagttaatcatatgaacttgtttattgaaattaatgtttcaatagtagtttttactttaggtgataaaggtattgtccactttaggaaataccctctttgtgtgttggtaaaagtatatgtcattttgttatctttttcttattcttttagatgtgattgtcatttctttactccagaatttgaggagactataaactattctgtactctgaatggtttagcaactcagtgtattcagtaagtctcaatttattgtaggtttctaataggaaaaaaaaactccatgttcttaaatgaacgtattactgttttagattgctaatagcaataaaaactgctactttagaagttaatgtgcttaaaagttggaatatacttactagtaatctggccaggaaaataattagccaacattaaataaacacattggtgcctgatttaggctaaagttgcctctatgggaagtatcttgatttaaaatcactgcttaaaattcagagtctgcttttgtgacattaaatttggggcgcatacagttggccctccatatccctgggttctgcatttgagggtatgaccaaccacagatagaaaatattctgaaaaaataaaaaataacagtacaacaatagaaaatatataacatttaaaaatatagtataacaactaagtatatagtaatcttagagatgatttaaagtatatgggcagatgtccacaggttgtatacaaatactatgccattaagggtcttaggcatccgtgattttagtatccttaggggagttcctaaagctaattcacttgaagacaccaagggattattgcatttgaaaactttttttttctttataatgctctaatttttatatcttgtatttcttttttttttttttttttttcaccaagatggagtctcactctgttgcccagactggagtgcagtggtgcagtgttggctcactgaaacctctgcctcctggatctaagcaattctctgcctcagcttcccaagctgggactacaggcatgtgccaccacacccggctaatttttgtatttttagtagagacggggtttcaccatcttggccaggctggtcttgaactcctgacctcatgatctacccacctctgcctcccgaagtgctgggattacaggtgtaagccaccgcacctggctatagcttgtatttcttgactgaaagtcataaatgctttggtgcttaaactgcctgtatctctgggggcaccccagagttccacgaagtgcatttttctctttacactaaagtgaatattttttaatatgctagtggctgtaggtcagaccctcccatatatgcccatgaaatttggttacaatttgtatagctgttttctcacattgagataatagagcaaattttaatttaatttttttgtcattctaagtattttacgtacgtatgtatgtatgtatgtatgtatgtatgtatgtatgtatgatactttaagttctagggtacctgtgcacaatgtgcaggtttgttacataggtatacatgttccatgctggtttgctgcacccatcaactcgtcatttacattaggtatatctcctaatgctatccctcccccagcgccccacccctcgacaggcccccatgtgtgatgttccctgccctgtgtccaagtgttctcaatgttcaattcccacctatgagtgagaacttgcagtgtttggttttctgtcattgtgatagtttgctcagaatgatggtttccagcttcatccatgtccctgcagaggacatgaactcatccttttttatggctgcatagtattccatgatatgtatgtgccacattttctttatccagtctatcattgatggacatttgggttggttccaagtctttgctgttgtgaatagtgccacgataaacatacgtgtgcatatgtctttatagtagcatgatttataatactttgggtatatacccagtaatgggatcgctgggtcagatggtatttctagttctagatccttgaggaattgtcacactgtcttccacaatggttgaactaatttacactcccaacagtgtaaaagcattcctatttctccacatcctctccagcatctgttgtctcctgactttttaatgattgccattctaactggtatgagatggtatctcattgtggttttgatttgcatttctctgatgaccagtgttgatcattttttcatgtgtctgttggcttcataaatgtctgcttttgagaagtgtctgttcatatcctttgcctgttttttgatggggttgtttgctttttttttctttcttttattattattattatactttaagttctagggtacatgtgcacaacatgcaggtttgctacgtaggtatacatgtgccatgttggtttgctgcacccattaactcgtcatttcatttggtatacctcctaatgctatccctcctcctgcccgccaccccacgacaggcccccatgtgtgatgttccctgccctgtgtccargtgttctcactgttcagttcccacctatgagtgagaacatgtggtgtttggttttctatccttgtgatagtttgctcagaatgatggtttccagcttcatccatgtccctgcaaaggacatgaactcatccttttctatggctgcatagtattccatggtgtatatgtgccacattttgttaatccagtctatcattgatggacatttgggttggttccaagtttttgctattgtgaatagtgccgcaataaacataggtgtgcatgtrtctttatagtagcatgatttataatcctttgggtatatacccagtaatgggatcactgggtcaaatggtatttctagttctagatccttgaggaattgcttctaaaatatctactaaaaataacaaaaattatctgaacatggtggcgcaagtatttttgtatttttgttagagatagggtttcaccaactgtcttccacaatggttgaactagtttacactcccacaaacagtgtaaaascgttcttatttctccacatcctctccagcatctgttgtttcctgacttttaaatgatcgccattctaacttttgtgagatagtatctcattgtggttttcatttgcatttctctgatgaccagtgatgatgagcattttttcatgtgtctgttggctgcatgaatgtcttcttttgagaagtgtctgttcatatcatttgctcactttttgttggggtttttttcttgtaaatttgtttaagttctttatagattctggatattagccctttgtcagataagtagattgcaaaaattttctcccattctgtaggttgccttttcactctgatggtagtttcttttgctgtgcagaagctctttagtttaattayatcccatttgtctattttggcttttgttgctattgcttttggtgttttagtcatgaagtccttgcccatgcctgacctaaaggttattgcctaggttttcttctagggtttttatggttttatgtctaacatttaagtcttcaatccatcttgaattaatttttgtataaggtgtaaggaaggagtccagtttcagttttctgcatatggctagccagttttcccagcgccatgtattaaatagggaatcctttcgccatttcttgtttttgtcaggtttgtcaaagatcaaatggttggagatgtgtagtgttatttctgaggcctgtgttctgttccattggtctatatctctgttttggtaccagtatcatgctgttttggttactgtagccttgttgtatagtttgaagtcaggtagtgtgatgcccccagctttgttccttttgcttaggattgtcttggcaatgtgggctcttttttggttccatatgaactttaaagtcgtttttttccagttctgtgaagaaagtcattgatagcttgatggggatggcattcgatctataaattaccttgggcagtgtggccattttcacaatattgattattcctatccatgagcatggaatgcttttccatttgtttgtgtccttttttatttcgttgagcagtggtttgtagttctccttgaagaggtccttcacatcccttgtaagttggattcctaggtattttattctctttgtaggaattgtgaatgggaattcactcataatttggctctctgtttgtctgttaatggtgtataggaatgcttgtgatttttgcacattgattttgtatcctgagactttgcttaaggagattttgggctgagacaatgggttttctaaatatacaatcatgtcatctgcaaacagggacgatttgacttcctcttttcctaattgaataccctttatttctttctcttgtctgattgccctggccagaacttccaagactatgttgaataggagtggtgacagagggcatccttgtcttgtgtcagttttcaaagggaatgcttccagtttttgcccattcagtatgatattggctgtgggtttgtcataaatagctcttattattttgagatacctcccatcaatacctagtttattgagagtttttagcatgaaaggctgtggaattttgttaaaggccttttctgcatctattgagataatcatgtggtttttgtctttggttctgtttatgtgatggattatgtttattgatttgtgtgttttgaaccagccttgcagcctagtgatgaagctgacttgatcacggtggataagctttttgatgtgctgctgtatttggtttrccagtattttattgaggatttttgcattcatgttaatcagggatattggtctaaaattcttttttgttgtgtctctgccaggctttggtatcaggatgatgctggcctcatttaagttagggaggattcccccaccccctttcttttttctgtggcggagtctcactctttcgcccaggctggagtgcagtggcatgatctcagctcactgcaaccctcgcctgccgggttcacacaattctcctacctcagcctgctgagtacctgggactacaggcgcgtgccaccatatctggctaatttttcgtatttttattagagatggggtttcaccatactgttcaagctggtctcgaactcctgacctcttgatctccccacctcggcctcctaaagtactgggattacaggcatgagccacctcgcccagccaattccccctttttctatttattggaatagtttcaggaggaatgataccagctcctctttgtacctctggtagaatttggctttgaatctgtctggtcctggactttttttggttggtggtctattaattattgcctcaatttcagagcctgttattggtctattccgagattctacctggtttagtcttgggagggtgtatgtgtccaggaattcatccatttcctctagatgaaagaaatgggacctgctgagccaggcacgggagagaatctcctggtctgccagtttctgagaccattggaaaagcgcagtattgggcgggagtgtcccgtttttccaggtacagtctgtcacagcttctcttggctaggaaagggaaatcctccaaccccttactcttcctgggtgaggcgatgccctgccctgcttcggctcaccctccatgggctgcacccactgtccgaccagtcccagtgagatgaaccaggtacctcagttggaaatgcagaaatcacccgtcttctgtgtcgctcacgctgggagctgcagaccggagctgttcctatttggccttcttggaacggatcctcacaaattttaattttaaatattgatttgaaaagctaaagaggtcaaaagatggtgattttcaggttttctgtaggaaaatgttaattaatagtatgggaaattcttgttataataagacagtcttcagctaaattttttaaattaaaaaactggtggagattatcaggttccaaaaaatgtattgaacctatttatctgagatgcctagtaaatatatgttttaaggtaaggtacaaatagtatttaagtgtaagtactaccgataaaacttagaacagtatttatcatacttgttgaccatagctcatggtgagaaatatattttacatacgtttgtaatttcatatatatacatatatagttacatatatttatagttatatacatgaataattatatatgaataaatatatacatatgcatacttttttccaaacaagtttttggaaagatacttattcttacagtatgacatatcttgtgatgatacagtttcttgttaatgttggtcaaaaaaactaaattgatgagctatcttaccgtgtggaataaacagtgatttagaagattacattgaaaaaagataattatgagccaggcacggtggctcattcatgcctgtaatcccacactttgggaggccaaagtgggcggatcacctgaggttaggagttggagaccagtttgaccaacatgctgaaaccccatgtctactaaaaataacaaaaattacctgaacatggtggcgtatgcctgtaatcccagctacttgggaggctgaggcaggaaaattgtttgaatctgggaggtggaggttacagtgagccgagatagtgccattgcactccagcctgggcaacaagggtgaaattctatctcgaaaaaaaaaaagaagaaaaaagataattatgaaataatttttgacagatttgacctggtttgaattataaccctagtaatattttgtgtgttatgtatggattcacaacggattatactttgagaaatttatagattcactatgtctagagaaaacgtagaagtaaagttgatatttggtgaaatgtttgatatgtgtcatcaaaattgctaagatggatactagttggatctgtgatgctctaggctagttttgaggcttgaattcctccatttaatgatattagactggcttgactcaactagaattacaggagacttctaagccatatccacctattcaggaggcagaaaaatcatcagtggaccaaatttataacccgagaaataaactcatactgtaatagtttttatattggaacttttatggaattatctctcaataacacacctaaaaaatgagatttattggccgggcatagtagctcacacctgtaatctctgcactttgggaggccaaggtgggaagatcactggagctcaggagttcgagaccagccttggctacatagggagacatcatctctacaaattaaaataataaaataaaattagcaaggcatagtggcgggcacatgtagtcccagctacttgggaggctgaggttacatttttcaatgtaatcttctaagtcactgtttattccacacggtaagatagctcatcaatttagtttttttgaccaacattaacaagaaacagtatcatcacaagatatrtcatactgtaagaataagtatctttccaaaaacttgagcccaggagtatgatcacaccactggcactccagccttggtgacagagcaagaccccmtctcaaaaaaaaaaaaaaaaaaaaaaaaaaaagctaggtgatagtgtgtgcctgtacttccagctgctcaagaggctgaagtaggaggatcccatgcacccaggagtttgagtttgcaatgacctaatgatcacaccactgcactccagcctgtgtgacagagtgagaccttgtctcaaaaagagaaagagagagagagatttctgggcagtatgtaacattataacttcactgcaatgccatatttgcaaagtttaataatcttggcagatctagattgtatttgagtattctaaaattttgaaatcaagtagttttaatcatagatcacataattatcttgtattttacctaaatatgactatcatttttctggtaaatagggcaataagatgtaagaaaagagcagggggactttggagccagaaagtcctgtttacatacttcatcacctttgaactgtatgaacctgggcacatcacttaaactctgaaatacagtttgtttttttattattattatactttaagttctagggtacatgtgcacaacattcaggtttgttacataggtacacatgtgccatgttggtttgttgcacccatcaactagtcatttacattaggtgaaatacagttatttaaactataaaatgggggacgatgatatctacctgatatatttgcatacctcacaaagtagttcacaaaataagcttgagaatgtttaatatgtgtttggcatacattagacgttcagcaaagtgtggttttttaaattgctcatcactagaaatacacttttctttacactacatttatatgaaatgagtgatgatgattcccttaataaattgttctcagaaggatttcaggttctgataatatttgattagaacttaatttgtaaattgtatttatttaggtatattgtgggtttaatgttcttgacttctgtgactagtacactcattgggttggaaaattggttccatcttagaattagtcaaataatattattccaagatctcttttgtagaaatatgtatcctattatgtacactagagaaatcggactaaatgaaaaatactcttcttacaaattaaattatatgcagtcatcttcaatcattaatgaagrgacgtttcatgtccagaataccatatttacatgaattgtttttgataccctttgagcagggttatttggaggaagttgggaatacaggcaatatagagtcaagacaagtagataaatatactttgccatgtatagaaagatgaaatgatagtaatagggtattcactcttattatagatttcatctgattattgaatactttttaaccaagtgcttatatggtttatgacatttattttaacctcgttaattacttgactgcaactccataagtcatttaggcacattgaactcttataattttcatgaacttttatgagccatcagatttttattttttatgaaaatattcaatattaatgtttttaatttatatatttccaaattaagtacaagaataaggtattaatcataaataaggatgagttgttcttttatatttcatcaacctaatgttcaccacaaggatgagtttttatgtgaaggccattttatagtcacatagtgaaagttacctttcctctgattctttctgaatagcaatgttgttatgatgtgatacctctataaaacattttaaaatttaaaatgtacctcacttgtactttcccagatctttaagttatctgtacagatagagtaaatttttctgtgaatgcagaaagaatacattaacatagtctgtaggttaaataacttcaacaaatgccacaataaaaaaggacattgagagaagttgagcttttttcagttgaaggagtctgttaatctaatcttcatgtttcaagtcatttatttactttcatatgaaggtttacttagtgttagaagactaatgttagaagaggagataaatactctaccctttagttatcaataaaataattatctaaatttaaaaacagaataatttattgttaactattaatgatcctgatattctgttaagtgttcctgttctaactttggaatatagtgtgttttagtttagttctggtgaataatcttttatagccaatttgtatgatgttaaacttttcagatttattaatattgataagttttacatttattataacataaatatgttttgaaacagtcatgtattaatggtattttaagaattcaatacatatgagttcaagtataacatttgcttatctgaattagagaaaaattaaacagcagtggctaaataaagtactagatgaaactataaacataattattataaaatggtaactgataactgattcatgtaatactgacagttattacaaactgataactgataactgattcatgtaatactgacataatcactccttaaaggaatattcattgctttgtatcatatttgaagaagcagtagtcccccatccctgtttttactttctgtagtcaaccattatctgaaaatattaaatggaaaattccagaaataaacaattcataagttttaaattgtgccttgttctggtagcatggtgaaatcttgctccatcccattcatcccacccaagatgtggatcatccctttgaacatacagtggatctacaccatatactctgtccatctcatgttcatttagtagctgtctaccttatcagatcaaaaaaccatagtgtatatagggttcaatactatttatgatttcaggcatctactgggagtcttggaacatatcccctgtggattaaggaagactactgtattcataaacatccatttcgttacactgataggctacagtaaaatattttagaggacacatcagaatgcttcatttcaggatcaagaaaagctaattgcaatttagaagtatttaatttgaaagttattgcaaatgtcttgatattaatcttttaattaaaaaaattttttagagacatggttctcagtatgttgcccacagtggagtgtggtggcaattaataggtgtgccagttgtgcactatatcctcaaactcctgggctcaagcagtcctcctgcctcagcctcccttgtagctggaaaccagccaaatgggaagaactctttttttttttttttttgagacagagtcttgctctgtcgcccaggctgtagtgcagtggctcgatctcagctcactgcaagttccgcctcctgggttcacgccattctcctgcctcagcctcccaagtagctgggactacaggcacccgccaccacacccggctaattttttgtatttttagtagagacggggtttcaccgtgttagccaggatggtctcgatctcctgagctcatgatctgcccgcctcagcctcccaaagtgctgggattacaggcgtgagccaccacacccgacctaaattgttttacttgaaaatgaatagggcttaataaataattatttgaaccattttaaggaagcctttcatagaagagattttattgaggtttatacttctgaagagcaaacagaaactgcacttagaactttaattcacttaagtgaaaatgtatatatgtgtcttttgcattgtaagcactcagatttgtgaggaatgattggcatttgaaatggtcattatgtctcttrgatattttaaattaatctctgtatctgttttcgccaatgatgcattttccctaggaataaaagacatacacgtgaatacagttaacagaaatattgttagctaaataaaattatgtctaagatcataatatatcaggaaattgtttttatacaggtaaatggttgcagttttgtgatgagaacaggaaagcctacaaatttattaagggtacagtatttaaaactacttgtgatactaatgttggatactatttaaaatcatctggcttactaacaaaactttttcctgcatgtacttctttctgtgtgtgatttcaaattaattttaatgtttactaaaacaaagttatctaccatttattataaaactcaattgtaggccaggcgtggtggcttacgtctgtaatcccagcactttgggaggccgaggcaggtggatcacctgagataaggagttcgagaccagcctgaccaacaaggtgaaaccgcatctctactataagtacaaaaattagccgggcatggtggcagccgcctgtagtcccagctacttgggaggctgagacaagagaattgcttgaacccgggaggcggaggttgcagtgagctgagattgcgccactgcactccaacctgggtgacagagcaagactctgtcaaaaaaaaaaaaaaaaaaaaaaaactcaattgtaacagaatttgcggataacctgtttatgttcttgaggtaaatatgttaacgaagtaggttgccataccataatcttccaggtggtgagtgatgttttaaagtggaccttgctatggatttcagtatttgaatctctctccctaaggaatattgctaatactgaattctttaaaatcttggattgatttaggaagaagaatttggtgttgatgattcttattctgaacaaggagcacaagacagtccgactcatctagagatgatggaaagtgagttggctgggaagcagcatgagattgaagagctaaacagagagctggaagaaatgagggttacctatgggactgaaggactgcagcaggtatgtttattttctgtggcttttgatttgctactcacaaaaacaaaaacaggaaatgtgaataatagtagtctttaaagatggggtttttaaaatttttttttaacttttttcttttcttttcttcttcttcttcttctttttttttttccatacagggtcttgctctgttgcccaggctggagtgtagtggtgcaatctcggcccactgcatcctctgcttcctgggctcaagcgatcctcccacctcagccttgtgagtaactgggactacaggcatgcactaccacacccagctaattttttrtagagacagggtgtcacctcagattcctggactctccttggcctcccaaagtgctaggattacaggcgtgagctactgtgcctggcctaaagaagggggttttaaaatggtaacttagtgggacacagtggcatgcacctgtagttctagttattcaggaggctgaggtgggaggatcacttgagcccacgagttcaagtccagcctgggcaacattgggagtccctgtctcttaaaaaatcaaacagaaaagtaaatgataatatcactcataatttttgtctttatacattgcataaacaaccctgtttaaaagtaggatttcattaacagggttaatataacacagactcttttttaactttatgatagctagcctgaaatcactttaataagacagatgtttttgtaatcagcctgagagaaaattatggtgcaaaccacatcaaaatattataacttaagtccattaagaatgtcagcaagttgggcatggtggcttatgcctgtaatcccagcacttcaagaggctgaggcaagaggatagcttgagtctggtagtttgagactggcagggtgaaaatagcaagaccccgcttctacaaaacatttaaaaattagccaggcatagtggtgtgtgcctgtagtcctagttacttgggaggctgagacaggaagatcactgcagcccaggagattgaggctgtagtgagccaaaatcacaccgctgcactctagcctgtacaacagagcgagaccctgtctcaaaaaaagaacagaaaaacgatgtcagtgggtccttgtaagtaacctcttgtggttagactaacatctgtggttagactgccataactgtctatggcagtcagttatgaaaacaagatgaagtaggacattgatgaggatgacaaaaatacatatcagtttcatcctcttcagaaacaagttggaattaaacatgtctagggtggtgttgcctgggaacagattaggggcacccctaaatataaaggcacttgtccttctataagtaaatatatggataagccagatcaattttttccttagttcagataaattttttgaagttgatttggaagcaccaatttctgtaagttaatagttttcaaatgtggaaaatactgattacaaagtgtaagaattatgccaatgtgttttgaattcttattttgaaaaagttacctgtaataatagtcaattaaaaaaaataaatctagcacttactattttctttcagttacaagaatttgaagctgccattaaacaaagagatggcattataacccagctcactgctaatttacaacaagcaagaagagaaaaggatgagacaatgagagaatttttagagttgacagaacagagtcaaaaattacagattcaatttcagcaagtaagtattactaatgcaacaaaattcattatttttttagtaatgaattttaaaaattcactttcaagaacaaatctaaatttgttaaaaaagccatttcgtattatatcatgtatgaaaaattagtgaatatgtgttgctatattaaccaggaatttaattcatacttcttaaatggttctctactaatattttcttttcatttcctccctgtctctattttgaaatcttacaaattgtgtaaggttgattgagggtatttctgcagaaattaacctgtagtcacatcctacctttgccaattctggtatggtttattttagttaggttctaaatgataacaaaactaaatatattccattttcctttaattagagccacaggaatctaactgcattaatcagaatttctgatggcaagtagcaaaacaatttgaaatagtttaagcaaaagggaggtacttagtgtaaggattcaggctgtttccagaacccaagggcagaaatacaaccaggcctctgaaagggattggaactacaaactggaaagccatagggaattcgggaagtactgtctttgatgccccacttttcttcgtatatctgcctcagtctcaggagacctaggttctctgctgtatcatggaaaagataagtttattggctcggcttgggtatacctatctagtcagccaaggtagcatgtttgctagggtctcaagcctgcagagttcccagagagctattgcagggacaccccaaaggtgtctgttccctaatacagtcacttcagaatttaaygttttgaggtttctttctattttcagttacaggctagtgaaactctgagaaacagcactcatagtagcacagctgcagacttactacaagccaaacaacagatcctcactcatcaacagcagcttgaagaacaagaccacttattagaagattatcagaaaaagaaagaagacttcacaatgcaaattagtttcttgcaagagaaaattaaagtatatgaaatggtatgtttattttaaggaagtcagctaacttgtagaagctttagagtttcaagttttttatgcaagtggtttttttttgttaggcacatgaatcacaaaatttcatarttaagctctttgtgtaatttatttcaaaagcaaatgggaatctcagtaatgtagtttttaagataatagtcattactgagttccctaaaagtgatcagcctatgttaaactgaattagcaggaaaatacaaatttatagctatagttttttttgtcatttataattatttccacttattttagccatggttgtgaaattcagaaaatattttcacaacagagagaaattttatggattttaatgagaaaaaaattgaatgtagtcagttatctttatttacataagttatgttccataaacttaagtgtttctgggaacacttatttagcaaataagttctctggtgggggattgttgggaggaatatgtgtccgtgtatgggtgcgtatattttacatatatgtgtatcacattgattataatcttaaatcataaaactactcatcctggaagattctttttctttattttttaaaagggaaatcaaggttcagaagtgacttgcctgaggccaccccactaacaggtgtcagactgggattcagatcctgtcagttgccccagagctggagcttcctgtactacactgcactacctcgggtcctctccatccctctggtcctctctataagggatgaacaaggcagtgtggtcaccttgtttgacctcagctagaagtgtatgtccagcaactcaaattttttgtcgctctgtgcacacctacaaatgactaaaagcaycatgagcattgatttgggggttacaaataaattttagcaagaactcacaaatatggaatctacaaagaatgaggatggattgtacatgcaatataatactttttataaacttaggaggttcttctgcaagaggttgagaaattaccaagacaagaatattgcttggatgataataataatagtagtagtaattagcatttattaagtgcttactgtgtaacaggcagtattcaaagcatcttatattaactcattgaatcatcaccataggcctgtgcaatagaagtacaattatcactcctattttctaagtgaggacaccaacacaaagcaagatgaggtaaattgctcaggtatacacaggtagtaagttgatagagccagatttcaaatctaagttgtctgactccagagactgcttttaaataatagggaatgtacaaattgaagacaatgaaattatgaaaaatacatgctttaccactaaggtaatttaaaaattattaggtaaatatttacagaacacctatttttgtagcaggcccttgcaagaaatacagtgaggcttaaaatgtgcccttttcttcactggaactcagatgagtaggagagctgtggcatgtacaaaggacaccacaaaacagggataagtgtgggcaaaaagtgctttgaaagttctgaataggtctggcttcataagagaagagattcagggtaagctttagtggaagagttkccatttgaggtaagtttataaattgggacaactttttaattgtattttgtttccccaacaattggcctaatgcctggaacatagtagctactcaatactcactttgtaaacaagtgggtaaattaaggatctcaactgatagaaatggggaggactttttagatagagtgtggagtaggcataaagactcaggatgaaacatgttaaaaatcagtaaggagcaaaaaatggtgtaacttgtctagaaacagtartctttgaaagttaatctttccaggaggtaagagtgggaggataatctaggactaggtgagaagagcctggagattggattgtattatatttactctgtgggcagtgtaaattgagattatttaaaattcaagtaattcattttgtagggggaataacctttgttatttgaatataacaagaatacttttatcaatctgtttttcactatatacatttttttaaatttttattcttaagaaaatgaatccccccaagtaataattctatcggcagctgagatattagggtcagctaaggcattggggtcacaaatgaaatggtcttggttccctagaccagtggtccccaacctttttggcaccagggccagtttcgtggaagacactttttccacagacatgagggaggaatggttttgggatgacatcaggcattagttagattcacataaggagcttgcagcctagatccttcacatgcacagttcacaataaggttcgagctcctagaagamtctagtgccgcagcagatctcacagagatctygctggtaatgcttgcttacctcctgctgtgtggccccatctctaacaggccccaaccggtaccgggtctgcaacctggaggttggggaccccttccctacacaactgtgttgatgatcaaaagctcattctcattgtcctaatcctccaaacttcccattggtgccgtagcatagtatttccccccatctcaggtgtatttccaaaagatagtgtattcaaccacagggctctttttttttttttttttttttttttttttttttttttagaattcagagtaagtggtttaaaaccatgtactttgaaataagtgatactaagaaaaataaaccataaatttgtgttgtttaacggttgaaagaagaattattgttggttgttattatatcaggtgttggacaattttgaattaaatgattaaatgatactgttttatgaaggccccactcccctatataaatcaggaaacagaaaagttaaattttgtaacattaacatttttcaaacttagttacttatttaacagtttaactggaattgaccaccatgaactgattttactttctcatagattccaaatgtgttacagatttctttctagtatgtaaatatattacactcgtatatattaatagtacagtaagaataaaatgctttaataggtgatgttttattttagcatattctgtgagatagaggaaataataatatttatattgtatggatgaaaacactgggattaaaggagattaaactgatttattaatatcctattgtagtgcagagtttgaagtaagaaggctcaggacttggtaataacatggtaatattgggtgggatatgtgataccaaggcacaagctgatagaattttgcccaagaggctgcataggataacattcattgccttggttaatttatatagtacagaatctggccttcgacttgtaggttcagaagtctgatttttttttcccctgtcaactgagacgagctacctcagaagtgaactcagatttttcaaagttaacgaggcwaattttttttgtttgttttgagacagagtctcgctctgtctcccaggctggagtkcaatggtgaratctcagctcactgcaacctctgccctctgggttcatgtgattctcctgcctcagcctcctgagtagctgggatcacgggcgcccagccccacgcccagctagtttttttatttttagtagagacagggtttcaccatgaggctaatgtttaaagcttgaataagattattaatttacaatgagaaatcattatcacagagacctaaatatttcaagttcattggattttatattatttccatgggcaaatgaattttaaaagccacataataattagaaagttatttagtgaccatgagattaaaaggttttagaggaatcagatgttcaggggcattaggctgagataacctgatctatctatctcacagtaggaatggtcatgcctatagatgggaattcttaaatgctgtttgctgcaacccctgacatttctttctacatttggtaatgttttttctagagcaaccaaaattctcaaaggctgtacttgaatgggcactgccaacatttccctctgaggcttttctttttctcagccttgacrtttcttctttagttatgttcattcattcattcattcattcattcaaggcacctttaagtcctgtttgcctgggactcctgtctctttaaaatgattttacttacctacttatgtcctgatccattctgtagatttcatgtatttatttgtttttgagactatagccctctattacttacagaggcaagtaagttactgaagcaaaactttgacctagggcctctgcttgactttgtcatgctgaagtaatcaccataacagatatgccttggcctgtgtctgggcgtagccctatctccattccaaaatagaatcccaaataagaactgggggagagtatctgctttgctttgaaaattctgtttaaaccaaaagtcctaggaccaagttgttatgccataaatggtatagttgtcttagatgtcacttgaggttcagccttttaagcattgcatatctctaaatttctgactgacttaagagcccaggactgaagttaagacagaccgttaggagtctgtttttgttgtttttctttttccatagcccttgcccatgacacacattgaagtcaccagaatacatgtgaggaacttttatttatttttatctttctgaatgtgtctagagtatatgcagtactttagctatagagaatactaaatatttagaatgttgatcagttaataagaaaaatgaaaatgtaacagtttggagacatctaaaatcagactgggtttttaaactaaaaattttaatcacagaaatgttaagagaaatttcttctaagaaggccaaaactactgtagtgtttgctcacaagtagtgttggktacacgagttctaagtstcattattgtggaaaaaattgaggggcaggaccaacatttactttttgtagaattttttaaaagagaaacttctgtcagtcttttggtaatgagatgaagcagtataatttgccagaagctaaaaatgccattcttacattttcattttttttcctaaaggaacaagataaaaaagtagaaaactcaaataaagaagaaatacaggaaaaggagacaatcattgaagaattaaacacaaaaataatagaagaagaaaagaaaactcttgagctaaaggataaattaacaactgctgataaattactaggagaattacaagaacagattgtgcaaaagaaccaagaaataaaaaacatgaaattagagctgactaattctaagcaaaaagaaagacagtcttctgaagaaataaaacagttaatggggacagtcgaagaacttcagaagagaaatcataaagacagccagttcgaaactgatatagtacaacgaatggaacaagaaacacaaagaaagttagaacaactccgggcagagctggatgagatgtatgggcagcagatagtgcaaatgaaacaagaattaataagacaacacatggcacagatggaggaaatkaaaacacggcataagggagaaatggagaatgctttaaggtcatattcaaatattacagttaatgaagatcagataaagttaatgaatgtggcaataaatgaactgaatataaaattgcaagatactaactctcaaaaggaaaaactcaaggaagaactaggactaattttagaagaaaagtgtgctctacagagacagcttgaagaccttgttgaagaattgagcttttcaagggaacagattcagagagctagacagacaatagctgaacaagaaagtaaacttaatgaagcacataagtcccttagtacagtggaagatttgaaagctgagattgtttctgcatctgaatccagaaaggaactagaattaaaacatgaagcagaagttacaaattacaagataaaacttgaaatgttagaaaaagaaaagaatgctgtgttagacagaatggctgaatcacaagaagctgaattagagaggctgagaacacagcttctatttagtcacgaagaagagctttccaaactgaaggaagatttagaaattgaacatcgaataaatattgaaaaacttaaagataatttaggcattcactataaacagcagatagatggtttacagaatgaaatgagtcaaaagatagaaaccatgcagtttgaaaaggacaatttgataactaagcagaatcaattaattttggaaatttcaaagctaaaagatttacagcagtctcttgtaaattcaaagtcagaagaaatgactcttcaaatcaatgaacttcaaaaagaaattgaaatactcagacaagaagaaaaagaaaagggtacacttgaacaagaagttcaagaattacaacttaaaacagaattgttagaaaaacagatgaaggaaaaagagaatgatcttcaagaaaaatttgcacaacttgaagcagagaatagcattcttaaagatgaaaagaaaacccttgaagacatgttgaaaatacatactcctgttagccaagaagaaagattgattttcttagactccattaagtccaaatccaaagactctgtgtgggaaaaagaaatagaaatacttatagaggaaaatgaggacctcaaacaacaatgtattcagctaaatgaagagattgaaaagcaaaggaacactttttcatttgctgaaaaaaactttgaagttaactatcaagagttacaagaggagtatgcttgccttctcaaagtaaaagatgatttagaagacagtaaaaataaacaggaattagagtataaaagtaaacttaaagcacttaatgaagagcttcatttgcaaagaataaatccaactacagtgaaaatgaaaagttctgtctttgatgaagacaaaacttttgtagcagaaacaytggaaatgggtgaggttgttgaaaaggatacaacagaactcatggaaaaacttgaggtaaccaagcgagagaaattagagctgtcacagagactgtctgatctttctgaacaattgaaacagaaacatggtgagattagttttctaaatgaagaagttaaatctttaaagcaagagaaagaacaagtttcattgagatgtagagagctagaaatcattattaaccacaacagggcagaaaatgtacagtcatgtgatactcaagtaagctctttattagatggagttgtgacyatgacaagcaggggtgctgaaggatcagtttctaaagtaaataaaagttttggtgaagaatcaaaaataatggtggaagataaagtttcttttgaaaatatgactgttggagaagaaagtaagcaagaacagttgattttggatcacttaccatctgtaacaaaggaatcatcacttagagcaactcaaccaagtgaaaatgataaacttcagaaagaactcaatgtacttaaatcagaacaggtatgtttacttcttcatatatggtaaagcacaatgaaaaaaatgtacatttcacactaaggtttcaccttcatagaacataagttcatatccttacaagagaatgaaaatgaaccctctgatgtaattttaacttgagcctatcatttatttatcatttaagtacttttttttttaaaccattgttgcctttctttcagttaatctatcttgtatattctgctcaggaaataaaacactaatggattcagattttctttggaaagacaagagtttgtataactttatggagaatctcagcattagaaaagttattaatttcattttgtaatttttgttataatctcaaagattggtttcagcgtttttatttcatagtgatgttttcaagtctctacaactgaaaatgaactcctaagctttttaatagtctctatagttgttaggtggttatgaaattatattttcctgggagaaaaaaaaacctttgatttaagtcctagagttttttcagagtctttattatacctgaaggggaaaaaacagtattaactctaaatatagttaaagaattatatgtatataataatagatcactcctgataatttatatttgccagatactgatattaaaataacaggaaaattctgctatctacaatgkaatggtgctaactaaagttttatgtgtttcttcatttttctaacatatttattgactctcttggcaagtacgaatatagtggccaacaagagagaggtttctggtctcaaagagcatatattttagtgagggaggcagatgataaatgaaacaagtaggatagtgagaaatagtgataaattctctgaagaaataaaacaggataatgtgatagggaatgatggaattatttctgagggctctgttctgttccattggtctatatctctgttttggtaccagtaccatgctgttttggttactgtagccttgtagtatagtttgaagtcaggtagcgtgatgcctccagctttgttctcttggcttaggattgacttggcaatgtgggctcttttttggttccttatgaactttaaagtagttttttccaattctgtgaagaaagtcatttctgtgaagaaagtcattcctgatgggaatggcattgaatctataaattaccttgggcagtatggccattttcacaatattgattcttcctatccatgagcatggaatgttcttccatttgtttgtatcctcttttatttcgttgagcagtcgtttgtagttctccttgaagaggcccttcatatcccttgtaagttggattcctaggtattttattctcattgaagcaattgtgaatgggagttcactcatgatttggctctctgttcgtctgttgttggtgtataagaatgcttgtgatttttgcacattgattttgtatcctgagactttgctgaagttgcttatcagcttaaggagattttgggctgagacgatggggttttctagatatacaatcacgtcatctgcaaacagggacaatttgacttcctcttttcctaattgaataccctttatttctttctcctgcctgatttccctggccagaacttccaacactatgttgaataggagtggtgagagagggcatccctgtcttgtgccagttttcaaagggaatgcttccggtttttgtccattcagtatgatattggctgtgggtttgtcataaatagctcttactattttgagatatgccccatcagtacctaatttattgagagtttttagcatgaagtgctgttgaattttgtccaaggccttttctgcatctattgagataatcatgtggtttttgtctttggttctgtttatatgctggattacacttactgatttgcgtatgttgaaccagccttgcatcccagggatgaagcccacttgatcatggtggatgagctttctgatgtgctgctgcatttggtttgccagtattttattgaggatttttgcatcgatgttcatcaggatattgggaatgttggagagggtagtaacaacattaaatatggtggtcaggaaacatctctaggaggaattgacatttgagctgaaatctgaatgacattgaaattagagcaattgtaaagacacgggtaagtttaaagaacagaatgaaggcttgtgtagttgagtttgagagagcgggagagtggaagaagagtttgaaggaggaagagaccagaccttggagaatcttgcagactttggaagccattggaaagttttctctttttattcctaaatatatcatatttatgatcttatatcaaatgtcgagatattttatatttatgatttatatcaaatgtagagatattttatatatttacttgcctaaatagagtcaagaaattcraattgcttaacgatttttttgtttgtttgtttttgagaccgagtctcactctgtcacccgggctggagtgcagtggcgtgatctcagctcactacaacctccgcctcccgggttcaatcaattctcctgcctcagcctcctgagtagctgggattacaggcatgcaccaccaccacgcctgggtaatttttgtatttttagtagagacaaggtttcaccatgttggccagtttggtctcaaactcctgaccttaggtgatccaacagcctcggcctcccaaagtgctgggattacaggcgtgagccaccatgcctggccaaattgcttaactgttaatgttctgttaaatgtctggaattgttttcaaaaccaaaatgtatggcagttacttgtgaaaatgtcacacatcttttaaaattttttaggaagcatttttgggagaagacctgaatttgaccctcagatggtcaaattttcttattaggaattctaattttctttttctttttcttttttttttgagacaggctctcactgccgtccaggctagagtctcatggcgcaatcacagcatcctgcagccttgacctcctggactcaggtgatcctctcacctcagcctcctgagtagctagtattacaggcatgcaccacacacccagctaggtttttgtattttttgtagagacagggatttgccatgttgcccaggctggtctcaaacttctgggcttaaatgatcttcttgccttggcctcctgaaatgctgggattacaggcatgagtctttgtcaccagccagaattctattttctgtactaaagagatactaaaaagatacttttgatggcattcagattccctctatttgacattgactacataaagtaaagcctgtaaacttcctgcccgttcatcattaccaagacaaacctttattgatgggaagggaagttcacagaagaaatcgagcagtgacttacacaatagtaacacctaagagcagcctaaatatgcttgaaataatgtggatgccacacagatatctctaatacacttaggtagtttgggcagaaggagaaaaataaaaacatcatagaagtcttttcagtgttggratgcaaggaagaaggaagagtggcaggaattttttagatactgattaattattgatgctgggagaggtcatagattgaagtgtatgtgtttaaaattgaagatgattattagaatcaaaagagataccggagcttagaaactacaggaggaaccactagaatatcagctccttgagaacagggacccagtctcctgtatctctaatgcctagaataatgtctgacacatgataggcagttaataatttttttaaatgaatgaatgaattcatgaataaaagggggggaataaataaagcccacttaccaagaaccaacagtgaaatagcacaggccttcatgttagagtcaggaagaagatcagaatagcttttgtcacttgcttttctattgtgtaggtcctaaccattgcaaagacaaaaagatatatggtatgaatggagaaaaagatacttaattgtcataattcccatgtataattaaattaaaaattaagcatgagaactgaaattcttttttttttttttttttttttttttttgagacagagtctcactctgtcacccaggctagagtggatctcagctcactacaaactcagcctatcaagtaggtgggattacaggtggcctccgccatgcctggcaaatttttgtatttttagtagagatggggtttcaccatgttggccaggctggtcttgaactcctgacctcaagtgatttatatctttaatgtaaaataaatatgaataaaacaatgtaaataaaattataacactttaatgaaggataggaggcttgaataaatgaaaagtctcatttctgagtgggaaaatttgaatatcgtaaaaacccaggttatctctagattaatctgtaatccttatgtagttccattccaactcacaatgaaaagttactgaarttcaacttagtaattggtttatagtttatctggagaagaaatgcacaagaagagtcaataatatttttgaaaaacgcagaatagtaattggtgtatagtttatctggaagaagaaatgcacaagaacagtcaagaatatttttgaaaaatgcagaatgcatttaacatgatgtgttgaacaatgtttagccttaaatatattgattttataaatattgaaaacaagttaagctgttagttctagaggctagaatatcagagcatgtagacttaagaaaagtaaaaagaaggaaataataaagttaagaacaaaataagcaaagttagaataaccaaaacaggaggaaaagttttcaaggattttgaaagtttattatttgaaaacactagtggctggccgtggtggctcacacctgtaatcccagcactttgggaggccgaggtggacagatcacaaggtcaggagttcaagattgacctgatcaacatggtgaaaccccgtctctaccaaaaataaaaaattagccgggcatgggggcgcgtgcctgtaatcctagctactcaggaggctgaggcaggagaattgattgaacccgggaggcagaggttgcagtgagccgagatcgcgccactgcactccagcctaggcgacagaaaaaaagaaaagaaaagaaaacactaaaagtattagactttcaagaatatgggccagcgggcgtggtggctcatgcctgtaatcccagcactttggtaggccgaggtgggtggatcacgaggccaggagatcgagaccatcctggctaacacagtgaaaccccatctctactaaaaatacaaaaaatcagctaggcatggtggcatgcgcctgtaattccagctactcatgggggctgaggcaggagaatcccttgaacccaggaggtggagaatgcagtgagccaagatcgcatcactgcactccagcctgggtgacaaagtgagactctatctcaaaaaacaaagaatatgggccaggcgcggtggctcacacctgtaatcccagcactttgggaggccgaggcaggcagatcacgaggtcaggagatcaagaccatcctggccaacatggtgaaaccctgtctctactaaaaatatgaaaaattagctgggcatggtagcgtgcaccwgtagtctcagctactctggaggctgaggcaggagaatagcttgaaccctggaggtggagtttgcagtgagctgaaatcacaccactgcactccagcctggcaacagagcgagactccatttaaaaaaaaaaaaaaaaagaaaatgatcgggaaaaaaagacataaaccaaatgaggcttgatgcagttgctcacacctataatcccagtgcttcggatggctgagacaggaggagtgcttgagcccaggagttcaagaccaacctgggcaatatagcaagatgcctgtctccacaaaaaattaaaaaatcagccagatgtctgcagtgagctatgattgcaccattgtacttcagcctgggtgacagagtgagaccctgtctctaaaacaaactaacaaaatcaaatgaatgaaaatcaaaacctacgtatagataccaaagasattcataaaagtcataaaagaatactataaataaacatccatcaacaaatttgaaaatagacataaactgatggttttctggaagaatataaactaccagaatcaactcaaatagaaatataaaacctgaataagccaataacaattaaagaatttgaaatcatagagattttccctctctcctctcctccaaccagaaatattagactgagaccatttcacaaatgggtcttaccaactctcaacgaatatataattgcttaataaaataggattaaagggagagaactagggggaagaaaagaaggaaagaagaaaggtaagctagacaaaagaaaaacccagttatctaatgagactggtacaatattgatacgaagacctgataagaacactacaaacaaataaaattatagatgaatcttacttatgagtggctgtagaaatcttaaataaaatattagcaaattattctaagaatggaagaatagttcaacatctgaaaaatccattaatgtaaacttcacattcatagatagcaggaaaaaaaatccatatgataaattttattttttattttgttttgtttttgagatgaggtcttgctctgtcacccaggctggagtgcagtcagacaatcacatttcactatggctgcaacctcccaggctcaagtgatcctcccaattcagyctcccaagtagctgggaccacaacaggcacatagcaccatgcctagctaagattttttaaaacatttttttacagacaggaggatctcgctgtgttgcccaggctggtcttaaatgtaggggattggtcagggtggtgggagataaagataaagttataggaaatagacacaaaccttcttgggaggccgggaggtttgcatagcttcagtgaaagatttggttgaaggcagctgaattctcttaaaagcttagggcttagctacataggaatataagggagtttatctaaagagcttgtttactcatgtggtcctaagaccaacctttgatcattcgcaggactgctctctggggagggtgaccagataattacccacaagtgtgttgactcaaagcctttgtcattaaatctatgctgaataaatgcccgcagggccagctagtcagggcgtgcactactgcaattcttttttgtgagcggcccagccccctagccactctttcactgaatactggtgtctgagtacgttattcatctgttatgcagcctgactctgcaggtcaaaccctggcacttaaactcctgggctcaagcagttattccacattggcttcccaaagtgctgggattacaggagtgagccatcatgcctggccttattttatttttttagagacaagtttttactcttgccaggctggagtacagtggcatgattatagctcactgcaaccttgaactcctggactcaggcaatctcctcatctcagcctcctaagtagctgggactacaggcacatattaccactcctggctaatttattattatttttttagagatggggtctttctgttgcccaggctggtcttgaattcctagactcaagcaatactcctacctgaacctcctgagcagctgggattataagtacaagttactgtgtccagcccatatagtcattttaatacatattggaaaagaatccataaaaaactaataactcataattttttttcaatggagaaaatccagaatagaagggaaatttcttaaccgcagtaattgttttcattaaaacatttagcagataacatttctaatagtgaaatttagaagcattcccattaatatcaagtatagaataaaatgtgatagaagcattcccattaaaatccagtatagaatcaagtataggatacccactttcaacatcactatttcaacattgctttgtagttcctagccaatgcaatttgacaagaataagaaatgagataaagaatatgaaaacttatttatgaataacaaaataaaccctacataagatgctttgaacttttgtcaagaaaattataaaacactgaagcatgtaaagacctcactatatgccaatatgtaccgtattcatagtggaaagatgtaaagaaaaatgtcagttctctccaaattaatctcwgtattcagtgtacttccagtcataattacaaggaaatttttcatggatcttgaaaaactgattgtaaaattgatatagacaagtaaatactcaagaataatcaagagaaccctagaaaaatgtattgcatctgacagcaagatttactacaaaatcataatagacagtatggtttgatgctaggatggacaattaggtcagtggagcgtaatggaaagcccagaaacacattgagatccttgtgaaattttaatatataggaaagagaccctacaaatcaacatttatttaataatactgagtgagcctctactgcattctatgcactgttttagtccctggtgacataacagtgaataaaagcaagtagtaggcagggtgcggtggctcatacctgtaatcccagcactttgggaggattgcatgagcccaggagtttcaggccagcctgggcaacagagtgagaccccatctttacctaaaaataaaaagttagctgggcatggtggcatgcaccagtagtcctaactacttgggaagctgaggtgggaggatcgcttgaacccaggaggtcaaggctgcagcgagccatgattgcaccactgtactccagcctgggtgacagagtgagtatttgttaatttgggttgtgagtacataaatgtttattacttcattatttccatgtctgtacgtttaaaatcttttagaacaaaaaatcaaagatgagtcatgctagctataccaaatatcacmatttagtataaaactgaggtaatgaaaacattgtgctactttccttgaaaaagaaaggtagatcaatgcaacagcacgaagatagaaaaaaaattagacttcagttctcatgaatttttaaactcttgtagtcagtatatgcaaaaaaaagaagttaaattatttgatttgtcatttaagaatattataatgtttacatatgtttactttaagaatgatttaaggctacagatggaagcccaacgcatttgcctctctctggtttattcaactcatgtggatcaggttcgtgaatatatggaaaatgaaaaagataaagctctttgcagtcttaaagaagagcttatttttgctcaagaggaaaagatcaaggaacttcagaaaatacaccagttagarctacagactatgaaaacacaagaaacaggtaaaatggtttctgacttataagtaccatgatccaaataagtattggatagagcccaccattctataattttttccttgtcatagaacccacagaggaaggtgatttgtttaccagttgttgatataatcactagacattcatttaagtgcttgagaaagctaaaatcattttcccataggaagtcacaatccattgcgaaagcatatataaaataaacaatttctccaacagaagaatgaatagaaagaatgggaggagaaaggagaaacatctagtacttcctggcaggatgagtagggtgaggtggtagacagtggtggggttggaattttttttttttttttttttttttttttttttttttgagacggagtctcgctctgtcgcccaggctggagtgcagtggcgggatctcggctcactgcaagctccacctcccgggttcacgccattctcctgcctcagcctcccaagtagctgggactacaggcgcccgccactacgcccggctaattttttgtatttttagtagagacggggtttcaccgttttagccgggatggtctcgatctcctgacctcgtgatccgcccgcctcggcctcccaaagtgctgggattacaggcgtgagccaccgcgcccggccggggttggaattttaaggcaggctctggagtctttagaattgaggtgtaagggtacacccattttggaaaattgagagttcaaggtgtgtgagaaagtagttggggttatagctggagagattggcaacagtttgattagaaaaagttttattctgaaagaagcatatataagccttatgctgttggtgataagacctactgcaggattttaagtagagtaacacaatatggtttttattttatgatgacaccactgcggtgagttgggggaggtaagagtagtgattagaacaccagttaagcaactaaagctgtcctttccataaacagtaagtattaactaaatgttaatgaggatggaaaagaagtttgcattcaaaagtagaaatttgagagtggcttaaataacagtaccaaacttttaaatttcaggagtgctttgggtttgaatttaataagattttaagcatgtgatatttttaatgatgtcctcttcaaacaggctagtgtttttcaaactagaggctaatgaataggtccattaatgggtggtgaagtcagtttagtgagtaatgatcaacattttwaaaaaaaaaaamaaagtagaacagaaracattggagtacatggcactacagtagaagartaaatattgatttctgagatttttatttcagttttacatagatgtatgtaataggttatgatatatgatgcatttttttgtgttgggttgtagtaaaaagaagtcactgctttgtaccattttgtggatagaaatggaaaatctcacaaaktttctgagacaatgttgagcaatggaaaataactcaaagaaataaagaatttaaaatgattcttattgcaggggagcttccagttgaaacataagttaaatatgatcatagttcttaagtatgtaaattgaatttcttaatccattatctgttctattaggtgatgaaggaaagcctttacatctgctcattggaaaacttcaaaaggcagtgtctgaagaatgttcttattttttacaggtaaaatgtttaaaagtacttttatggccagatgtggtggctgacacttataatcccagcactttgggaggctgaggtggtcagatcacttgagttcgagaccagcctggccaacgtggtgaaaccccgtctctaccaaaaaatacaaaaatcagtccggcattgtggtgtgtgcctatagtcccagctacttgggagactgaggcattggaattgcttgggcatgggaggcagaggttgcagtgagtggagatcatgctactgcactccagcctgggtaacagagtgggactctgtctcaaaaaaataataataaattttaaaaaataaataaaaggtacttttacacaaggagtgctaaattgtaagttgctactaatttaatgatcacccagcctagttttcttcactaccttcagaactgtgcctagaaagtattcctgagtttttaacttaaaatgagcattaaaaattttcctgataatcggtttgaaacaaaagaaattcaggtaaattatctcgcctgtagaacagacactaattgttgatgttgccatagatgagttataaggacaagatggagacatcctgggagacggtgtagagtgagccaaaacactaagatggcacccatctttctgggtcccagtttctttgtctgtaaattgggtgattgtttaaggtttctaaaatcaactstaatgtgagaaaactgcatcttaggggctatgctgaaaatttaataaacttaattattaattgacagtatagtttaagcaaatctcaagaaatctgaagaaatagcaataaacaatttgatttttaagtctagaagttggtggtggtaattttttagttatatgaggaacaaaggtaaaagttatttgagagcttatcaaatgataatgggrcatgtattgttttaaatgatgatagaagtgtctgttgctcaggagaagaaccggaacaaygcgtcaaatattttcaatttttgtgtgtgcatataaactacataaaactattctcatgtgttaggaattttttttttttttttttgagacagtcttgctctgtygcccaggctggagtgcagtggcacaatctcggttcactgtgacctctgcctcctaggttcaagctattcttgtacctcacctcccgagtagctgggatgacagatgcacaccaccacgcccagctaatttttgtatttttagtagagatggggttttgccatgttggccaggctggtcttgaactcctgacctcaggtgatccaccttcctcgacctcccaaagtgctgggattacaggcatgagccaccacgcctggcctcttgtgttatgaatgttaagtatatgaatgttactcttttgcttgatatgatttctttagaatttatagatttctttctgatcagcatttctgaacgtccatccttgtcctgtgatgttttttcaaaggtatttgagattacagagataacatcagaaataggatccaagctaggaagtggttgattaaagtataagataaattttattattataaggaagcagaaaaaattatagttttgtgcaatgaagtttattatcttcctgatataagaagatttcatgccagagagatagatttagacttgtttcttttgcagattgataagggtatggagagaatgttttcttaattatttttgtgtgccattttgaccgccttgcatctaggagaattatgtttaatctttagaagcagaaatcaaaatttaaattccttaaaatacacaattttgttgttaacagactttatgcagtgtccttggtgaatattatactcctgctttaaaatgtgaagtaaatgcagaagacaaagagaattctggtgattacatttctgaaaatgaagatccagaattacaagattatagatatgaagttcaaggtaataaaagcttaccatactattaaacagtatttaatcctcttaaattaattgatgacagatttttacttttgattatgatttaatcacccagccaagttgtttttcatcttaacattttatcctcctttcagattcatgaaatctcatatttaatacacattttaaatttttataatgcgataatggtgatatgaatataattggagctgtccactattgtctgtcctctgtctctctactcctatctttttccttatcctaattcttttaactttttataccatagatccaaatttttaaagttattgtatttattgaataagttcatatcaatggtttttgctttaaaatgagtaagataaacattaagaaataaaaaatatattagtatctttcttaatatagatctgctataagtttgttttaacaaatagtaacatcaccacttttttgatgttctttcacagagaaaatgtttcctagccctgtccatttgtataatgaacaaaatgtatataaattaatgactaccaaaagaaattaacatattttaatatgaaattttcaagttatctttgtagcaggcatttcacatgaatgagatttcaattttyagttrctaaatatctgaggtttacttctagcaggcaatttttttaagttataaataggtgaataatatttattgaaagatgcagacttttactgtgaagtgaaattattgtaattgtttgtttaccatccagactttcaagaaaatatgcacactcttctcaacaaagtaacagaagaatacaacaaactcttggtacttcaaacacgactaagcaaggtctgtgagatggaaaatatattgtaatatttgcatttattgtattgtctgcttttttgtaagctgcttttatcaaccaagaatttctaaagtaagagaacatgaaaaaggagattgggaaaagtgacatatatttgtagtagataatttatattggtaagctgaaagaatttctgcaagtcraataataacccctttagagagtttttagaattatgataagttaaaatatatatatcaacttgtaaactgtgtgaaacaattgcatttaattttacatataatgtaaaattaaagcagtgggccttctgttttagagaaaactggtaatgagtttagttgcttagcatatagctaattagtttcacacagcattatacatgtcaattttattttcaagcaattttttaaaagtctgtagaaaactaggtaagatagtatacatggcacagtgtaatttattaactcttatcagtaaaacaacttaaggcacatattggcaaggataagtgtaattctcatgtagaaggaaatccagaaagatgtctgtgtctatttatttggggtgctttttgatgttcagttaatattaaaatgtttaggcagatttgaaagatttaattgatagtgaaagttataatgttgatgatttatgttttggctgaaattcttcctctccatctctctccccttctttctttccctcctgtttcttcttgcytactctgtttctgtgcaattaagtacaaccttatctagcctttccaaaaatctataaacctactccagtagatttatatgagtagaatctcttttggtttcatctcttattttcttgttcattatggatttatgccttttaaatattctttatcattttaattgagtaatggaaagggaggaggtttatgtcagtaatcacaaatgtaaatgcctacattaacttagctaataaaataaatgaagaaggccargtgaaacctggagaaaacatgcctcatccaaaaggagcggcggctgcccagcttgtgcatcgtgttgccattaagtaggaatcagggcccagtgttgctagtacttttaatctattaattttatatgatttttttttcttttaaaaatattaggaagtataaaccaggcatggtggtacatgcctgtcgtcccagctacttgagaagctgaggtgggaggatcacttgaacctaggagtttgaggctgcatgagctatgattgtgccactgtactcctgcctgggcaacagagctcaagacctcatttctaaaaatataacacacacacacacacacacacacacacacacacacacacmcacacagagaaatattcaaaactaaatgttctgttttaaggttgggaaacagaaagcagccagacaacaacaaaaactgttttgtccccaaaagagcacttttatagactggatttaaagttcaagccttcactttgtaacctcagatataaacacatgctcagtgtactatcttgaactagttttctttttactttattatttctcgactgtagtatttgctgctttctgataacattttcttcccttagcttctgtagcttttcaagcctccattttggactttacctaccctgtttatattaccagggatctttatttgatcctcgtaatctgaatgcttttttcatctactttcattgcttctagatctctatgtttaggtcagtccttctgagctgcagagtcatatatctcatcagatatctctactcaaaaatcttttaggtatatctcaatcagcatattgaaatttgaatttattaactactgctgcttaaaccagcttctcctctcatatcagtttcaaaggaacaacattcaaccagaaacttggggattgtcttagatagtcttctcttttcactcctrgtcttctaccatactgaaatatacactgaagggagtacaaagaatatgaaagaaaaatttatactttgttctcattcagttatacagtcaacaatttttatttttattttactttcctttttttttttctccaagacagagtcttactctgttgcccaggctggagtacagtggcgtgatctcggctcactgcaacctctgcctcccaggttcaagcgattctcctgcctcagcctcctgagtagctgggattacaggcacactccaccacacccggctaatttttgtattcttaatagagaagggctttcaccatgttgaccaggctggtctcgaactcttgaccttgtgatccgcccaccttggcctccctaagtgctgggattacaggcatgagccaccrcacccgacctacttatttatttatttatttatttattccttagatctgaggacagactggtcagccaatatttattatttgctaattaaatgccaggttgttctgtgtactgagaataaagtaatgaagtcactagactgaagaaatgtgtaaattaatgggatttatgaactagtttaaggaatgtcatatacatatatactattttacatatatatatataatatatacatatgcatatataaaatagttttccttggcaacattttagtaggtgtttagaagagaaatgtaaggccgggcatggtggctcatacctgcaatcccagcactttagttggccaaggtgggccgatcacctgaggtcaggatttggagaccagcctggccaacatggtgaaaccccatctctactaaaaaaaaatacaaaaaaattagctgggtgtggtgacacgggcctataatcccagctactctggaggctgatgcargagaattgcttgaacccagaaggtggaggttgcagtgagccaagattgcaccactgcactccagcctgggcaacagagtgagactccatctcaaaaaaaaaaatagaaaagaaatgtagataaatacgtttacttaacaggtagatgaatatagcaaacaggtagatgtcttttctgcacaaggggtaataagaggatatatatttgaatgcagtaaattagctgcaattacagaggcatttcagagttactttgggatcaggatcaggactgcaatacatcactgtgtaaccttttggcttcatcttctaatattcctcctcatttcagccatactgaaatacttagtttcccaaatgcaccctgatctttggcaccctgggcttctttgcatgctgccctttctgcataatactgcccatcccctcccagcctttttggtttgttcctgcttgttccagttggttcaaatgtttactccctctgtgtcatcttctttacctgtctttctaggcttaggcatttcttcctctgttcccttagcaacagtacaggccttgcttatcgcgtttctcttttttcgttactttaaatacttgattacccttctgtccttcttccatgttcctgtagctccttatacacatttgcatttgtatcacattacttttcatgttatataattgtttaccattctgcctctttcactattattctaaacccttcagaataagagaatcttctgtttatttttatttccttctcttaacacagtgttagcatacagtaaaggcttaataaatgtttgctgaatgagttagaaaggttggactggaaacttaataatttacctgatgatctttattttccctgggaactaagaggcaagatcctctgttgaaattactcatggggtaggaattgggtagaggatgtataagagtagtgaacagttaaaacagccttcttagcaaatagctgttttttcttttgctcagctgcttctacagtatcctttgttcatctggtcttgcaagtccatagtctttccccttgcttttaaagtcttctgttatttggatctatcttatttaactagctttatttccccctccgtatccaaattaaaccctcctcaagaagatcattgtcaattatggcatacgtcattctttcacaaatactcttactctttcttccttatagccttcccaaatcattaccagaaatatatgagcctaaatcaaaactgacttccataattactcagatccacatcagtcttctgtatcattgttgttatagtcaaattttatagtttagccgttctctaattgtttattttcccatctgattgatgaattctgtgcaggcagatatattgttattttttaaacggattttatatttttactcttgtcacagtgctggtcacattgattattaagtatttgatgaataaataaattagtacacacaggtatctgacatattgctgcttagttttatgtatttatttatttacttatttttttgaggcagagtcttgctctgtctcccaggctagagtgcaatggctcaatcttggctcactgcaacttccccttcccaggttcaagaaattcacccgcctcagcccctcaagtaactgggattacaggtgtgtgccaccacacctggctaatttttgtatttttagtagagatggggtttcactatgttggccaggctgatcctgaactcctgaccttaggtgatccagccatctcagcctcccacagtgctaggattacaggcttgctgctttttaatagttaaggaaataagctgagatttatctattttcattattttcttttctttttgtttactgtacagagcaccataccatttgtcagttacctggttgtacataggatatatctagagataaacaagctgtattaatcaagtattgctaatataaaatttattatgtatgaattgaaatttcaaagaccaaggtatactataaatattgttatcagctttctaccaaaattctcagaagcacttgtttttgtagtaaaatgaacttcctttcagatatcaaagaacattactaatataatttcagtgctatgaaaggtatggaatattaattactgttacagaagagaacagggaataacttagaagggaaaatgcttgtattagagtgccacaattttgggtggttttaaaaaagcatcttaaatgcagagttgctttaatacagctttctaattgctggattatgtatttatgttactgcttttattctgtggttttcaatagatctggggacagcagacagatggtatgaaacttgaatttggagaagaaaaccttccaaaagaggaaacagagtttttatcaatccattctcagatgaccaatttggaagacattggtaaattttgatcatataccacaatgtggtgtttttatagcaaatattgagtaatttgcttttttactttaaaatgtgagctaacgtagtgacctttggcatttcactgtagcctctctgatctcaattttttcatccttaaaatgaaagatttggactactttctatttggtcctttcccccttcttatgttctgtgattctgaattgttttaaattttaaagatataaaattttggatttaggagtactacagcatgaggatcaaaaagatgatcttgaattgtactatttatgttttcttgttttcatcagaatgagtttaaattgaaaccagagttattaccactaaaaacatactttttcaaaaaagaattaatattttctgtacacagtgattgtgctatttcactaagaaacttatattgaaatgtgcattttttgtctctttatataacatagatgtcaatcataaaagcaagttatcttctctgcaagatcttgaaaaaactaaacaacttgaagaacaagttcaagaattagaaagcctcatatcctctttgcagcaacagttgaaagaaactgaacaaaactatgaggcagagatccactgtttacagaagaggcttcaagctgttagtgagtccacggttccgccaaggtattcatctgcttatagcttcattcaacagtatttgtagctttgtaacaattatagtatcatccagaatggttatttaaaaaagtaacttaagcaaagttgctggaaagagataggatgtagcattttttagaaagaagagcaagagatcattctatatctttgaaatgcctgaaaaaaatgttgatgtaaaccaaagacattataggaattttacttaaatttttacattataaagatgttggttgttgttaatctgcttaattaaatcggcagtgtgcacatatttgcagtttattctgtacctagtctttgctactttgatatggtgaatacttaaggaatataaggtaggatcattccagtcatggcagggtttcctccactttgttgtctcatgttcaaattcaccacgtccaaagtagaactctggctcttctcaaaatttgctccttctgcagctatatccatctgtcgttactcctctttctcttatacctctcttctagtctatcaagacgtcctattttctccaccttcaaaaatatatccaaactgtaccactccttaaaaccttgctggtctctgccatccttttgtctcaactggattaccctaactcccccctaaagtctgttctcaacacagttaaagcaggtgccagaatcttgcttttaaaatttaaaatagattgtatcattccaaagctcttctgtcctacatgatgagtacccattacttttctgatttttaatctcctactgacttgtctgtcactgtcttctgaccccaagatactggtgacagcatcttggggtccttaaacaagcattatcagtatgcttctgctttagggacttctcattggctgttccttctacctagaatggtcttcctccagatacatgcctggccaacaccctcaccttctttggatcattactcaagtgtcatgttctcgtgaggcttttcttaaccattctgtgtaaattaaaattgtctcctagaatgctgattcctatttctctactttattttttctatattacttaatattgtctatttatatgtatgtatacattatgcacattttatataatatatatcatatatataactaggctggtcgtggtggctcatgcctgtaattccagcattttgggaagctgaggcaggcagattacctgaggttaggagttcgagaccagcctggccaatatggcaaacctccatctctactaaaaatataaaaattagccgggcatggtggcatgcacctgtaatcccagctactcaggaggctgaggcacgagaatcacttgaacataggaagcggaggttgcagtgagctgaatttgcaccactgcactccagcctggatgacagagcaagactctgcctaaaaaatatatatatattatgtgtgtgtgkatatatatatatattatatatatwaccaaatatgtgtaaatttggagggggtagattcatttttattttgtttattgttcgtctctggtgaaagackttaagctttataagggtggggctctttttccatttaggtcagtgatatatcacaaacacctaagataattccctgcacataataggtactcaataaattatttgtttaatgaatgaacagtttataatttagttgggaagtatgctatagtatataactagctctataaaaccctcagagatttcttctaactgtggctggctctgctattgtagcgcggatgtcttcctagacacttgctagtaaaacctcaacacagtttttttgtatagtggacgaaatactgaatgtctgcttgtttggaactagtcgttactcttttttatttgaaacctacatatgggctttggaattatttgctttagccttataaagcttccattttctttgagattggtggtttctaaacatgaccatacatcagaaatagtggaggtttttgaactttaatataatttttttaattacttacaatgaaagatcactgaattataatttggagagtcatactcaatagctttgagatggaacttggaaatttgtgtttttaacaatataattcagaggcacggaacccatagattgacatttggaaaccactgctttctgatatgaaacaaaataggtaattaggaagaactttctaataaacagtatttcaagcartcttcctttaattagtgatgctttctgtccaaagcatgaagaaaagagaggcttctggaaacataggcttacattgttattcctgcatttgggcttctgyragctcaccaccctctctcagagtttctataatactccatggaaatgtgttgacaaggcctttgaatgaaaatcattcgtttgctccctgcacccctaccaaaaagagttttactcaccaccgtcctcattcttactaatagtaatgagtcaaaattattttgtgtaaatagcatcacatattttggacatgactgtaacacattttgaatagagtatactgttccctgtgggtagacttgaaatagttaagaaaaataattgaatcattcttttaacaaatatttggtgatttcatactagaaacctctaagagaaacactaaggttggaaagatcatgggttttagtcagacggatctgcatttgaccctgatttgaccttttactggctatatgatcttggacagattatttaaacatttctaaatagtaatagggataataataattacccttaagattgtgaggattaaatgaaacagtaactgagaagagccttagctagataccctggaggtagaattagatgtttatgtaaagtggctgtttccttccagggacttcagtgtaatcactgaaataataattacttgcaaaataatttttcgaaggtaatggttggggaatataacatagtgatataactaaaatgctggaatttaaacccatgtctttgtggcgtttttcactgcacatctgtaatactgcctattagagtaataacagcaaaatggaaatgaaggatgaatatttagacattgcaatggaaggaatgttggaaacaaagcagaggggaaaaaacaaagataactctgtgttgcttgagcctagggaatatggaaaatgaaggtacatcatataaataggaaaatcaacaggggttgcagatagtaggagcttaattgcaagaggggaacaatgaattaagtttacgccagactgtttttttcagtttggagtaataaacactttcaaatactgtaaagcttaaagaatgaagtcgctctccctctccctctccctctccctctcttctctcttctctctctttccacggtctccctctgttgccgaggctggactgtactgccgtgatctcggctcgctgcaacctccctgcctcgggctcccgtgattctcctgcctcggcctgcctagtgcctgggattgcagtcacgcgccgccacgcctgactggtttttgtgtttttggtggagatggggtttcgccatgttggctgggctggtctccagctcctgacctcgagtgatctgcccgcctcggcctcccgaggtgctgggattgcagacggagtctcgctcactcagtgctcaatgttgcccaggctggagtgcgtggcgtgatctcagctcgctacaacctccacctcccagccgcctgccttggcctcccaaagtgctgagattacagcctctgcccggccaccaccccgtctaggaagtgaggagcatctctgcctggccgcccatcatctgggatgtgaggagcccctctgcccggccgccccgtctgggaagtgaggagtgcctctgcccggccgccacgccgtctaggaagtgaggagcatctctgcctggccgcccatcgtctgggatgtggggagcgcctctgcccggccgccctgtctgggatgtggggagcgcctctgcccggccgcccattgtctgggatgtggggagcgcctctgcccggctgccctgtctgggatgtgaggagcgtctctgcccggccgccccgtctgggaggtgaggagcttctctgcccggctgccaccccatctaggaagtgaggagcatctctgcctggccgccccatctaggaagtgaggagcgcctctgcccagctgccccgtctgggaagtgaggagygcctctgcccggctgccgcgtctgggaggtgagcgcctctgcccggctgcccatcgtctgggaagtgaggagcacytctgcccagccgccccgtctgggatgtgaggagcacctctgcccggccgccaccccgtctaggaagtgaggagcgcctctgcccggccgcctcgtctgggatgtgaggagcgcctctgcccggccgccctgtctggaaagtgaggagcgcctctgcccggccgccctgtctgggaagtgaggagagcctctgcccggccgcccatcgtctgggaggtgaggagcccctctgcccagccgcccttcgtctgggaggtgaggaacgcctctgcccggctgcaccgtctgggaggtgaggagcacctctgcccggctgccccgtctgggaagtgaggagcgcctctgcctggccgccccgtctgggatgtgaggagcgcctctgcctggccgccccgtctgggatgtgaggagcgcctctgcctggccgctgtgcaatcttccaagtgtgaagtgacagcctttctgcaggtgtacccaacagctccgaagagacagcraccattgagaacaggccataatgacgatggcggttttgttgaaaagaaaagggggaaatatggggaaaagaaagagagatcagattgttactgtgtctgtgtagaaagaagtagacataggagactccattttgttctgtactaagaaaaattcttctgccttgggatgctgttaatctataaccttacccccaaccccgtgctctctgaaacatgtgctgtgtcaactcagggttaaatggattaagggtggtgcaagatgtgctttgttaaacagatgcttgaagacagcatgctcgttaagagtcatcaccactccctaatctcaagtacccagggacacaaacactgcggaaggccgcagggtcctctgcctaggaaaaccagagacctttgttcacgtgtttatctgctgaccttctctccactattatcctatgaccctgccacatccccctctctgagaaacacccaagaatgatcaataaatactaaaaaaaaaaaaaaaaaaaaaaaaaagaatgaagtcattgtggactaagtagtactttttrgagtttagatcataatgaccggatagataatcaggaggattttctaggctgtgaaagtaagatccaggacataaagccaaggatcagagcagtatatacaagggacaatgaggaaaacagagacaaaatagtaataaagaaaaagcaggaaagggcagagaagaaagacaagggaatgagtttttagaagcatgggatggtcatagaacatgagaaggcagttcacagcaggaaaaacctaaacggccaataacatttgaaagaaaatgtcttctcaaaaataaagacatacatgttctagcaaagttttacaattgttatracccccgattgctgaagttttaagaaaatacttaaatgatactattatgagaataaaattaataaaactttttggaatatgaccctgtattaaaacattaaatattaagcttaacaattacttataagattttattatgtagaaacatccatggaagtgtgccaagatatgtttgtggagatctgtattatagcattgtttgtaacagtgaacagttggaagtaatcaaatggccatcattaggggtttagttatataagttatgaaatgggatgatgacaactttggccaattttggacagaatttagggtagaaaagaataggagaaagaaggttatgtggacaagaggaaggtcaaactaagaaagcagcatagttacacatgaaaatgggtatggaaaattatatttgccagaaatgaaaattataatttgctccttttttttttcccatggatsctaaatgctgatcttaccttagtttttatgacctaagttaagcgttttaagaaaaaaaaaatttttaatcatgtaaaaactacacaatacagatgtgaataccaaaagataaaacaaaaaagtccgaaagtgaatatttgtaaattaagattcttctctttaccacyactgctcctgactgagttccactagaggtaaacattgttactttcgatgtgtatacatargaagataatcaaactttttgtatccaaatatacatatgtatgttaaaagaagtttctcataaaagtgagattttacaaacttttttaaagtcattaatatatcttagataactttaaaaaaaatgttagtactggccaagcacagtggctcatgcctgtaatcccagcacatttggaggctgaggcgggaggatcacttgaggccaggagtttgagatcaacctatgtaacgtagtgagaccccatctttccaaaaaaacagtcggtacttatggttccatatcatacatttgtagtgtaaaatgacataaaattcagttgatcacctggtaaaatactgttattcaattgtgttcttttaagtggaaatattagtcaaaaatatgatttaacttgcaatacctataaccctagactcatttttgtctcccatgccccagtacacattttatgtgtggtgtagattttgsatgaacactaaagcacatatacaactctaattctttaaccttttttatttatattcagcttacctgttgattcggtggtaattacagaatctgatgcacagagaacaatgtaccctggaagttgtgtgaaaaagaatattgatggtacaatagaggtattatatttttaatttttatcttttaactgttatatacactgatttttctatcatttttatgtctggtttactatctaataaatagttgctgagaagtaagcataataaatatgaggataatgccttatatagaaaactcagaatacacatgtaaagaaatttaatctatttttatagcataggtaacacacagaggaagttaagtttgggggttatatttcccttaaatatgttatagtttaagatttatcttgttttttgtaacatgtgggctatgtacaaattagtttcagtgccctggtcaacaaagctttgtcttcccagcatgggaagttggacaaggccatctctagaaaagtgtttaggggccaggtgtgatggctcatgcctgtaatcccagcacttcagaaggccgaggtgtgtggatcacgaggtcaggagatcaagaccagcctggctaacatggtgaaaccccatctctactaaaaatacaaaaaattagctgagcgtggtggcactcgcctgtagtcccagctgctcaggaggctgaggcaggagagtcgcttgaacctgggaggcagaggttgcagtgagctgcgattgcaccactgcactccagcctgggcgacagaacaagactgtcgccaaaaaaaaaaaaaaaaagggtttaggaatccccagaatccaagacaatagggctgggataatagaattaggcctattccaataaggtccgtatggtatataaaaaagttccacatcttttaaagtgcatgccatctaactaaaccaccccctgcctctgctcaacattgtattattctaaatttctcacacctgcaactttctcaaactggcaactgccaaaccctggtcttcactcagtagatttttagctcttaagtcttagaaaaaagtaagatcatcgttcttcctcgctcagtatacagaggaaagatgttagacacatccttgattctgctatactcatcccatgtcatgatgattggtaaataaagaaatactttcatactgagaacatatttatgttttttaaaagtttatggttttttctattgataaaagtaatttgtatttgtagaaagttagatagtattaataaataccaagaagaaaacaaaatttgcttgtaagtttatgagcaaagatagccactgtttaacattttacttaaaaggaaatctgtacacacatatatattttattagttatatttaagtatccttttcccactctagaactgtatgttggcatttataaatatgtaaacatatttctctttgcatctttaagttcacggtagtgagtataattatttggtagaattatttactagaattatttttaattgagagaattaaaatttattttttgctgaaagtatgtagaacttttctaaaaatactgatactttggggagattttgaggtagaagtttaaaaataagtggtgtataattaatgtaaataaatgtcatattttgcttttaaatgtagttttctggtgaatttggagtgaaagaggaaacaaatatcgttaagttgcttgaaaaacaataccaagaacaattagaagaagaagtagctaaggtaggcttatagcttatctggaagattatcttggtttatattccctttgagccttcaaaaagaacatagattttatcgatggtatgtactttataagtttcatatatagttcatctttaagtgattggataatatcaattatagttgcctttaaacaaaatatcttgtgaatttttatttgagaagagcattsttcttgatgtagactagtaattagaagcttttcagaatgccaaaacaagtctatgtatttgttgccttgtgaagaagtttggtcttccttaaaagttgggaagaagataggaaaagaaagagaaagtggttggtcctctgtatatattatctgtatctatttccaatcagagaagttttgttaggtaatgactacagatactaagggaggattatcactgagtattaattagctcctggctaagtgaaggagtttatcaatgtgagttttgctcatctctgtatgcttatccactgtgtccagagtcattctttaatattagccatataccctagtgtaacattatggttccatttgttttgtctttgtattccttttcaaaacgtgtatacctgattggcttttaatattggaactggccgggtgcagtggctcacgcctgtaatcccaccgctttgggaggccgaggcgggcaggtcacctgaggtcaggagtttgagaccagcttgaccaacgtggagaaaccctggctctactaaaaatacaaaattagccgggcgtggtgacgcatgtctgtaatcccagctgttcaggaggctgaggcaggagaattgcttgaacccgggaggcagaggttgtggtgagctgagatcgcaccattgtactccagcttggccaacaaaagcgaaactccgtctcaaaaaaaaaaaaaaaaagatatatgtatatatgaactattgaattatgagtttgctttttttgtataatatttcagctgtcttaatataacaatcccaatggaatatgtgcattttaaagggttaggattgattggtaggatataaaggaaatatataaggaattaggaaaaacataaattcgatgaggaagtcaagacctaaggaaatatctgggccataaggacttattcacttatgcctaaagtgaaaagtgaaacactatcattttttttttatagctttcaatgtctagttcttggaggaatgcaaattttctcttgcatgtagctcttacacaaatttatcaaatggaatggtgtatcagggtatagtaattaacatgaggtttggtattggatataccatcctttaaattcttgttcttttggtttactagatttgtgaccttaggaaagttacttaacttgtgaatctcagcgttttatatgttgaaagaggaaattggcttagtagcaatttttataaggattcaatgagctaatgcatatagaacacttagcaaatgagttgatacatagtaaagactcataaatactattttaaaagtagtcattactgtgataatggtggtaacatgatgatgttttataaagcattactcactcaagctgatagcagagcaccaaagtactggtcagtgatgtaacagacctgcacgttgtgcacatgtaccctaaaacttaaagtatttaaaaaaaaaagactcttctaaatgcagccaagatactgtggtccaagagattatgtttgatggcccagcttggtcctagaataatatagattgttgatattagtcaccagtaccgatgggattatgctgtactctgtacccctcagatatgatagaagaagactgagagccatttttcttttcttttcttttctttttttttttttttttttttgagacagggtctggctctgtcgcccaggctggagtacagtggcgcaatctctgctcaccgcaacctccaactcctgggctcaagccatcctcccacctgagcctcccaagtagctggtactacaggtgtgcaccaccaccccagctaatttttttgtagagacagggttttgccatgttggccaggctggtcttgaactcctgatctcaagcaatctactcaccttggcctaccaaagtgctggaatagcaggcgtgagccaccatgcctggctgagaatcatttttctaaaagcacaaggctatatagaagaagcccaatagtagtgatttccagtatatatcatattagagtcctcctgtgatttgagcacatactactgaaagtagacattcatttacatttcactgttaagcaatgttctgggtgctgaagtataacagagaataaaagaggatgaaatctttgtttccatagaccttacattcyagttggtacagatagacaacatacagatgatgataagtactatgaagaaaaaaagcaggactaggaaaatccatggggagtgagatggtgttattttrtatagggttgtcatggaaggcctgacttatgaagtgacattagaggaaaatcctaaaggaagtgagggagtgaatcaggaagatatcaggttgaggaccttttaaagaaatatgaaagggaaagtcaagagagcaagagaaaaagaaaggtcaaaaattactctaacaggtgtctttaagacacggtcaggagacttgactagagtttgtggaggctgcttgcccagctgctacctctggtgagttggaggacaattcagtttaatcctgcaactcccatattcatggtgaaatattgtgaaatcctggcacagatttgtcttttctgcagatgtaactggatacaggaggaagaaatcagggaaagacagcaagggctcacacttccggtgaatttatataggtagagttgtattgtagtgtatatatctatatatatatatatatatttttttttttttttttttttgagatggagtttcactcttgtcgccaggctggagtgcagtggcacaatctcagctcactgcaacctctgcctctggattcaagtgattctcctgcctcagcctctcaagtagctgggattgcaggcacgcaccaccacacccagctaatttttgtgggtttttttttttagtagagatggggtttcatcatgttggctgtaactcctgacctcaagtgatccacccacctcggcctcccaaagtactgggattacaggtgttagccaccatgccctgcctgtagtattcttttatcatttaatgtctgtggcatctgtagtgttatccctatttctcacctttttgtcagattggctagaggtttattgattgtattgataatattaaggattcagctttttgtttcattgttgtttttattgtttttgtttttattttcaattgctacccatatctttttgatatcctttttctgcgtgctttggacttaatttgctcttcttctgcttttctaaaaggaatttcttttctaatgtatgcatttaatgctatactcgaaagcatagcgttacagctttaaacattatagcttgtaagtatagcaatgcttcctcgtaagcaatgtttaaagctgcattctgcaaattttcattcaatccaaatatattatttcccccgtgacttcctctttgattcatgggttatttagaaatgtactgatttccacatttttatgattttcagatagcttcccatggttaacttaattaatttttaagtttctttgtggtctggcaaaatacctcatataatttcagttcttttaaatttgatgcccaaaatatggtcttttctgggtgaaagctccatgtgtacttgaaaagagtatgtgttttgctgttatttaaatttcagatttccctctggtgccatttttctttagcctaaaaaccttcctttagcatttcttttagaacaggtatgctgacaatgagttcaacatacaacgaattttatgttgtctaattttgaattgtatattaaatgttttgtgttttgtatgctctggatgtcattataattctttgaagaatgtgaattttttaaaaaaataggcagtccacccagttaggttcagactaaaaatcctgtttcttctttcccatacaaatcacctaagttttgacttccctctgcagtctcctagccattgtttactcttcagaattctttagttgttttgtattgtgctcagagtttttaggtaatcagtgggagaagcaggctgtagtgggcttattttatgttgcctggaagcacagtctttgtgttttcttattccacaattcagatgcaattattgccttatagcatcagtatttcaatttacccacattttttttttaaaaaggatgtttacgctctaatcctttttgcatcttaggccatccttttagaatcttatttctttttgaagaaaattctttagaagtttttttttttttaactgattatctattgggagtaaactatgttttttagttgtctttattttatgtctttattgtgtttttatccataaaagtttgttttgtttactgtttgaacctggttagcagttatttttatgccagaactttgaaggtaacattccagtgttttctgatttcttgtttctgtcgacaaggtccttgtcactttgttgttccctcgtaggtaatacgtcttttttctttagcaacatttaagatcttctttttgattttggtgttctcttttctcctttttttttaattttttttattttaagagatgggtctgtcagccaggctggagtgcagtggtgtgatcatagctcactgtagccttgcactcctgagctcacacaatcctctcacctcagtccctggagtagctcaccacacccagctacaaatgtttttgtagagatgaggtatttgtttttattataattcattgatcatcttgaatcttggcagtggtatcttctgtaaatattctcagccattatctcgtgaaatagttcctttccattgttctctattatatcctcctggaactctaattagatgttggttgaccattctctatccttcatatctctgttcttctctttcatatttttaatccttttgttccatgttacattcttaatatattcagtatgaagagacagaggcagatcaggttcaagacaggaaattaaagcaaaactcagtcataaggttttgatcactagttacagaaggttaaaaatatgttttgttaagttgtattctatggttaattatttttaattatctttgtcttttgacattttgccgtaatgggtatatgttccagatgacatcgttgttaccaaaccctggttctttctgagctagcataggcacccagaggtccaatttggtaggtgagatatggtaccaggattatctgggaagaaacagaatggcatataatgtttaaggtgcttgagctctgtatagacacattttgattcaaatttctgcygtaatatttattaaatatgtgacctttgatgtggttcctaatgttgcagcacttgaattttctctgcattggctactggtattataattattcctcaagtcagttttagcattatacttctagacagattcatttagttgtggaatagtataatgttaccttttagaaagtgagcttaggcaagattataggattttgaaccccagcttcaatgatttatttgctttgtgtttttgagtcaaattactccaaaggaggctagcacaggaaccaggtgggaatcaggaccccmgataggtgaatcacattcaggacaggaaattaaaactaaagttcagttatatgacctggaccagcaaggaaaataatgctgcagatcagtaaatacaaatatttctaatcccaggcatactttattctgggtttattacagccagccttctttcattataaattatctatggaaaaaggacttaaagttattgatacggttggttctcaaaggtgtagggacttgtcagagccaaaactgctagtcagaattcctaagtacctgtgctggggtgggatgggaggctagaataagcagggattcaggatcatagttgtagtgaaaggtcaaattggattataatgaaatgtctactcatatttaccagtcatacaaactaagtgttccgcttctgggaatttgttttgaggaaataagaaaagatatgcacaattatataattacaaatatttcatcacactggtgtttaaaatagtaaaagactggaatcactctaaatgtccaatatagagaattgatttaataaacttatactacatctatgtaatatgaaactttgaacccattggaaattacatagaaatgtatttctatttcttaacttgaagaggtatttactatagttaagctacaaaaactggttacagtattagaatatgatcacgtttttataggaaaattatatctgtatctattcatatctatctctgcaaagaagaataagaagatttgggaaagtattcactaaaatgtttacattgatttttcttggaagagagaaatataagggcttttattttctaatttttactgaacatttatgtctgttataataagaaaacattttactttttatttaaagtggcaggcagtaaaataaatactttgacattagatttattgtaaaaagagaatccatctcggtattactttattataggatttctttttgtttagaaccgtgaggccatgcttttttctgtttatacaattttgagtactaatttactttttaaattcctgctgatatktctaaatctaatcctttattgtttgcttttatttctttaggttattgtgtcaatgagtatagcatttgctcaacaaactgaactgtctagaatatctgggggaaaagaaaatactgcatcatcaaagcaagcacatgctgtgtgtcagcaagaacaacattattttaatgaaatgaaattatcacaggatcaaattggttttcagacttttgagacagtgsatgtgaaatttaaagaagaatttaaaccacttagtaaagagttaggagaacatggaaaggaaattttattatcaaatagtgatccccatgatataccagaatcaaaggactgtgtgctgactatttcagaagaaatgttctccaaagataaaacatttatagttagacagtctgtaagtatgcctccttgaatataaaaaacttatttaaaaattgtgaattctttcactttaaaaatattagcaatagtgctgcttaatgtttggaggaggaaaatatcaaattcagtcttatgactcacgttgttttgttttgttttgtttttgaggctgagtctcactctgtcgccagggtggagtgcagtggcatgatctcggctcactgcaacctccatctcccaggttcaggcgattctcctgcctcagcctcctgagtaactgggactccatgcrcgtgccaccacatccagctaatttttgtatttttagtagagacaggattttaccatgttggacaggatggtctcgatctcttgaccttgtgatctaccctcctcagcctcccaaagtgctgggattacaggcatgagccaccgtgcccagccagttcacactgttaatgtgttttattaattgtaagatatatggataagtgacttaatattagtatcaaataaaacaagtctggttcatagtattcttgtttatcttaaagatgttgtacctggtaaaatcccattgtaagttgtacgtacattaattctgtttcaaccaattcaagattaattatactacaatttggtaatatctgtgaataaaagatttgcttaattaaatataacaacattagaaggaaatagctacctatttaggaagactaaaagattttactatctatatcctaattcttgatttatgtacttatttattaatagaagatcyattctgtgtctgtacctcaactgttcactgcctttaacagaaagtaataaatccwacttcttttaacattatctgaattaaaattttttattaatattcaggataggttatgttttgttcagactaatattcaagtaaaattgccaactccaggccgagtgtggtggctcatgcctgtaatcccagcactttgggaggccgaggcaggtggatcacttgaggtcaggagttcgagaccagcttagccaacatggtaaaaccccctctctactaaaaatacaaaaattagctgggcatggcagtacatgcctgtaatcccagctacttgggaggctgaggcagaggaatcacttgaactggggagatgaaggttgcagtgagccaaggtggtgccactgcactccagcctgggtgacaccaagactccctctcaaaaataaataaaataaaattgccaactctttatggaatgcaaaacttgttaggtgttcttcaagacctctttaatttaccagcaactgttcaaagcaaaattatttgtrtaagtaacattcctccaggaaatgatgtactcgtagaacatattaaggagttgacttcttatgagtgtgagactctggaatgtaaagcttttatcttcaaataaaatgtattgaaaattattttttatcagtagttctctgtagtactgtgataaccactgtgtaaattaaatgggtagtttctcatgtttcatacatttaattttaaaatataaatattccatggatattattttcccttcataaaatgtcaagaggaataatggcattatagcttcgttaagagtagaaggaatcttaagtatcttagttcttttttttctattagaattagattaagtctaaactaattgataaatagctgttttgcttttggaaaataatgataaagtagctttatgttgttttagarttgtaattaagaaaaacaccattttaaaaattatgtttttgtttaataataaaatatcacatgctttatgggataaggaatagaattgctttcgtatttgtttacaatattaatgctgacagatttttacaaaatgtgttatggttgaattgtttttttttttttttttactattaaagattcatgatgagatttcagtgtcaagcatggatgcttctagacaactaatgttgaatgaagaacagttggaagatatgagacaggaacttgtacgacaataccaagaacatcaacaggcaacggaattgttaaggcaagcacatatgcvgcaaatggagagacagcgagaagaccaggaacagctacaagaagagattaagagacttaatagacaattagcccaggtargggtcttgtagtcccctttctctccccagttatttttttttccaaacaccaacttgaaccagatccccaattaaaacaacagtattttttatgtagccataatttttttttttttttgccgaaatctgaataaactacatatatttagcatcaggaacacactctatactaagacagcagctttagatcttgttagggacacctatctcaaccttggagtgggcattgtctttctgtcattttatttaactcctttttcaagcactggaaaagtggctacacggttttgtttttttcttttaaatcattccattagccatatatagcaaactcactttgacattttggaaataacattgtgctgaggtgctccattatgcagttactatcattcagttttactatcttcatttatagttttgtgagtccaccaattagcatctcgaaggtttacctttatctgtctttaatccatctttttaatcatgaatggaaatcggaagtagtatgcttctgaaactctttccagggaaacatctcttcttgatttgagaaatgcaaatttatttaacattcttatccctttcttgactaaatttaaatacttcttggtatttgggagctggattcttgtcaactgctgtataaaatatactcacaaaaccattgcagaaaagcaagaaatatttatgtagaagttcttatgaaaacttattgaatttaattttgaaaactgaagctaagagagataataaatatctagagataactattaacagtattctttcaaacataaaataataagataattgggagctgagcataaaacattatttggaaaaattaactttgcttttcttcattgcattttgtgaattcaaacttcttaattttcaatgcaaaattgacaaaaattaattgaactgcacaaattcctgaatatatagacttaattggcttttaaaaaatattttaaattttgcattgatctttgtatatacttttaaccccttacgatggaatatgaatcataagtagaaccagggcctgttggtcccgggggttaaaagaaatctgcttaatatttctaccctttttctctatcacaaacagtattctttcatgaccttttttcttatttagagatcctccatagataatgaaaacctggtttcagagagagagagggtgcttttagaggagctggaagcactaaagcagctgtctttagctggaagagagaagctgtgttgtgagctgcgcaacagcagtacgcaaacacaggtagtatggactttgccccacctaggagcaatggatcaccaattcagtaggatttgtttgtctttgttgttggtatgagatgtattcttttataggtactgagcttaacatatttgtgactgcatgtgtgtaaggtaggtggagtcaaaatgccttacatttcatttaaggtaatttgaatctgacattctgttaacagcaagtattgtttcaccaaagagaacctaacaaactttattgttgcactacagcatggataatttgaacccattaaaattttttatttgtgtacgagaatgttttatcctcttttgataacactaatctcgagtgtagttaaatattataccaamcagtatcaattttgtgcacagaggtttctattttatctcataccaatatagaagaatgacatgctgtttccaagttgacaggttttctttctgtcttctcctctcttcctttacacaaacttaaacagaatggaaatgaaaaccaaggagaagttgaagaacaaacatttaaagaaaaggaattagacagaaaacctgaagatgtgcctcctgagattttgtctaatgaaaggtatacaaaatgtgtactttttcagtgcaaagtaaattaaaatggttgtttcaatgtaatagactttgtccttatttttatcttgtacattgatactttgtcttaaaaatcatcataccatctgtgtatgaaacatgtccatgtatgtgtagtatgtaaaggattttcagtttttcatcattaaatagataacattttaaaaaaatcttttctatataaattttgattggatattaatcacatacttaactgttaatcacctgatgttagcaaaacttttccttactttgattttgtagaggttaatataaaaatgtraaatattaagtgagaatagttatcctacattagtattaaagactttaagcacaatattttaaactttgttttgttcaaatgaaaataatttctttaattttaaattaaaactaatatttacttcttaatttcctccttttccaatttctgtgactgtcaaccctcttgtgtcctcctaacctccttcctcagcttgcatggaggaatttggcccctaagattttggcttccccattggatcatcagtatggaacgcagtcagtatggaactcaaacaagaaagacagtgtatgaaaattagagttaccacggcaatataaaataaacactttgtttattttatattatttatctctaattggtaaattttgaaaactatgcagtatttaatttctaggaatttttatagtaagtgccaataaaatgagtatttttttttaaccaccatattaattttaatcatttctcttaagtagaaatattttcacattattctagttctggggtttggggcttaaacaaaacctcagaacaagttaaggaaataaaacccttggcttcctactaaattagtttagttttatttttagtattcttgattatataagcagagaacttgatctaggtgcaaaaatagaaccgtctctttcacttgacaaatactaacggaaaacttctccatttattatcttgtcttaaaatagatatgtcatgtgcctgtgaaacaggtatcctttagcctgatttttggcaagctcctacagtgtgaagctaaaagataaaactgtcttaaggcagaagacctttaccatgaaaatcttttattttgtctgcatgtataaagtgtgcctttgttgaactgagttgctaggacaagagagttgtttagtttttaagaaaattawtcaggcagtcttctgaatcaccatttatggaagtagctttctttgcatggtagaatgttcatgttaagcaaaaaagagagtgtacaaaaacactttgttcgggatgatctcatttttgtttttaaaatacgtatatatttataagagaggcaggaggaaaagtctagaaatacaggcattaaaattgtaatagtgattgctgaggttttttggtgagtggttagcagtattttccaaattttttaaaataaggattactttttaaaaagagagacacaccaaattcattctagttgaaaacaggtttcttctgccgacttaaatgagtgtggtgagtgtaacttgagaaatttctgtccctggagcagatgtaataaaaacggcctatgatactctctgtggtgttgacagatagtgaaatttcattacagacctttttaaaaacacatcgctgcctaactattactttttgtaatttaaacattcagctcattaccattaacttgtacaaatactaccacataattttttctggtgtgattttaaaattatgtttcaaaatatgtttttatgtttaacatatagaaagatttaaatgtgcaaaatacatatgtataaccatgggcagcaagctcaataacttgcatatgctttggcactaccatactttttaaaacttaaattttgtctcccaagattttctcttaacctagttactggcttaagactttagttatttttttcaagtcaattaaataccgtacattttaaaaaatggtatgattaagctaattggccaaaatttttcagacaaaaacaaatcattttataatatagttacaaataaaaaacaagaagcactttattgtagatgctattgggtwttttaataaaaaggatcatctgttatttttcaaatcaaatattttgcagtgtactttttagtggacataagcaaagtgtttgcttcaaaaatattaaacattttaatcartgcttctttatctatacaggtatgcactccagaaagctaataatagacttttgaagatcctcttagaagttgtaaagacaacagcagctgttgaagaaacaattggtcgccatgtccttgggattctagatagatctagtaaaagccagtcatctgccagcctaatttggaggtcagaagcagaggcatctgtaaagtcatgtgtccatgaggaacatacaagaggtactagttttctgtgttgtggaaacaatcatttcaacaaatctgctgagttcaaggcattttgccatgtgttgaaaatatagaagagaaaataagtattttccagcaaatggaccttcaaacagaaatacattagagcaactcttttcaaacaccattattgtatagcatttgcaagtgggtatcatagagttgtcattatatttacccagggttgccacagtgcctacataaaccagaatgctgttacatttctccaccgataaaagaaaatttatayatcagcacttagtactcttaccagtatctgtgaggtatggatgacatcctgaaaccatcctatagattaaggaaagattagaaataaagactttttaggaacccagcaccagcttcatgtacctgttgaaatggttagaagaaagtcttgataagaaacccaagatttggtgttacctttggactgtcctttgctagattctttcttccttttgaaaaagtgagttgaaatattacacaatgtgtatggatccagagattaggtcctgatatgccagagctgtcttcgtaactctgtcttccttcagctgtgtggattcagctcttctttccgtttctttttttttttttttttttttgagacagagtcttgctctgtcgcccaggctggagtgcagtggcgcagtctgggctcactgcaacctctgtctcccgggttcaagcaattctcctgcctcagcctctcaactagctgggactacaggtgcatgccaycatgcccagctaatttttgtatttttagtagagacaggattttaccctgttagccaggctggtcttgaattcctgacctcaggtgatctccctggtttggcctcccaaagtgctaggattacaggcgtgagccaccatgcccggcctcttctttctatttcttcccatcacattgctgaactccattgkctcttgttttttcaatttctttttccttgtaggagagggaaatgaggaaatcaaaagaggggaaaagttttgtgagatggagaaacataggatgtggactcctggctcacaagatcaagcccacagttcactaccattccacactcaagcacttctcccatagaggcagacctaaaatgccagtttttgtaatttttgagagaattctgtttgttaaatttcatgtggagaaatgaaaagaaattatcccatttatggaaggtttgcctaattataagttggccagtagtgtgtttctaggtacagagaaaagcttgatttggaattgcaaataaaactgatttttaaacaccttagctgagttcaaagatagttttaaaaattgtttttagtaaattaagagctgaaataatactgaattttaaaccttgctttcaaattcactcttttcaaacttggtggaaggatttttcaaattaacttcactcttggttaagctctcagtcacggctattttatttctgcatatggatctttatagagaagaattaggtaacattttcttggtctgataaaagtgtttatcaaattatgctttttaaaaaacaattatttcacaagcttgtttcacttaaccatttagggagggattttgctgttctgctggtaagacctagaccaggttgactgccatattcagaagagactctgagaatgttctgtgcattacagatgtattttgtgcttttgttgttgttgttagcagttctcttagatacttctcaacatggctgccaaagtattcagcagacaacataccttgaaagacagtgaacttacttccagagcactgtctccataaaagggaataaatggataatttaactcaagcacagaggattatatttatgttcattttccatgagaaagcagacctaaaaagacttctgatccactagcctattttcttgcataagtgtatctaaatcttccaacacacatgaaatatgtatatcctattttaagatacagtaatggttttctttccttttttttttccttttgagtctcgctctgtcacctaggctggagagcagtggcgcaatctctgcttactgcaacctccacctcctgggttcaagccattctcctgctgcagcctcccaagtagctgggattacaggtgcctgccaccatgcctggctaatatttttgtatttttagtagagacagrgtttcactatgttagccaggctggtttcgaactcctgacctcaagtgatccaccaacctcggcctcccaaagtgctagaattacaggcgtgagccactgcgactgaccatagttttcaattataagcaattttatgagtttaattctgcagacatttactgagctatttctctatgctctcagctttacagcaattcatagtctaatgaagaagtcattgctattctgattcaaagcaaaatagagtcataatatttaatattttgcctaaaaccactacgtatatttgaatcaactaaaacctttaaaattttagttatttaactgttgaccgattctgaaagaataatattgagataagagaaaaagctaaatccacagttaagaaatatagtgtatagaatattgtagcagagataattttgctaggattagtatcattggttacatttactttccatttagttaactccatcttactgtttttatgtttagcagcagtgtgatcatcttactaataaaattggagcaaccactaatattactgggggacagttaatggatccatcttgcatctttaaggatatattgagttaatagaatttataatttaaaatttttaatttttatataaacctgaaagaaaatactggctttaaaatattaacactgtgttccatatgtaagaattttttctgacattccttcataaatataatgggagcattatttttaaaaatgaaaaacttttgacagttttatgttttttagtataacaaaaaaattaaaccagtctaattgcgaagcaacttttgcttttcagttttcatatatgactttttgttgtaacacttctgatgtgttttcagccttcaggtctgaacttgtttcgattttaaacatgtatggacttgttaacactcaaaaagtaaagaataaagttgctaatatttgcttcctcataagagtaacctagtttatgaaattgaagggaaattttgagctaacataaaatcacttaaacctgaatgaatattagatcagttcataaaaatgaattccccaggttgtgttgaaaaaaaaatttcctttaggtcttcactgtgatgattcagtggttttatgctcacctctcccataggaggccagggatggaatcttgtctgctgctgcctccttttggagaaatgctgtcttatagaaggaatgctaggggctgagagtcatggctcatgcctgtaatcccaacactttgggaggccaaggcgggcagatcacctgaagtcaggagttcaagaccagcctggccaacatggtgaaaccccgtctctactaaaaatatgaaaattagccaggtgtggcggcacatacctgtaatcccagctattcgtgaggctgaagcaagagaatgcttgaacccaggaggtggaggttgcagtgagccgagatcacaccactgcactaatcagaaggccttgttttctttttttctagttcattgtgatattgggcaaacctcttaagtctcccagggcttcagtacagttttctcaactgtcagatccagggtcagactaaagcctagtggtttccattggagccattagagattcagagagcctttggggcagagaaggctttatcacattgcctatcccacttaaacctgaggagtttatcgttacctgtcagggaatgaacatgatataatccataaagttaataactaaaggacttgaataaccatcatttactatgttttaagacataaatccaagaggttcaccaatttgaaatgattctatttaccaaactggatgttctaagattattattggcatcttgtgaagttcccctgctaatctatattatcctctgaatttttccctccaagactggttattaaaaataaagtttagggccaggcacagtggctcacacctgtaatcgcagcactttgggaggctgaggtgggtggatcacacggtcaggagatcgagaccgtcctggctaacatggtgaaaccccatctctactaaaaatacaaaaaattagccaggcgtggtggtgggcgcctgtagtcccagctacttgggaggctaaggcaagagaatgacgtgaaccccggaggcggagctttcagtgagcggagatccagctactgcactccagcctgggcgacagagtgagactccatctcaaaaaaaataataataataaaataaataaataaataaagtttaagcttgatgtctttctcatatttctattttataggatttttttaaatttggttttttcttggaacatattcagattatttcagattgtttatactttcaaaatgttattaagaaaataccttaagctaggtgacgtctttgccttttctaggtactttaatgtctatttttaaaaattagccatttggcttaaaaaagccagaggccttttataagtcactttcacgcaccctctttattttgtgcttgagatttgctcccatctaatacaccataccttcaatcttttcctcatgttgattccttctctatagcccaaaacattagactrtcttcatactgccttaaaaatttaagaagtgttgaattttctcacctttgttccctgctcaaggtaaatttcagcaaactttttttttttttttttttgagacggagttttgctctatcgcccaggcgggagtgcagtagtgcaatcttggctcactgcaacctccacctcctggattccagtgatcctcctgcctcagcctcccaagtagctggaactacaggcacgtgccaccatggccagctaatttttgtatttttgtaatttttttttttgtatttttgtattttttagtagagatggagtttcaccatattagccaggctggtcttgaactcctgacctcgtgatccacctgcctcggcctcccaaagtgctgggattacaggcatgagccaccgtgcccagctgatttgacaactgggaggtcagtgttgtcctctgagagagcagctttggtactgcaggaatagaaatcaaggctggtaaacacaggagtctccatagcatcttcccagtcgttgtcttgtttgtctttctagacaaataacattactaaagtgtcttgaagccgtctctttttgtctgytggaacatctctctcctgcctctctctgatattttttaacacaggttcttttgttagattatgatatacagagacttcaactttgtcttccttctctcactgagtattactcctaggacaaatgtatctacttccaaggtttcaactctcacctttctacaaatgactcctaagtcattgcagacccaaaattccaacagttgactcatcttcacaaatcccattaacacttcagactaatcatttttcatccctactctgtatactttttcctgattttttagtatttttcttaatgatttctctgtcacctaagaatcatctaagctggaagcccagagtcatcttacgcatatcttctttccttgtcttcttctacattgtcttctccaacctgtgctttctcaattttttctcctttaacttacctctgcattgctacaatttgcttcctgatgcacatatttgatattatcttcttattcaaaatatgatttactctttccatttgtttatagcaaaacccctaaggttcctataaaatttaagaccatttacaacttgaatccagcttactttccagctaccttcttttagctctctcacctacctcaccactatttctccatgtccctttgccctaaaaagcctagagttcccatcgtatcacactgttccctttgcgtcacatttctgtacccatgagaaagaaaatgttactagaatgcatttaatttctcacataaagatgctrtaaattccaagatyatcttgcacttctaaatgttttcaaggcattcaattttgagcacatggagtaatataaataagtaccagtgtagctgatgtgttttttactttggagaataaggatacaaagtgaaagttgtatttactgttaccttaagaattagataaacctgtatataatgggaaacatttaaaatcatgccttaaaatgcaattttgggctctacagccagtgacttacaaagaggacatgcttagtgaatattgaattgtgctgaattcaggtcttgcgtctgaagctgtatctgatgtcattactacatagattaagaaaatrtggcaccagctactttagcaagacaagttctaataagtagctcttattttgagtgaatgtgtcaaactgaatgcttattccaagcacttggtacatgaagatttcctctgctttaattggttaactttgtacagttactgataacaaatatgtactacatgtaataaaagaataggtaatgcctcttcaggaaacttcactgttgagttgtaacatctgccacaaaggagtatttaatggcagtggtgaatagcctatgcttttattatagcttagagaaaatacttggaaagcttatcttctacccatgcaaactcatttttttttaacataagaaataagaatagtgtgggtaatgtggataacaatgtccaaagttaaattagacctgctcatcagtctaatcttatcccagtattcctcttaaaacagtagcaagcaacaaaatgatctcagttccttttactgtgtagccaaagcagatgatattgcccagtgttggatcaaaagttagtcatcaccagataaattcaagcacttatttctatcctgtactcccaatgtaggctcaaaagtcagtctgctcccgaaaaatccaagcacttatttctatccctctgtacaatttgaaatggcctactccacaatgcctttcttttcttgtgattgtttatgtgtttcctcattacattgtaaagtcgtcaagggttggagccagatcttgtcacctatatgtccctattacttagcaaactccacatagtggacatgtagtaaatttctgttgaaaggtatcttagaagtttttatcaaagaaaaaaatactgaattacccacatgatcaatttctgcaaattcctattagcataacatttctcattcttttgcttggttattgaataatattatatcctatatttgcatattttatttgtttggttgcaatattgttttaaaagaccttacaatttccatgatttccagtttagtttgatgttgttttataactttaaaaaattatgattattataattaatttatgcctttaaaacactgttattctagttacagatgaatccattccctcttattctggaagtgatatgccaagaaatgacattaacatgtggtcaaaagtaactgaggaaggaacagagctgtcacaacgacttgtgaggagtggttttgctggaactgaaatagaccctgaaaatgaagaacttatgctgaacattagctctcgactacaagcagcagttgaaaaactcctagaagccataagtgaaactagcagtcaggtaacctccttatattgctaatatgtactgagtttgaagtacaatatactatcccactctctcgactgagctaattttgatattttcatggatagctgtttggcattttcaaagcttgaatgcatatgcatcttaattatccctttggttgtatgaaagttgtatagtataaatgattctatactgaattcctacatgatcctgcttttgttttgttttggtttttgcttatttcaggtatattagtatttaatttttgtgatttgtactttcatatatgaaaacaactgttaatactttttgtttcttaaccgctattaagtacttttgacctggatctcagccagtgttaatgctgttgctactacttgataccattgtaaattataagcagtttagttaatgcaacatagtatttgtcttttgataagcaacgtgaaaaatgttaaataaatcagaagtggtcagtggttccaataggctacttgttcttaacaggctactagagagaaacttctccaaaatttgttaatgctgccaacagtcaagcatgtgggctcctcctgaaacattcayttccccaggccaagaccacagctcatagcagctgtctgcttatgtgaccaggtagtgaagtatagtaggagtctgaccatggcattttccagatttttcccaatttgttgaatactaactccacgctgtgttatttagcttcttctgtattgtggtaatttaaatatcactgaatggatcacaaaagctttgtgtagagcagtaaccctatggcagagacttctcaaagtgcagcccctaaccagcaatatcagcatcacctggtgatgtgttcaatatataaattcttaggccccaccccagacctactgaaactgagggcccagcaacctgtgtttttaataagtcctttatatgattctgattcacactaaagtttgagaaccactaatctgtggattattagtacaatgttcacattgttctctggcttaattttgaagcactctactaacatcttttatataaaatgttaaactagttgttggcattaggtataaaaagttataaaaatgaagtatttcttaagtgaataatatttttcagcattgggagtaggcgtttttaaaaactttcttttaaatgaatttcagctcagtttttaatcttccatggatagatgtttaaagccattgatttcttcagaatagtctcattgattaataactaaaattatcttgaacctgatgaatatttttaacagattgacacagaataatgtgtaatatctttgtgaaataacttatattccactttcctcttcaatgtgtcattatttggttctactttataatagtatacttccctttaaccttcattttttttttcacgtattataacaaaatgtaaaacagctgggaggcatgctgtaatatctttgcgttttcagtgaaagagaaattcaggaaaatagctttgtacaggatactctgagaccagagaagagagcaacatctgacatgttagagtgtggtggggaccaagtaaagtttacttgggasttgatgcttaagatgtttaagatgagttattcactggcaaaatttttgaatatcagggcactggacaagtatctgccttataggctgattgggtgatttcataacctgtattataggagttatttactttagatatttgatttgaggggtaacttgcccagtggtatgtccaagtccatattatagtacatttattacaacggttttacctctcttttgcttggacaggctaccatrcaatcaggcctatattcactttattgttaggttcctactggttggggtagctttcatgatagtatgaaaaagaatgcttaagagactgtcataaggcccttagagaggtaatctctttaacacaatccttattcagtagtctctttgtggttctgcagaaatgttatctttgagagtgtggtttcacagattctaaactcctggatcaggtagaaatcaaaaccattctcttctttgggagtagtttttcagcaattaaagttttccagaatccagaagtattatttagagccataggaggttatttaccaagagattctgctaggccttggaataaattaatgaatatgtaatttattcccatggaattatttttactgtaagaaatttttacgggcttcctaatacttgtttttaagaattacagcatcaaagctacatgcttctatattttctcaaaaaaaggaatctgaggatgaagcagtagtataagttaagattttgttttgtcattgttgtgtttgaaacataactgcaatcaaaatactgaaacacattttgccttcaagtattgtccccagtatgcttagcattggtctaggctccgtcagggtaatgtttgcaggttataggccctctgtgaaataacttcaagaaatagatgaacaaatcaaagtccaaaagagagcaacaaaagtgttttacagtttgaagaaataatttatgaagaaaggtagttaaatggtttgacattatttgatttaagtaaagctattttgtttaggaaacaactctatgctgcaaattaatagccttcaaatatacattaaaatcttgattatctgaaacctggcgataataagctagtctggataattaaaagtgtgttcttctaagtcattttattataactatttttgattgcaagaagttttatgtgctttctaaaatagagggggaagcaagatagaatataatttgaattattctaattcagtcacctttctgaacatcaattaatatatcatcagttaatattactgttgttacaagggctgtatgccactatcctgaatcatctttatttaatactgctcttttgagtcttttttgccctaattttactttattttctttgtgtaagcttcttaccttgacctgtgttcctaatataactacttacctacagatttttgttttacatggatggaagcaagttttacatgcttccaaaaatgggtgaaacaatagacaataatttcagttattttaattcatggtcatctttctgaacatgaattaatatttaatataatactccatcagttaatatactgttatgagggctgtttgccctattctgaatcatctttatctgttacttttttgagtccatttttctcagtaatttttctctcttatctttgtagttagttcttatcctgaccgaaatgttaactgtttataaagggttgtttcttacttacagattttgtttttgcttcaaataagagaaactagatatcagattatcaaaacaaactgtagtttgcagagggagcagggaaagagtgttttaagaggtatttgataggctaagcatgggtccccacagttcataaagctgagcatctgggatattgacaacttctatctgccaaagccccactaaagtcacatttagctgcagcagtgataagattaggcctctatcttgtataggtgtttattagggtttcttatgcaaccctccagttaatctgtgaacgtgctttgttaagacaccttcacagactaactggagggttgcataagaaaccctaataaacaaaaaatttttattgcctagtccagacttgtaagaggcaactgcccctccacagctacaagccatctccctgtagattctggctttctatagaaaatgtcattttctctgccctaattattagtctacctactgtgaaatggtttgagtactggtttaaacaactttatagtgtgagtagctgtagaatggatttgtgttggtattacctaccttctttagcatgggtttttccatttaaataaaggctttgtggatttaggatatttagttactggaaagaataataccaaaatgagggttttttcctttctttaaaacaactttcattattgaaaatcttttaatattaaaaagtaagttgtttatcttctaaaattctgagtggcttatttattcactattgcccaggtttctggagctacccagaaggctattctatataacttgggcttttaargtttagtcagggttcataagataccttaagtggtatagttttcaactgttacatacagtgtagctttaaaaagaattttttccttagcatgtactctgtaaacaatatgaaaataggttataactgaaatgtctatagttttagtggctgcttgaaagatgagtaatatttctaaggaaatagcaaaagtaagttttaattttccagaaataactttgattattttatatacttgaataacttattactaatgtggactcaagcataattaatttcacatttttaaattaaagcaattttttaatggaacggaaaaacaccagcttatcttacaaacattataaacttgtctaaatgccctttcaaagccctgacgtggaacttggatcctgtctggcaggcttttttgtgggcrtattaattcacattccacctgtcagtgtacctataggtaaagacattaaaccacaccctctgttctgaccttttcctcaggggacactgactagaatcctttggctcagcatgagaggctatttgaatagctcagttcagaagagcttttccttttgaatagagtgaagcagcaagagcaagagaaataatgttacaactgcatttctcaagactgctgctatggagatttcaaacttgaccttccctgccaggttctgctttgaaggcttacttattactacagacatcgctgatattaaaagcagttttattgctcgtctaattagatgtttatatttttattcttctcttcaaggacttaattatgctagtttaaaaggtgtttttgtttgcttgcttttatttttgttttttgattttttttggtttttgttttggtttgggtttttttgagggggcatcaagattgatagagacctaagtttttttagatttgtagtttttttcctggactttccccttccttttattgtgcagttgtatgaattaattttataacrtttatttgatagtgctaaaaaagaaactttttatactgctatggtagatcttgataaactaaaaagaactttttaatgtattagaaaattgataaagcaaattaggaatctcggcagctgtatcttctgggatggattcttatarcacctatttggcaactgtcaaagtcagtggctcgtggttagaagagcaagatgaagacatttatgaggttgaatctcgcgtgcctttaccacatccttttcctctttgtgaacatttggatgaaaataactcagtaattgttaatacttctattttccattttattcataaaagaaacgggcatatatkaaagcttatttctaaaatttcactgcctacccctccttattcagtaagtataaaaaatattcatttagttaaacactataatgagaaattaaattttgagtgtctatattaaggctaaatgggatagaaccttgtttgatgcgttactactcattcattctagatgtatttaagggctaaatttggtctgagttccaacttggctatgtttacaattacagaaagcagaatgagataatattacatttctccaatgccaggcagtttgtttaaaaagatcccgcttttccttaagattcttgcttttgtatgtttatcatgccaatcctgaataagaatggaataattattatatttgagagactcggtattatgatacttataagacagctaagtgaattgtcattgagcaattaggaaatgtttacaatcatatgttatattggctgttccagtccaggaaaaaaggaagcttgggttctaattttaatattcttaacaacctaagaaacttactttttgtttttaatatgcctcgtaatcttgtggaacaagacccttttctgctttttatatgaaatatattttataaacattgttaaggataagtgtttagcataaagaggcttgaatatttagtatttcaggttcactacaggttattcagtataactaaaagttattcagcgctttttatgactttcatagctttatcctgtactagctaatatttaacaagccagatggttttcagaatagttttgttacctcttctgcaacttttatattaaagtgacagaatattaactgatactttacatgtacttttaatgtaataagtttcttaaatactttggaaatattgaatatgaaatcttacattcttcatattgttatagatattaggaataaacatactctaactgaatggaagaggattctttaaatattaagtatttaatgaacatttatttgaagggtgtctcatctcccgatgaagtgtggatctcatctgctataataaatgacatttttttttgctagatttactgtatttgattgttccaactttttcattttattttagaaaacaagtttttctcttgtggttttatgataaatatttaaatggattataaggctgattaaatcttgtcaggaagtagaacatagaagcaaaggcttatttaatttacttacctaaagcaagcatttattttgttgtaaattctttgttatatccttatagtaaatttaaaaaagacaaaaaaaagcatatcctttttagttacatgtatttactagatagtcattatgtaatgaacagaaaaaaatgacaaacgtgtaaaaacaattgatatgtttttaaaatatggattgtgactgtaaattcccatgtagttgtatataaattagttcatactttattgttatgtttctttgtaataaaaattaatgatattagttatccagactttaaaggaaaaactctttccagttaaaagtaaaaatattccttttgagataacaacatattatcatgggtattttaggaaataatttataatttaaaatgtatgattaattttctattatgagtcttatacgtgtattcatattaattgcaaataagttataagtgatatttgaaatatcctattaaaasaagaataattgcatactggatattttggaaattgatttagagtagccatcaaaagctgtagttactctaaaatccatttgctatgacaaatacckctcagatgtgaaaastggaagtctttaacaataaagtatcctttagtattatcatgattttgtaatacattttcaatatgtgactataaattagaaaccactacatttgatcatattttaagcttaaaatgcactaatatctttttaatgcacaaagtactttatatgtaaatttacaaattcttatgactttactgtgagcctgttattaatatatgtgatgatttcttcttacaatttttggactaaatactagaaacatttgagttcaattttttcccatgtaattgtttcagtaataacagataagcaggtgctgatagtcaaaagctcagaaaactaaggcagagacagtacttttctgcaatttcacacagctcatttagtagcagtgatcaagagagctttggctttaagccttctatcatcttaaaaaattgtttaagaatgtagtcagtatgtgctattggtaatattttaaggaatctgtgtttatggttaatgtctctgtattctacggttttgaaaataagctgaatattcataggagctttaggtgtttcacaaatggacagaaatataaagcttttagttaagtacatggattataaatataatttcattttgttgtgctactatcattttgttaattgatgccattgtattaatcatgtattattggtcccccacagtatacagcagatactgtaggagtcacaatccgtaaatactaaatgtagaagaaagtttatcatagactgtatagttacataaaattctttggcaaatacaataaacgcctgtgcttcattaactttatatcttcttttatatgataaagtacacagccattgatttaaagtggtttgtatccaaaagaagcatattcttttgttcagtaaagctagaatacatcactttacagaaagtcgtgcacagccaatatacatgtctcctctgatttctcctacctgctaatcttagcatacactggcaatatctaaatgactrcaattcagtagtatatctttattttaaaatcctccttttttccagctttaatagggaatgaaactagtatttccacactttattttcttttatgtattgtttccctctttgtttagcttgaacatgcgaaagtgacacagacagagttgatgcgtgagtcatttagacagaaacaagaagcaacagagtcccttaagtgccaagaggaacttcgagagcgccttcatgaggagtccagggccagagaacagctagctgtggagctcagtaaggctgagggtgagcaatttgccattgacaactaagggtagagaaatttcagtcttaaaatagagatttttgatgcacagccaggtttggaagccgtcaatccaatttagaatgaccattaaaaagtacttgtggtttatcttcagagttcctccaagcaatttttaaaactatatatatatatatatatatatatatatatatataaaattataaaaagaatttatagagttacagaaaataataatttcagaaaataccaaaaaggatagtggtgactcgttactgtaatcacaccatcttaagacaacccttgtaatttaaagatgagcaaactgaagckaaaagatgttattaaattgttaaagggcacaaataccattacatagtgattccaggctttgaatctctaaagccctatgctctttttaattctcctctgctgttatgggtgttggccttctaaaattacttaaaataccaaccttctaattttcaaaatgtgattcagttcacaagcatctaatttgtattaagcttttcagaaacttactgtttatatctgtttaataaagtgacttacacctacataatgtggtactttggtatagcaaagtattagaaaattcagagaaatttcatgtttatgcacaatggtaaacaaggaaatgtctgcattgaccataccctattaaaggttgatagttgctgtgatgagcagcaaattcattcaagacttttaataggttggaatgatggaaagttttgctaacagtataccttttgttgtttatattaaaacctagtggttgaatttgaaatgaataatagttctattttctgttaattttgtattataggcgtcattgatggytatgcagatgaaaaaactctttttgaaaggcaaattcaggaaaaaactgatataatagatcgtcttgagcaggagttgttatgtgcaagtaacaggttgcaagaattggaggcagagcaacagcagatccaagaagaaagagaattactgtccagacaaaaggaagctatgaaagcagaggcaggcccagttgaacaacgtaagtattttcagaatttgtatgaaacagtcctctgattttatttgtattcttcaaaggcttaaggtggcttttttcctctttcagtgccattattcatatattttatagagagatttaaaaaattataagaaaatctaccttakagataaatgtcttattagccaatcatgtggaatcaggttttttttttctttttccttaggcagatgttaacaggaaaagatagttcttcatttatcctcaaacttctgcttcaagagaaagctgcaaataatgaggcaggatattttaaaaattgtgtaaggtttagttctaatagcagagaggcagcaaaaatgtatacttggattaaatatctaaaagcactgatctggcactagtaatgagcaggtggaggggttttttgacttgcaagcagagtagatttaaaaaggtcagtggctggtaggctgacatctagtttaatgtagtaggaattcaaataatacttaaatgtttaagtaacctttcatttttccttaaataagatattaagtaatatcttgaagtgaaagtttgtttagcagtaaatgtcagtcttggtaatgatggaactttaatcctgtttaccatgtcctctcacttttatattacacgtgcagttggatttttaaatgtgccgtttcactgatttcattttatcggtttagaaatacagcatacatttttgtaatatagtgaagtttcttccagctgctcaaattaattaaacaggtttagtttgggatttttaatatggaaagtatatgtcatatatgcaaaatattcaagaaatactggaacttctcaaaatgttaccagtgataatcagtgtcttcarctcttgtttttgatacgtgtgtgtgcatgtgcattatcccattttaggaagtagaagacatataaattatacttttgttgtgtctttttttttttytttctctattttcctaggactagtagatgctgcagtcgatgcagcaccaggagcaggtgtgtgtataccattgcatggccaatgtttgggtggtagactttaaactccaaaatgtgggtgacctggattttcagccaactaacatctctagttttgcagtgttgctgttgttccatacttacagtttttctctttaacaacaacaaataaacttttcttacaataaaagtacaaattttcatttgaaattaacatctgagattcatactgaccatcatcttatgatgtctatttttgcatagagcttaaaaccattttgatttttgtttgtttgtttgtctgtgtttgttttttgagatggagtcttgctcaatcacccaggctagagtgcagtggtctgatctcggctcactgcaacctccgcctcctgggttcaagcgattcttccacctcagcctcctgagtaactgagactacaggcgggagccaccatgcctggctaattttttgtacttttagtagagatggggtttcaccatgttggccaggctggtctcaatctcctggcctcaggtgatccgcccacctctgcctcccaaagtgctgggattacaggcataagccaccatacccagccattttgagttttttaagaaaccatttaacaaatgtattaaactctttcaatctatgagtttttaaaatgctccttctaaatcaggaagtatgtaagatgatggtagcaaaaggatcagtgaaatttaataagaggctctctggttgatttatttttatgttaacatctaatgttgttttaaaaggaaagctgttttctagagattcctagtcctgagtacaatgttggcatactagttaaagaccctagggatatgttctttccattttcttcattagaagattgttttatttttactatatacactttgttatattaataatattaatagctaacacatagtgcttaccatacctcagacactcttctttacatgtattaactcatttaatgccaaaataactctaagagatcagtaataatattattctcagtttacatgtaaggaaactaaaggacatcatcataactgtcacatgggagataagtggctgagctaggttgggcctacggtctgttcttaagcactacaccacactacctctcatacatgtcagttttcccttgattcacatacatgtgaccatgcaaaagcaactcaggaatatggatctaataaggagtaagactaacaggaaatttcaattatagctgtatttatatttctgtaactcttagacttgccttggttaaagatttacagtgtttgatcttcatgtttattgtgtatgcaaataaaattgactttatgggtttggaatgaattgctttttgcctgaggtgaagaaaacggtgagtttttttctgtgcttgaatttaattggactttgttctttgcccagtagtaaaaatagattttttttttttggtcatttgctatgttgttttcacaaaaatattattttcagtgacaggacatattttttgttaataattctgtataattttattaataattgcttgtttacttatatagaaatattttaatataattttgatactttcataagagaatatttactttcatgtgtatttaaaataattctcagcctttcatgaacgtaaaatttggacatagttatcagggatttcattatcataagatcattaattgtgatttaattcagtatattttgtattaataaacagaattactacaggagacagaaaaattaatgaaggaaaaactagaagtacaatgtcaagctgaaaaagtacgtgatgaccttcaaaaacaagtgaaagctctagaaatagatgtggaagaacaagtcagtaggtttatagagctggaacaagaaaaaaatactgaactaatggatttaagacagcaaaaccaagcattggaaaagcagttagaaaaaatgagaaaatttttagatgtaagtattctcaagttgaatactgatttttctcagtggaatrttctttgctagtatactaggctatgaattttaaattatgaaaagactgttgagttagtttttcagtgttttattaggtgtcgaatctactaatcgatcaaaaagtactattccaatttaagattccaataatttttattgtgcagcactcagaattaaaatcagtacattttattatgtattgaattatacatgataaaaattatgaataagccccactagttttccaaattcagatcaggagcttattctagttttttatttaaccacagactaagataggcaaagagataatgggccaccactgcttcacctgtaaaagatacacatagaacagtgtggccattggaaatgggcccggaacagtggtcatgctgccattactctcttccaaaaagatgttaaatctctaatttcacatttttttttcctttgagatttcacttaagcctgatactctcttcatagatcagagaatcagattcttactcattttataactttagacataaaacctagattaggattcaagaaactgatttaccaaacaatttgttttatggattttgtttaatggctaaactaacatggaattcctcctttgttccagaaaagtaaattcattttaaggtgaatattttttcatcctgtatttaatattacttgaataaaaaaagaaatgtacttgaaataatattttaatattaatacttgaatttttgttgaggaggccaaataggctatatggcatataaaaaataaaatgttatcttttaaaacttttgtgatttgggatgttccatgatcatcagtcctttgtcttcaaacaaaactaacatatctctaaaggagaagtaagaaataatagcttctctaaatactgtttcttcagctactrtcattattgtcattaaactttaggagcaagccattgacagagaacatgagagagatgtattccaacaggaaatacagaaactagaacagcaacttaaggttgttcctcgattccagcctatcagtgaacatcaaactagagaggtaagaacttcactgatattgcccaacttacagtaatttgtatcaagtgtaaaataagatgcatatcattaaaaacttaaaagtggattctttcctttgtatgtaaatcttcaaaatcagaaaacttaatattacttaagcatgagaaggtaattaaccctgaaaattgttggtattgaaatttggaatcatttccatctgcatatgtcttctagtatttctcaattaaataaactctgtttatttctttattcccattcctaacaaaagtgatcaagagagttatctgtgttcactgtttactttcccatttccttttctcttactagtccactccagtgaagtatccagcccttgtttctcagtagggttataccttctactccatttaaattgttcttgtgaaggtgacccagagcctcatggctatggctaatatccaactctgtctccatcctcctcaaccattcagaggcatttattgcagccttctcccagaaatacttccttctcttgtttctgtgacacagctactccactggtctctctcctctagtctttgtttctccttttcctacccagcataaatgatggagtgccccaaaacttactcttgggcccctttttatttcctatttatagcctcttcccaggcagtcatatataaatgcctccacatttgtatttctatctgtgacatttctgttaagttccagcattggatatccagtgcctactctgtctctgcttagatgtctcaaaattaacatgtccaaaagaaaggtcttgattcctgattagccactaccagagaaagacaagcataaaacatttttcttcttcatctcagtaaattctgtaccttctaacctgccccattgctgagaactagaatcagccttgattctcctttctctcaacccctgattccaacccactgatgggtcagactgcactacatctttctgttatttgcacttttattcatcttcctaaatcccacttgtcacttgtttgcctggatcactgtggtagcctcttaaccagtctccctgcttctcctttttcaccccaactgcccattttcctcatagaaacatagtcaaaactccacatttaccaaatgaatgctacataaatgagagaggattcactgtatgaatacctaaagatggcttgtcatggtgataaagacattgtgcttagggtaaggcaatcccagtttgtatcatggctctgccatttactaggttatgacaataactaagtcagttaacctctcaaatctctgttaattcatttctaaaatagagattgtaatagcacccacatcataggagtgttgacctggcacatagtgaacactttaactagtattatttctgaaacaatttttatttcgaatgtaatttctaaacagttcagtggatttcatttctcttaaaagaaagccgaagaagtacagagtgccaataaactccttataataaaatgttgtatactagagtagtacaaaagttatcagtctccagggctgggcgtgatggctcaagcctgtaatcccagcactttgggaggccgaggtgggcagatcacgaggtcaggagatcgtgaccatcctggctaacacagtgaaaccccatctctactaaaaatacaaaaaaaaaaaattagccaggcgtggtggcgggcacctgtagtcctagctactcgggaggctgagacaggagaatggcatgaattcaggaggcagagcttgcagtgagctgagatcacgccactgcactccagccttggggacagagcaagactccgtctcaaaaaaaaaaaaaaaaaaaaaagaaaaaagttatccacagtttctagttattgccccatttctgacaaacatatttttggcttttaaaaagtagtcgtttgttgtacttcaaagaatatttaagctctagaacctaggctgtcatctcctattatgtagttttcttttatttgaaaaggttggcctgctttgctcatgaaactttaagaaactaacaaagatgtgcatgtttgattttttttttctactgttgcaccattttattgtacctacattgttgccttttttcttaaccttactccaaatcttagtcaacttattattattaaagtttctcctcagcagctttttttttccttttttttctttttccctttaaaactgactgcacatatcagtgactttattgctatcatccttgaacctgaaattatagttaagcttgcattcttttaatgttctgagaaataactgtcattttttagataatttcctcagaatatttcactgaaaagaaaaggtagaattactttatttcttaccatcacatgtcgctttttttaaagtaagctttccttcctcactttccatacagtacaactaatccttcctgtcacagaaccattcacttgaagggatctccatatcattcttagggaataggtcttggcatgcatcattattttggttaaaggagaaaccaagactagagacatttagggaaaccttcaaggtgcacagatccctctcacaccccttcatccttagctctttcctgggctgatggaatgtatagattgaaaaagctttcccaatgactgttttcaaaatatagtccataaaagatttatttaggtcattttatctcatacaagagtaaatcagtacctgcaaatttgtcatcttcattaggatttagtgtggttgtgccattagataattcagccttatgaaaaatccattttttcccctcttcctaggtggagaaagtcttagtcttaagagaaagattttttaaaggattacgtgaaagcaatattacttgtggtctactagtgttgcttaattttttcaacttgtaaaatgtcacctttgttggagacaacagttgctatctttatacaaagttaaattagcataacatttaaaaatactttttagaaaaaaatttttgaaatgaagatatgttttatatgcattgagtattctttaaaatgcttgagagaagtgtttcagatttcagatattttgaattttgtaatatttgcattatacttacctattcagcatcctaatttgaaatgtgaaatgctccaatgagcatttcctttgagcatgatgtcagtgcttaaaaagtttcagattttgacctgggcttgttggtgtgcatctgtagtcccagctactcaggaggctgatgcaggagaattgcttgagcccaggagtttgaggctgtagtgcatgacgatcgtgcctgtaaatagccactgcattccagcctgggtaacataatgagactccatttcttaaacagacaaacaaaaacgtttcagattttggagcattttggattgtagatatccaaaatgagggataactcaacctatactaactagcttgctgaaattttttttaaattaaattttttgcctcttatatttcaggttgaacagttagcaaatcatctgaaagaaaaaacagacaaatgcagtgagcttttgctctctaaagagcagcttcaaagggatatacaagaaaggaatgaagaaatagagaaactggagttcagagtaagagaactggagcaggcgcttcttgtgagtgcagatacttttcaaaaggtgtggcattttatttgggctaacttaataagtgttttaatgaagaatactcttaaattgtcaacttcttgtaggtattattacatattatgtttatatctctgttgacattgtaaccatttctgtttgttcttatttccaaatgttgcttgcatgtcttagtcctgagaagggaagagttttttgttgttgttgttgttttgttttgttttgttttgttttgttttgttttgttttgttttttggagacatagtttcgctcttcttgcccaggctggagtgcaatggtgcgacctcagcttaccacaacctccacctcccgagttcaagcgattcttctgcctcagcctcccaagtagctgggattataggcatgcgccaccacaaccagctgatttttgtatttttagtagaaacggggtttctgcatgttgatcagactggtctcaaaatcccaacytcaggtgatccacctacctcagcctcccaaagtgctgggattacaggcgtgagccatcatgcccggccaacttttttattattcactaattagaagtagactttctacttctaattggagaaacaggattgctgcttctcaaaaaaaaaaaaaaaaaaagcagaccaaaaaacaaaaaaaaactggataatcaggatttaatttatcaaattttgagaaaatttttatatatttaaaggtagaggaccgaaaacactttggagctgtagaagctaaaccagaattgtccctagaagtacaattgcaggctgaacgagatgccatagacagaaaggaaaaagaggtaaggagtttatttttaaatgacacagcgtggtttgaattattttaaatcagttaccttgaaaatattatttgaactgaatgtagtttatgatctaaaaccaaagttgaggctgtttctcagctcaatgccaaaattgaccttgaaggcagtaaacatatgagtaattaagctgacgggaaagaagagtgctccagatagagagaagagccagtgtaaaggccttgaagcaggacgaagttcggaggaacaggaagaaggccagtttagcaggagtgtagagggtggagagatatagtagtgttaggacaaaaggcaatatatcccttttctcctaaccgtagaatacatattgaattattgctgctttgctgtgtggttttttttttttttattgtattgccctgggagattatagtcctgttttacaatatacagaatatgttcttaaaacaaaaagattaatagtaaattgctttaatagtaaagcaattaagcaattatataaagttctcctttgtttctctgccccttcttccaaaaaactaaaaatctrctttcagaacaatggtcacctcaacttcctaatttataacttatttaagcctttgtctactaatagtttttaaaaaacatatcctactctatctacattgtctagctatatcttatcatttaaaatgtttaaaatttttaaaattacatttttgtctctaatattctgagaagacttactatattttaacaaatagttatgaacttaagctgctttgaaaaatataagaatgatttagatatcagctaaaactatagttcagaaaacctgtagattagaggagaaaaaaggcatctatgtaagtgactgtagttgaaatcatttccatgagaaggattattttctcactatcacataatactgagtaatgtttacctgagaggctcttatttattttgacttttgattttttttattggaggtggggagcatttttgtttatatgtaactatttctgtgtttcaaaragctaacatttaaagatttcccttaaactgagtaaagtaatttatatgttgcctaaaaagacagaccttctcaactggacccaaagcaatgatagttgactgtggataattgattaaccttactgattttatatttttattatcttctgaatataatatagcactgctatcttgaattaagtatctaataactgtctaccttttactcagaatcatagttgttcaaaactatgagaaactttagagggcatctgtcaactgactgatgttttttatagataaggagagaaacggtaaatgagtaagaggttaaactgacagctgaccctaataacagtaacaagtactttatcaaaacccattcacctaccataactggagactgagaggcaggaacatagaattaaaatgtattttattgaaaataacttcttaagcattttttccccagaaactaggcaaatgctttcagatatctgatggagtataaatataagatgtccctatgtatcatggtatttgagatacttttctctcagagcctaaatttgtataaaacattttttaagcttattagaaatttagaaatgcaggatgaataaaaagagaactctaaaagaaaggagttttagaattataggaggaggtagaaaatggggaaaggaatagaaggattttagaaaaagatacgttccataggttttagctctctgtagagctaatgagatctagcttagagttagcaataataaataataatagttttgttgaggcctatctaattagacagtactaagtatttaaatgcccttttaccgttaacactttcttcccgaggacagactctgttatccccattttacagatgtgtaaactgagccttaagggaagttaaataacttgatcatggtcacaccttaagtggttraaaaggagttcctctcagatttctgtgagtctgaagcccttgtgatactatactgccaaagcattggggcccattttgtcttgttggtgagaagtgttaaagactgccattcaacatttagtgagctcttaatgcacctgtagcaccagtacccaaatgtaaaactagcggtggacgtcaaggaatctactgtgtaattaaggagacatatgtacatttgaaagagataaaaacactttttaaaaaaggaaacaggccaggcgtggtgactcacgcctgtaatcccaacactttgggaggccgaggtgggtggattamtaggtcaggagagcgagaccatcctggctaacatggtgaaaccccatctctactaaaaatacaaaaaaaaaaaaaaaattagccgggtgtggtggcgggcgcctgtagtcccagctactcgggaggctgaggcaggagaatgctgtgmacccgggaggcagagcttgcagtgagccaagatcacgccactgcactctagcgtgggcaacagagtgagactccatctcaaaaaaaaaagaaaacaaaaatagatgcaaattaatccaaacattaatttcaattattagataaattaaacaagattaaaacaaatatttaccagcctttgtttttaaatcttaataatgttcttctggttgtaggtggttacaggctcaataagaagagagcctagtactaaactagagcctgactgaataagaggaaagaatgtcccatagtgtcatttgggggaattgaagtgtctgatatgatgcctgaacttcagctacttagaataggaaagttagtgctttagaccagtgcatttcaaactttaatgcacatgcaaatcacccagggatcttgttaaaacacaagtcttacacaaaaattaactcaagatggattaaagactaagacctaaaaccataaaaaccctagaagaaaacctaggcaataccattcaggacataggcatgggcaaggacttcatgtctaaaacaccaaaagcaatggcaacaaaagccaaaattgacaaatggcatctaattaaatgaaagagcttctgcacagcaaaagaaactatcatcagaatgagcaggcaacctacagaatgggagaaaatttttgcaatctatccatctgacaaagggctaatatccagaatctacaaagaacttaaacaaatttacaagaaaaaacaaccccatcaaaaagtgggcaaaggatacgaacagacacttctcaaaagaagacatttatatggccaaaaaacatacgaagaaaagctcatcatcactggtcatcagagaagtgcaaaccaaaaccacaatgagataccatctcatgccagttagaaaggtaatcattaaagaggaaacaacagatgctggagaggatgtggagaaataggaacacctttacactgttgatgggagtgtaaattagttcaaccattatggaagacagtgtggcgattcctcaaggatctagaaccagaaataccttttgacccagcaatcccattactgggtatatacccaaaggattataaatcattctactataaagatacatgcacacataggtttattgcagcactattcacaatagcaaagacttggaaccaacccaaatgtccattaatgataaactggataaagaaaatgtggcacatatacaccatggaatactatgaagccacaaaaaaggatgagttcatgtcctttgcagggacacggatgaagctggaaaccatcattctcagcaaactatcacaaggatagaaaaccaaacaccacatgttctcactcataagtggaagctgaacaatgagaacacatggacacagggagggaaacatcacaaaccagggccttttagggggtgaggggtacaggagggatagcattgggagaaacacctaatgtagatgacggattgatgggtgcagcaaactacaatggcacgtgtgtacctgtgtaataaacctatgcattctgcacatgtatcccagaaaagtataattttttaaaaaagattaaaaaggaatatataatagagttcatttcctatctgattactgtaaaacaataaaatgagtcaaaaattaaaaaaaaaataaaacacaagtgtggggtgtgacatggcattttgcacacccagcatgctcccacatgatgccaactctactgctctcgagaccacactgaatagcaaggcttcatgtcacaaagttaagaaattgatcataaactgttgtataaaaaaaggaaatttcgtatgagatagggcagcaatttgaacttaaataactatttatgtgttgattttaaaataataccttgtcatcaaagtagttacagaaatgtagggatagttgtaaatactatgttaaatcactttgaagaagatataatcattgcagttttcagcaacctggtaattatttatgttcagtcattaaatgtatttcagtgtctactgagtttaataaccagtgttacagaaaaaattttaagtgtaagtcttagacattagttattagaagcaggataagtgatagtttagagtggaagattcagagataaactcctcaggttcaaaagctggcttctccacatactcgccatgtggcctgaaagcaaattactcctctctgtgacgtccatcctcatctctaaaatggggatactcagaacagatcttataaagttgtaacagggttttaagaaataatacatataaagcactttgtgcagtgcttagcggtaaactgttacaagtgatggctgttactactagtattgatactgtttaggaaatactaagctaactggtttttaaggatttgccagtgttcagatatggttctcagtatgtgatgtgttagtgtgtaatcagcgattccctctttcagtttctaaggcagtaaatgattcataagctgctttctgagccacttgtcactaagtgttgctraggataggctctgttgccttagataacagagatgctcctgcatcttagtttgctttttgatcagcagttttgatcatgaggtaaatacacatttggaaatcattcattcactttgtattaagtagcaacaaaccagtgagctaaatgaatgttactgtcctcagtcaaaaccaattttcaaatataaaaataattcttaatattcatcattcgtttcagtctctaaccatcaaaaagcagttgctttaccattattcataatccatcctcaaaatgattaaataaatttctgttgtcctacctataggagctctctaattttctcctgaattgtataattcacttactctaaggtttttgtaattcagacctaaggatctcttggtcttagtttctatcttggcttccttctgcttaacaarccacatggsagccaggccttttagtaagttaattagatatttttggactaaattgagttagtcttatatggtggctaacaaaacaaacagttctacaacttttctaggccttttgatagcaacttaatgtaacataaactaagatttaatatgtggactctttcccttcctcctatgactcttttctgcttcaggagaagagactaaggtaggaaatggctccttttatccttcctcaggaggtttcctctctgctttgtgtaggatagtttaaggatggccagtttgagcatgtctaggaaccacacaggtaacacagattatacctggcttagaaaaaccacattcstttattcttatgactcatgttttaagcatgcatactttgtaaagctaatatagcactcttcattttatcttgataaacgtttgtataaacattttttctcttttgataattttgttattaaagattacaaacttagaagagcaattagaacagtttagagaagaactggaaaataagaatgaagaagttcaacaattacatatgcaattagaaatacagaaaaaggaatctactacccgcctacaagaacttgaacaggaaaacaaattatttaaggtaattagttaagaaaaacttttatctgtaaataagtcatagtttcagtcctatattgctttattattattattattattatttctttytttttttttttttttttgagacttagtctcactctgttgcccaggctggagtgcaatggtgtgatctcggctcattgcaagctccgcctccctggttcaagcaattctgcctcagcctcccgagtagctgggactataggcacgtaccaccacgcctggctaatttttgtatttttagtagagatggggtttcaccgtgttagccaggatgctctcgatctcctgacctcgtgatccgcctgtcttggcctcccaaagtgctgggattacaggcgtgagccaccacacctggcccctatattgctttattaagcattcgataaatccagctgttaaataatactcaacagaggaacattaacaggcagacacatttgcatacagcttattttcagcccaacctgaacatttgaattcatcataaatgaaaattttgggatcatttatcaaaatattttagaattattgatttacagtaaccatatggtgtctctgattttattcatttgtacgttataggctctgatttcttttgtaattatgttctgaaaatgataggtaatgatatatccaactgtgataattatttttgttcctaggatgacatggagaaactgggacttgccataaaggaatctgatgccatgtctactcaagaccaacatgtgctatttgggaaatttgctcaaataatacaggaaaaagaggtagaaattgaccaattaaatgaacaagttacgaaactccagcagcaacttaaaattacaacagataacaaggtatactyatttaaaattgattatgaaattaatatgaaccagagttttaaagggcaaaatggttataatgttgctccccattgaatttaaaaaacaaaccaattttattttattttattttattttatttattttttttgagacagaatctcgctctgtcgcccaggctggagtccaatggtgcaacctcggctcactgcaacctccacctcctaggttcaagtgattctcctgcctcagcctcccgagtagctgggattacaggcacccaccatcacacctggctaattttttgtatttttaatagagatggggtttcaccatgttgaccaggctggtctctatctcctgatgtcaggtgatccacccacctcagcctcccaaagtgctggtattactggcatgagccaccacrcctggcccaattctcttttattaattttaatttattaagwcacattggtggccaggcacagaggctcacacctgtaatccttatactttaggaagcctaggtgggcggattgcttgggcccaggagttcaagaccagcctgggcaacatggtgaaactttgtctctacaaaaaatrtaaaaattaactggacatggtggcataccacctgtagtcccagctgcagtgagcctcatcatgccactgcactccagcttgggtgacagagtgagaccctgtctcaaaaagaaaaaaaaaaaaaagcaaagacacattggyttaataatttatatgtatttttctcccctcctaatawtgtcataggattctaatgtttttcagaaaggctctgtgacttagattttatcatgttattctaaccaaatctattataaattataatatttaatatgagttaagtaaggtaattacctttggtgccatcggttgtagactttatttccgtacttcatccttttccattaagaagtattgatattgactattttcctaatagggaatcagcaactaaaagcttatattactttatacttaacagaactttctgagccttgtttgatatgatgggggagatattggtctataatgaaattaagtagtatgtctgagaagtagtgtattatttttgtgtgtgatcatctctttgaggtactgccctaaaataaagtaaaattttcaaaatgtaaatacatatatattatgtatgttacctttttcattaattattaggttattgaagaaaaaaatgaactgataagggatcttgaaacccaaatagaatgtttgatgagtgatcaagaatgtgtgaagagaaatagagaagaagaaatagagcagctcaatgaagtgattgaaaaacttcaacaggaattggcaaatattggacagaagacatcaatgaatgctcattccctctcagaagaagcagacagtttaaaacatcaattggatgtggttatagctgaaaagctggccttggaacagcaagtagaaaccrctaatgaagaaatgaccttcatgaaaaatgtacttaaagaaaccaattttaaaatgaatcagctaacacaggaattattcagcttaaagagagaacgtgaaagtgtggaaaagattcaaagcataccagagaatagtgttaacgtggctatagatcatctgagcaaagacaaacctgaactagaagtagtccttacagaggatgctcttaaatccctagaaaatcagacatacttcaratcttttgaagaaaatggcaaaggttccataattaatttggaaacaaggttgctacaacttgagagcactgttagtgcaaaggacttagaacttacccagtgttataaacaaataaaagacatgcaagaacaaggccagtttgaaacagaaatgcttcaaaagaagattgtaaacctacagaaaatagttgaagaaaaagtggctgctgctcttgtcagtcaaatccaacttgaggcagttcaggaatatgcaaaattctgtcaagataatcaaacaatttcatcagaacctgaaagaacaaatattcagaatttaaatcaactaagagaagatgagttggggtcagatatatcagcattaaccttgagaatatcagaattagaaagccaggttgttgaaatgcatactagtttgattttagaaaaagaacaagtagaaattgcagaaaaaaatgttttagaaaaagaaaagaagctgctagaactacagaagctattggagggcaatgagaaaaaacagagagagaaagaaaagaaaagaagccctcaagatgttgaagttctcaaggttagttttgtattttattagtttcatttaaataccccaagaaactaagctgattgctaatttactaaatatggtgttctgtttacatctaacaatttatacaagaaggtttttataaaaatataccacttataaaaaataaactcttgttaaaagaaaaactaggacaggcgcggtggcccacgcctgtaatcccagcactttgggaggccgaggcgggtggatcttgaggtcaggagatcgagaccatcctgtctaacacggtgaaaccccgtctctactaaaaatacaaaaaattatccgggcgtggtggtgggtgcctgtagtcccagctactcgggaggctgaggcaggagaatgctgtgaacccgggaggcagagcttgcagtgagccaagatcgcgccactgcacactccaacctgggtgacagagcgagactccatctcaaaaaaaaaaaagaagaagaaaaactagacaaactaaatttacgagagtttatttgaacaaaaaaggattcacgtattgggtagcattcagaaccagaggagtttcacaaatctcttttgtgcaacagtggccagtgaatatttatagacagaactaccaaataaaatacagaaatagcttgattagttacagttaggtgtttgccttatttggacccagtctgctcagttgactgcttgtcattagctaagagttggctgtttattatactcctaagatacgttttcagtttgcttacgtactcctaagttagattgtagttccttacataggaactcaagatacagagacagcctcaggccaaatttaacttaacactgtgtagtcatattattatcactaaaataatggatacagactgtattttatggtctttaaatatgatatttatttcattaacatcatcattaaatggagcagtcagaagaaactaagaaacattaattttagcaaatgttctctaggatttatggggatttttttcttaatttscttctaatatgcatgttatgttatcattccttttaagtaataataagtatgaaaatatgttaggattgacaaagaatgcagactttacagaaagaaatctattatttaatagcatctactgaattaattaatgtgtgggtgacatattttacaattttttttttttcttgagacagagtctcgctctgtcgcccaggctggagttcagtggtgtgatctcagctcactgcagcctccacctcctgggtttccagcaattctcctgcctcggcctcccaggcggctgggattacagacacgcaccaccacacccggctaatttatatatatatatatatatatatatttttttttttttagtagagacgaagtttctccgtgttagccaagctggtctcaaactcctgacctcaagtgatccgcctgccttggcctcccaaagtgctaggattacaggtgttagccactgcgcctggccagcttttacaaattttatacctgataatagatttcatctgttttaagtaaaaatgcgtagttgacctctgtaagtttacttatgagaagatctgaaatcgcagttatttcttagcatatgacagataggacaagagcttttttttcctccaaattctcaccttataaatttataactttgagtagctgaacttcagtcttctccaaacaccagaagattaactgataaatcacaattctataattatatattttgcaaagaataataattccctggctttttcctccttcattggaactaagttacttaagttatagataattaaaatagtaatataactttctttttttcctggacacagagtcttgctttgttgcccaggctgaagtttagtggcgcagtcttggctcattgcaacctctccctcctgagcagctgggactacaggtgtgcaccacaacacctggctaatttttgtattttttgtagagacagggtttcgccacgttgcccagactggcytcaaactcctggcctcaaatgatctacctgtctcagcctctcaaagtgctgggattacaggcgtgagccaccgtgcctggcctaaaatagtaatgtaactttccattttaggatgtatatgaataacattacttaccttttattcccagaaaatcattcttttctcaagaagaaaatcattgtctcaagaatataagatgatggttctgaaaaagcttctctgtttttggaaagagcattgatttgttccaactccttatatctgtaggcagtcattccttggatggttttattagaatgtataagagccttgaatttagctatrttttttttaaattatgtgtttcttgtgtttccgctgtcattcagacaactactgagctatttcatagcaatgaagaaagtggattttttaatgaactcgaggctcttagagctgaatcagtggctaccaaagcagaacttgccagttataaagaaaaggctgaaaaacttcaagaagagcttttggtaagataagtaacatagctcctaattyactcatttctacctatcttaattacgtttcaaagtatatactcttttataacaaatgagctccataacttaaaagctagataaaaagtattttgtggatttgatgaaaactttcattgttataaatttctttaccaacatcttcttgcttggttttcctggaaatctttcttaggaggatactttttatttccattctgttaatgaaggagtagaaagttgttaaagagaactgtatatcccatgagaaccaaaaatagaagctaataaaattatttcatttctatagtaatctatgaccatacgtacatacaaatatatatatgtaaactgtgagcgtttctgaaatgtttttcctactactctgaggaaaatgaacgtataatcatgaattacattcctcccacaccctttaaattctacatttaatatgggaagattttaactgaatgccctactgttctattcattacgttttaggtaaaagaaacaaatatgacatctcttcagaaagacttaagccaagttagggatcacctcgcagaggcaaaagagaaattgtccattttagaaaaagaagatgagactgaggtacaagaaagcaaaaaggcctgcatgtttgagccacttcctataaaactgagtaagagcattgcatcccagacagatgggactctgaagatcagtagcagcartcagactccacaaattcttgttaaaaatgcaggaatacaaattaatttacagagtgaatgttcctcagaagaagttactgaaataatcagtcagtttactgaaaaaattgagaagatgcaagaactacatgctgctgaaattttggacatggaatccagacatatttcagaaactgaaaccttaaagagggaacactatgttgccgttcagttactgaaagaggaatgtggtaccttgaaggcagtgatacagtgtctgagaagtaaagaggtatttggtttttataatatgtgtttttcaacattgtgtggttttttwaaaaaaaaaaatcagtttaattcattttgtagatgacaaaccaaaatgcaactcattaaggcacttgatctttctaagtaggtgtattatcaaggcaagttttaaactcctagtacaatattccttttttttcttttgttatactttaagttctgggatacacgtgcaggatgtgcaggtttgttacacaggtatacacgtgccatggtggtttgctgcacccatcaacccgtcatctacattaggtatttctcctaaagctgtccctcccctagcacctcacccccgacaggccccagtgtgtgatgttcccctccctgtgtccatgtgttctcattgtttaactcccacttatgagtgagaacatgcagtgtttggttttctgttcttgtgttagtccgctgagaatgatggtttccagcttcatctatgtccctgcaaatgacatgaacgcatccttttttatggctacatagtattccatggtgtatatgtgccacattttctttatccagtttatcattgatgggcatttgggttggttccaacactgtgtgcttttaagagaaaataaaaaaacgggggcagtctcttccttatgatcgcaattttaatggttttgaacttttttaaatttaaagagtttttagttttaaatttctttaaatctttccattgcatagagttaaataatatatgatgttcctgtatggatttggaacatgttatctttccttaattcatgagtatctcttcttatggtaatattcatgaagaaacagacttgttaaaaaaaaaaaccatgaataatttcatttattatgaaaggtgtgacagatttgattgattacagcacgggaaaccagcaaaataattcattgtattctatttttattaaagcaaaaaatatatgtactttttgttttctctaattagggatcctcaattcctgagytagcacattctgatgcttaccagactagagaaatatgctccagtggtaagttatataaatatttgtaatgtttgtagtagttgtttaagaaataatagttttttggggactggggtttgatttttttttttttaacagcaaattattttctttattttagattctggatcagactggggtcagggaatttatcttacacacagtcagggatttgacatagcatcagaaggccgaggagaagaaagtgaaagtgcaacagattcctttccaaagaaaataaaggtactaaaagatagataccttttattaactcagccagtgttgtttctatgttgaacatagcagttcattagaagttatatggtgggatcatttctgaagagagaattgcttagctagaaggaatctgagagatctattttatttccacatttcacagataataaagtaagagattaatgataatatgtatgaagactttttttcttaataattcttattcctgatgtattcgtttgccagaatttttaaagtagtctcaaagagtagaagttagagcccatgtatttattttggtcaaatcagtagcttatcagtaaacctaggaagagtacattagccaaacagaaggaacttagagatgagagctatggaaagtcataggccatctgctggggttggcttacccctccacaggaagaaggcattcagtaatgttgggctggagttttctctctgcaagctatcttgcttaaaatttatttctgtttgtaagtctaatttttcagtctgtgaagaagttgtcataattctggctcttgggttttggtttccagggattactgagagctgtccataatgaaggcatgcaggtgctttctctcactgagtctccctatagtgatggagaggaccattctattcagcaggtttcagaaycttggctagaagagagaaaagcttacatcaatacaatctcatctctaaaggatttaattacaaagatgcaactgcaaagagaagccgaggtaaccaaagaatactatgcatttaaatcattttatgtattatttgaacaataataatacattataaattaaattatcttttatacatatttttgcatgaataactatatatatatattttcacacttgaaactcagccagaagcagtgcctcatgcctgtaatcccagcactttgggaggccgaggtgggtggatcacctgaagtcaggagttcaagaccagcctggccaacatgttgaaacccgtctctactaaaaatacaaaaattagccaggcgtggtggtgggtgcctgtaatcccagctactcaggagaatcgcttgaacctgggaggtggaggttgcagtgagctgagatcatgccactgcactccagcctgagcaacagagtgagactgtctcaaaaagaaaaaaataaataaataaaagaagtacacatgctcctaggcttttaattatttttctttgtagattaatatttttagaatgtttttaaaacatgcttatttgaaaactaactatcgttatatgtactttgctaggtttatgatagttctcaatctcatgagagcttctcagactggcgaggtgaactactgcttgcccttcaacaagttttcttagaagagcgtagtgttttactagcagcatttcggacggagytgacagctctaggtactacagatgcagttggtttactaaactgtttggaacagagaatacaagaacaggtataatgaaacttcattttaaaaacactttaatagaaataaggaaatgactattgattttagagtcttaatttaagtatgaaggttaagattttaataggagccactatgaatattttwaaaaaattattgtaactattttaacgtattatgttagaaggtaagaaagactgaaagttaatgagcttattttctaacctaggaaattagaaaaagagcaacagaataatcccaaacaaatttgagagagtaaattctcattatttgcactggttatgttccataaagttgctctgaacattgagcggtcattgctcctaagggaaatacaaggttaggttcctgtaagcctttggtcacaacattttcatcagtcagcacataaccttgtctatatgtgattctattttaagacaccttatttactatatattattgattgattaaccttgaacaccaccaacagcactataactcatgcctgaaaaaaacttgtctgacacacatattttctccttaaggcacatcacagccttctcgtacttaggaacaccataaagcacttcagcactacttttgggggccattctaaacagtgaaatcacaaataaaaggcacaaaaatttgaaaagtcactaagtactctgtaaaaaggacatttgacttcagctggggacacccacattggaccatttaaattttttgctgctgtatgcatttctgtgaaagaccatgaaagcaacacaacaatggatttgggagttacaaatacattttagtgagaaggcaaatctgcaaatatggaatcagaataatgaggattccctttaacgaagaagacgacgtcaatagacacactggtacaataggataaaatgttaaaagttggacatttgaacttttctggagaattggttaagcaaaatgataaagcacacatttttaaagttaggaatgaactaaagatatacctgagatataaaaataatagaatattatgaataatttcatgagagtaaacttaaacacttgggtgaaatggacagattttctaaaaagaaattcacttatgaaaactctttcagtaagaaatagaagacctccaaagacctattactagtaacagaatcaaatcaatagttaaaaatctactcataatacttaacacccagatctttttttttaatatattctccactgaaaagaactaggacttcttgyagaactgatgattctagggatggaccagggaaagtataaggtgagcctggaacatcttgttttgctggcaagtaaggaattgttcaaagaatgaagggaacatgtcgaaaggtcatagaagccagcttgaaggagctccaattgaccaaattctagaaaaatttaaacattatattaaatgatagtgacaaattataagccaaagagtgaaataagaactcatgagaccatactgatataaataaataaatatatatataaataaataaatagtattaccatggaatgacagctagtaaatgtagaaggaacaatgaaattaggaaatcaccctttattaaacactgtagtgttaaatcaccctttattaaacactattcaggcaatagttcgcaacagatgctaaaactagtgtgaaaaggtttgttaagaaagtatatttacatagtctcaaagtaaatccccagaaaatcttctttaattaccagggaaaagcagtaactttacagtggagaaaccttgcagataccaccttaacsaagtgatcagaattactattaccagaaatggaatagacatcatacagttcctaatgtgaagggcacgatgccacttttgtagtgtttttgtcaaatgaatattcagagtctactcttggggaaatatcagaccaaaacaaattgagaacactacatctatcaaaataaaaaatagtgacagcaagtactggagaggatgaaaagaaactgtctcatagattgctggtagcaatgtgaaatgggagggcaatagccaaaaactggaatgttctttgacaggggaatggatggacaaaatgtggtacatccatacaatgaaatattactcagcaattaaaaagaaacaaactatttatgcctacaaccacttgtatgctatataatgctcttaaaatgacaaaattatagtaatagaaagcagatcagtggttgacaggggttagggttagggagagagtttgactacagaggagtttcttcgtggtgagaaaacagttggtactctgatggtagtggtggttacgtgaacctatccatacatgtgatcaaattttgtaggactacacaccaagaaaactaatgatcaaattttgtaggactacacaccaagaaaactaatgtgaaaactaatgaaatctgagtaagccctatagtttggtattgtactaataccattttcctggttttgataatatactatggtaatgcaagatggtatcattgggaaaagctggctaacagatacatgggaactttagctttaattaattcaaaataaaaagttttttaaaattgaggaacgtacaacaaaatagcctgtagtcttcaaaaattcaaggtcatgaaagacaaagaragacttgggaatatcactttttttctttttgctgtgaagtacatttcacaaaatttgaataggctctgtatatcacataatagtattgtagtaatgttaattccacttttgctaattgtagttatgtaaaagaatgttcttgttttaaggaaatacactctggtatttagaggtaaatgagcatttgtctgcagcatatcctcatacattttggaaaggaaaaataagaaaattttttaaaaaagaaaattttagtatgtgtgttccattcattcttctttagatttcttggttgttaattgtattgcctttacattgctcttcacttgttttttaccttcctttgttacagggtgttgaatatcaagcagctatggaatgcctccagaaagcagatagaaggagtttgttatctgaaattcaggcactgcatgcacaaatgaatggtaggaaaattactctgaaaagagaacaagagagtgagaaaccaagccaaggtatgttgtatgacaagctcatatggttacacaaacaggtgaaaagatttcactttgttttctttcttattattattaagttaaaacatattttcttggtcacattttcttctcattctcataatgttaaggatacaatctatattaattactctaggggttagaggattgtctaattggtttaaacagctacgttgactttaaaataaactgccattcccctgataaggttaagcccattggattcattctttttctttattttagagctgtatgttaagaaaacagtctttccaatcataaaacagaaaatactctttagagraaaatccacaatgcatgtaactaattattttttaatccttttttaaaaaaattgtgagccataacatacagaaaattacaaattgcaaatatgcagtatgacgcatttttaaatgagtatctatggaaacatcacccatgtgaatatagccagtatcccaacagccccttctcccaagcacatgctcctctgagtaacttagaggtaatcattgttctgatttttctttagttttactatctatttatatattcctaaaacatttaagtttcaagtttttttctgtttttgaactttatcaatctgtatgtattttttatcttgtttctttcacctctctgtaacattcttccaacattcttccaagttactgcatttttcaagttactgcattcttccaaattagtagtagaacattcttccaagttactgcatttatytctagttcattcattcttgttactctataactctatgaccctgtgtagggccaggcacggtggcttacacctgtaatcccagcactttgggaggctgacgtgggtggatcacgaggtcagaagttcaagatgagcctagccaaartggtgaaacccagtctctactaaaaatacaaaaattagccaggcgtggtggcgggtgcctgtaaggccagccactcaggagactgaagcagagaattacttgaacccagaaggtggaggttgcagtgagctgaaatcacaccactgcactctagcctgagcgacagagcaagactccatctcaaaaaaaaaaaaaaaaaaaagaatttcctgtatagatactccaaaattaatatatccattctattaatatgattgagcatttgggttgtttctactttttagctgtttagctatcaatgttattataaacattgttgtatagtgtttctgctacatatgtgcatgcatcttctgagtatatgactaagagcagaattgctgggtcatggaatgcctatcttagataaggtcaaatgattttcctacatagtcatattagtttatacacttagtagcagtatatgagagttacgttgcttcacatctttgccaacagttagtatagtcagacttctgttgccaatctgatgggtgtgcagtggattcttattgtggttttaattggctgttctctagttcctgaagggtttagtcctttttcatatggtaattggctagttggatttttatttttgtgatatgcttgtttaggtactttttgataacagtatctggtcttttaaattgagctacagatggaaatcattagaaagtaaagtgaaatctaattttcatcatgtccactgaggacacatacctgtgtgttcagtaattttgtgtcatgtactggtagaaacatgtatcctttggaaaattttgaaagtcacagcatggtctcacattggtcattataaagctgaagcaggctgggccctgtggttcacgcctgtaatcccagcactttgggaggccgaggtgggaggatcacgaggtcaggagtacgagaccagcctggccaacatggtgaaaccccatctctactaaaaatacaaaaattagcttggcgtgatgctcggtgcctgtaatcccagctactcgggaggctgaggcaggagaatcgtctgaacttaggaggcagaggttgcaatgagttgggatcgtgccattgtactccagcttggacgacagggcaagactctgtctcaaaaaaaaaaaamaaaaaaaaaaaacaaagcagaagcattcttaccactgagtttaagaaggaaaaaaaaaagcaggttaaaattacttcagaaaagagagtcataatgagataaacatatcactttaaacgtaggcgtaattgaagatgtcttttagagatagattaatattgttttacttaggttaaatagaacaccattgaaagcttaatgtcacagattcacatttatgtaaatccttaacctctaaagtttttagaagcctaaattaaacatgattgattatcatctaaagctaatgttatttctgtctcctaacgtcagtaatatgaattgtaatgtgaattgttgaactttgatagtattttttaagttaaaaatgtttttcttattagagtagtatagtattacatatttatggtagaatacagaaaagaatagagtgaaaatcatcccttgaatcacctaaatcctaaaataatgactacctaacacctgggtaaatatgtctccagaccttttcaatgtgcatgtgtacataagcttgtatttttcataaaaaaggaatcctgatacatattttataacatactttttttcatttaacatactgaggcatttaaaattttcagtttgtttttattgtagcaaacatgtagtaagggtttggttggctttcartggataaaaggacggtatccaaaggggggtttgaatttcccacttctgggaacagactcctattaaagttccaggggactatctgcagtggggtgctgaacaaaagatatcagcagtgctcatcattgtagtaacttgggtaactcctccaaatactttgtgtgactatcagaaatctttggaattttttaatgtacattcttgaaattctgaatgtacaaatatgagttccatttaaagtttttttttttaattttaagtcttgcatccattaatgtattctcttaaacttttatccttatatatttatagctctgaaatcttggccactagcactatgaggaaaacatgcctgaaatttatttttatacgttaccaaccctttttgtttgtttttttgagacagggtctcactgtcactgaggctggagtacagtggcatggtctcaactcattgcaacctccacctcccgggctcaagcaatccccccacctcagcctcctgagtcgatgggactacaggcacatgccagcacgcccagctaatttttgtatttttagtagagacagagtttcaccatgttgcccaggctggtcttgaactcctggccttaagcagtcctccctcccacctcagcctcccaaagtgctgggattacaggtgtgagccaccatgcctggactgcattaccaactcttgggactataatttttcatgtttcctttgaagtaatctccttaactacaaatcagttcttatcaacaaatatttataaaccaaatatgagttgcttgattatgtttcaaatattaatcatgttctgtgtagaactcttggaatataatatacagcagaagcagtctcaaatgctggagatgcaagtggagctcagcagtatgaaagacagagcaacggaactgcaggagcagctgagttctgagaaaatggtggttgctgaactgaagagtgagcttgcacaaactaaattggaactagaaacaacactcaaggcacagcataaacacctaaaagaattggaggctttcaggtgtgccaggcttccttattaaaaacatgtaacaaggagtgggagtaattttgtcataaacactgtgcaaatatagagaaatgtaacatgcatgatatttaaatagcatgcaactgttttttttaggaaaaactataatagaaaaaactctaaatgtttccaaatgatgaacttatgatcgtgattatagcatattctctactgtgacttcagttctgtgtgagacttgtatgaaatagaattttgactttgacctttattttaccatcaaccaatttgaagtgatatttatgaacgcagtagaattcatgattgagtgagctaaaatatgcaaartatttgaagagacaatgcttgttaaaagaatatatttcttggtataaatactgagatattctgttgccaaagacacattacaactagtcatttttatattgaacattagcttcacacacaaatagatatggtgattcccatgttcagtaaaagacaaaaattttatttactttttatttatttatttattttattttatttttatttaattgttttgagatggaatctcgctctgtcgcccagactggagtgcaatggcatgatattggctcactgcaacctccaccacccgggttcaagtgattctcctgcctcagccttctgagtagctgggattataggcacccgccaccatgcctggctaatttttgtattttcaatagagacagagtttcaccatgttgaccatgctggtctcgcactcctgacctcaggtgacccacccaccacggcctcccaaagtgccgggattacaggtgtgagccaccatgcccagccaaaatttttattaatactattttgtaacaataaattgcatagttgtttgcattgataattaataactagtaattgtactactagaaacagttaatttgaagccaggtgtggtgactaatgcctgtaatcccagcactttgggaggccaaggcaggtggatcacctgaggtcaggagttcaagaccagcctggccaacatggtgaaaccccatctctactaaaaatacaaaaaattagccgggcatgctggcattcacctgtaatcccagctacatgggagggtgaggcaggagaatcacttgaacccgggaggcggaggttacagtgagccaggatcgcgctattgcactccatcctgggtgacaagagggaaactccgtctcaaaaaaaaagaaaaaagagggccgggcgcggtggctcatgcctgtaatccgagcactttgggaggccaagacaggcggatcatgaggtcaggagattgaaaccatcctggccaaaatggtgaaactccatctctactgaaaatacaaaaattagctgggcgtggttgcgggcacctgtagtcccagctacccgggaggctgaggcaggagaattgctttaacccgggaggtggaggttgcagtgagccgagatggcgctactgcactccagcctggcgacagagcgagactccgtctcgaaacaaaacaacaaaaaaaagaaagagttaatttgaaatgaaccccagtcaagaatctttaatagtttatattttcctcttagctagtttattatatgcctcaacttatcagtagaagctgtttttctctctctcattatatgcttcgtcaacatagctttatggaaattcatttgtctttctgacttaggttggaagttaaagataagacagatgaagtacatttgcttaatgacacattagcaagtgaacagaaaaaatcaagagagctccagtgggctttggagaaagagaaagccaagttgggacgcagtgaagaacgggataaagaagaacttgaggtactgttatctttgtctttaaatgtctggaaaatccagaatgatagaagagggtcttaaggctttcctccatctaaaatgtcaaccttagacttcttaataagatatggtargttgttcactgtgcattgaatactacataaaccgtattatgaggaaatgctaatggagtggtgattggttttttttgtttgtttgtttgttttgctacatccaaagatgcatatagactgctctgctgcaacatgttttgggcatgtgaattggtacacacagataaatatggcaatcctgtcagtttaatacagaggtagttttggttcctgttttctcctagggaagaggaacagggatacttttctggagccctcactgcttaagaayatttaaagtgaacattggcccctttcagagagacacacccctgctttgcaaggctctcagctcaaggcaggctgctttgagtatctgcttttaatagaggtggagtatacatgaagtatctgcttttaatagaggtgttgttgtctcactggctcagagctcttctagccacgtaatcctaattctcactaactctgtgctgaaaaacaatgtgttgctggcatttttgcccgattttttatttttaatgtccactgtgttagcctccaggcaaagagaactctctgcccggcagggacatgatatctccctaggtaccaattatagttttttaaccattaaaagtttatgtatattttgagttatttgcccctaaccttgctttcgttataagccctattatttttagcatgtgatactgcaaaacacaaggtttttcaggaactcctatcacattatatcaggaacatttattttttaaacaaatttattaatgtgcacaggaatcttatcaaaacgtaagatctccaggaacagttatatttttaaaggttgttattcttataagaaatgtaccctgcttcatattacttagtgagattaagattttttgagaaaagtattatcttacccttcttttatttatatttcatgattatgcactaactactgaacatttaagttaataaactaaataatcagttctattttctaataaagatactaccaacatagtattaataaaggcatggttgtatacttctgaagttttttttgtttttttttttttttttgagtcaaaagtctcactctgttgctcacgctggagggcagtggtgcaatctaggctcactgcaacctccacctcccgggttcaagcaattcgcctgcctcagcctcccaagtagctgggactacaggcacgtgccattgcacccagctaatttttttgtatttttagtagagacagggtttcaccatgttggccaggctgggcttgaactcttgacctcaggtgatctgcccgcctcggcctcccaaagtgctgggattacaggcgtgagccaccacgcccggccaagtatttttaataatattaacaagttcttaaatttgattttctcgtaccaggatctgaagttttcacttgagagtcagaaacaaaggaatcttcagctaaatctacttttggaacaacagaaacaactactgaacgaatcccagcaaaaaatagaatcacagagaatgctatatgatgcccagttgtcagaagaacaaggtcgaaacttagagcttcaggtacttcttgaatctgagaaagttcgaattcgggaaatgagtagtaccctagatagggagcgggaattgcacgcacagctgcagagcagtgatggtactggacagtctcggccacccttgccctcagaggacctactgaaagagctgcagaaacagctagaggaaaaacacagtcgcatagtagaattgttaaatgagactgaaaaatataaactggattctttgcaaacacgacagcaaatggaaaaagataggcaggttcacaggaaaacactgcagacagaacaggaggccaacactgagggacagaaaaaaatgcatgagctccagtccaaagtggaagatcttcagcgccagctggaagagaaaagacaacaagtttataagttagaccttgaaggacagcgactacaaggaatcatgcaggaattccrgaagcaagaactagaacgagaagaaaaacgagaaagtagaagaattctgtatcagaaccttaatgaggtaaactgacagtttctttttagatatttttaaggaaagcactgcagccctttgatcattaaattttgatattggattaaattacttaaatagctatatgtaaatcacttaaaaatgaaatctatagaagtttattggatataaacaataattgtgttcccttaagatagactgtgatatgctgttcacttataattattgttttcttattctgtccaaaattgccagccaaccacgtggagcttaaccagtgatmgaactagaaattgggttcttcaacagaaaatagaaggagaaacaaaagaatcaaactacgctaaattgattgaaatgaatggaggaggaaccggctgtaatcatgaattagaaatgatcagacaaaagcttcaatgtgtagcttcaaaactacaggttctaccccagaaagcctctgagaggttagacttttctgcctgatctttgggaaagtagtattcttaggctgggtagaccccatgcctctgggacagctagccaagggtggggaattgaaattttaaaggtaatgcgtgtttacattaggaggtgatattctttaacagaactcaaatgtctgaaaacaactatctaacactttgacccagggaagaaagcatgggatataagggagaagtgataggtgaagtagaacgtcgcctgctctgtaatgtttgtggtagtaaacacccccaattragaaggtatgttttgactttttstctttttcttgaagactacagtttgaaacagcagatgatgaagatttcatttgggttcaggaaaatattgatgaaattattttacaactacagaaattaactggccagcaaggtgaagaggtaatactttttaaaagttatttctgaagcattgagagcaaagatttaatagaaactggataatttgaaacttgcagcatattctttatactctttatagagttttatttgtatctttttatttattttaaatatgaataataatgcttgctttcccccaagagaagataatgaaagcttagggggggaattagctttcattattgtcattgaataattatgttgaccttttactgtatggagacaagcttcctgaaagagtgatctggcttctatcctgtctactccatgaaacacccttagactcctacagtgtctaaacaattgactagtctggtgaatcttttcagtttatctcttgacttctttgtagcatttgatacttttgacctgttttattttcttaaaaccctctctttccttgcctgtcatgtcagtattctagcatttcttctgcttctttcatcagttgcctttatgattcctcttcctaccctcttccttcttttctctaacctataactatgaaagctcacacagtccgacaccctgagctctcactagacttatttattaaacaaatacttatattgaacacttattctgtgccagataggttctggagatacagtgaacaaatctgactaaaacctcacccttatggagcttatctttagtggactgtggttctagtctagacttctgtcctgtgttccaggtttatattttcaattagttactaaacatttttccctggggaaatgtaccccatagtgaccccttaggaacctcacaggcacattccaaactgaacaccatcttccctttctacttcctgctccagaccctcatttctagtcatgatattgcccagtttagaaagctgaaagtcaccatagaccactttccttcacccttatctgcacatctagacagtcactaaatcctgtccctcttaccttctaaatacctctcccacacaccctttactttctktcccttagtcgttgcctccattcaggctttcagcatttcttacctggctgttgaaacaacttcctgataggtctacctgactcgaagattatatcttccctaatttcccctgctttgtacattactaccaaaggaattttcccaacacataaattttgtgtcatatttttgcatcaagcctttcgtgactctccattgcctacatttaggtctgttattcataaagtgaagcaatctagacttaccaggcaacctacaacaccccgaaaacaatacacactcgctcaagccttcgtgccttttgcttaatatgcccttccttatcttttctgcctggtaaatatctacctattactgaatactcaactcaagcaccaattcatgaattctgttgttctyggtgcctattcacactttatatgcattattcacatccatttgtgcttaagtgaccttacaccattttatttttccagcccagcttggtgtccccaagtacttcttgtggctcattgactgaaagactactgagacaaaatgctgagctgacagggcatatcagtcaactgactgaagagaagaatgacttaaggaacatggttrtgaagctggaagagcagatcaggtggtatcgacagacaggagctggtagagataatgtatgtccatttttagcatctccatatatgagaattagtgcatgcttatcatttctgctgtctagttcaagttttaatcctgttaatgtaaaactatcacacacctgattcttaggatctgtagaaaattttatagggatgacaataataatattattactaagttataataattactgttatttattggaaaccatctctgtactcgactctgggttgtatacatacagaatctctaatccacatccaccttatacctgagaaaactgaattgaagtcgtagtcaaaccaagatacttgtatctccaaagccagatactttgctacctagggaccaacaacagatacacgagatgttcaaatgtgaatcctgactgttctcttcatttaattattagttattgtgttgatgactcaattaaaaggttctgttaaattacgtctttcagtctgaaattactctgagaatttacttaaaatttttccatttaaaaacaggtataaaattaattgctagtttccataatcacccagtataaagatagaaaagacctgtaagacaactgtgtggttaaatacatgataacacatttacgtgccttttatagaaatccacttattatgtacatactggcttgtttttttcccacttctccagtacactatttcaggcacaggctcaaaatttgaacccaaatggtctgttaggtctcttgactttttcagttcaaagctctgctaatctgctaaaccttccctgtggccaggctttctcaaggacttttagttgtaaaactaatgtacttagcaaaggaccatgtacttaagagttagtgtatatgcgtaatgtcaattgagattggctttgaactttgtctgggtggggttagaaagttgagactgcatcatcatgcagatatctttttaatatgtttagctcagacttttcttcagagacttgtgtaagtaggctgtggtctttgcagtcttccaggttttcattgaatggtggtgccaacattgaagccatcattgcctctgaaaaagaagtatggaacagagaaaaattgactctccagaaatctttgaaaagggcagaggctgaagtatacaaactgaaagctgaactaagaaatgactctttacttcaaactctgagccctgattctgaacatgtcactttaaaggtaggagacatctcccatctaaacatcacagctggttctatgtttttgccttctttcatctctcactgaccttaaataaacagtctaaagaaatttagggcctggcacagtggttcacgcctatagtcccagcactttgggaggccgagatgggcagatcacgaggtcaggagatcaagaccatcctggctaacacggtgaaaccccgtctctactaaaawtacaaaaacaaaaaattagctgggcgtggtggcgggtgcctgtagtcccagctactgtcccaggcaggagaatygcttgaacccaggaagcggaggttgcagtgagccgagatcgcgccactgcactccagcctgggccacagagtgagactccgtctcaaaaaaaaaaaaaaaatgtagatagtattcaggttttgtctctaggtctttttattcagtctttgtcatgaatgcaggtcacagaggtttctggaaaggcatgcccaggactgggaccagattaacctttattaatggtcacagtggcagcctgggctcatggttccactttccctggtttcatccctaatagaccaaaagaatggtatcttttcaactcctaacaaaagctctactattgtcaatgtaagaacatcatactctgtaaaatggtaagccctctgaaaagcctctccggtgactaataatgaatgttgttaaaactaccttaatcagtcaacataaaattcaaaacaaaaagaaaaacttttggaacatttattccagtttatgactctgaagggatagaaaacattaacatttaaaaagttagattaggccaggcactggtggctcacacctgtaatcccagcacttcgggaggccaaggtgggtggatcactgaggtcaggagttcgagatcagcctggccaacatggtgaaatcccatctctactagaaatacaaaaattagccaggcatggtggtgggcgcctgtaatcccagccacttggaaggctgaggcaggagaattgcttgaatctgggagacggaggttgcagtgagccgagatcacgccactaaactccagtatgggtgacagagtgagactccgtctcataaatwwaaaaaaaaaataaataaataaataaataaataaataaatagatagattagtgaccctaataaaaatagctctgtacaattaaaaaaaaaattgggatgacaaaaatatttgcaattaatatgattaatgagggctaaaacctaaaagaaacaagaagcctaactataatattagtattcagactccattgactaatagaggcaaaagtgtaaaggttaatttatctgaaatttcaactttgctgataaagtagaaaacagtgataggaacctgccgttttactattactactactactactactactactactactactactactaccaccaccaccaccactacttgttaaaatctaggttattttcccctagagagcagggtgaatgttttcttaatgtctttacattcttctcttccctaaatatagagaatttatggtaaatacttgagggcagaaagttttcgaaaggctctcatttaccagaagaaatacctgctgctgttactgggtgggttccaggaatgtgaagatgccaccttggccctgcttgcccsgatgggggggcagccagctttcacggatctagaggtgatcaccaatcgcccaaagggcttcaccaggtttcggtcggccgtcagagtatccattgcaatttccaggtaaagacttgaaggaaaatgcattttactagtagactctctaaaaggattagttatttttaattctccctctattctctgctggttatactctatatttatatagtaggaggtatgtgccatcactgaagcatgtctgctttttttttctaggttttcattcatttagcaggaatactggcagggtatgtgtaaactatgaaaagggccttcctaggtccaggcagctggtgactcagagctggcctatccaatcacggctgccttttagaaaacaatctgggccaggcgtggtgcctcatgcctgtaatcccagcactttgggaggccaaggcaggcgaatcacaaggtcaggagatcgagaccagcctggccaacatggtgaaaccctatctctactaaaaaaacaaaaaattagctgggcgtagtggcaggcacctgtagtcccagctacttgggagtctgaggcaggagaatcacttgaacctgggcggcggaggttgcggtgagccgagatcggcgccactacactccagccatgtgacagagtgagactctgtcaaaaaaaaaaaaaaaaaaaaaaaaaaggccgggcatggtggctcacacctgtaatcccagcactttgggaggctgaggccggcagatcgtgaggtcaggagattgagaccatcctggctatgctgaaaccccatctctgctaaaagtgtacaaaaaaattagccaggcgtggtggcgggtgcctgtagtcccagctacttgggaggctgaggcaggacaatggcatgaacctgggaggtggagcttgcagtgagctgagatcgcgccactgcactccagcctsggtgacagagcaagactctgtctcaaaaaaaaaaaaaaaatctgaataagcccatgaacaagctcacacatgtaaataaataaaagattataaaatttaaaaatgtggttgacaaattacttcttaggctggcgtacattcattttcttcattgctaagataacccacttttggtgcccagttatggaaggtcctttcctaactgcattcaaatcagaggttagcctttaaggcattggatttttgctttttgctagtgcttttattgttctttctctagtaattccaagcaaagaactctggtattcattctgtctgtgattgacatggagccaagactcaaactactttgaggacctggcccactacagtcttctgacctggttatacgcatacaaacaccaaggcttctccatgcatccccctcccttttaggaggcagacagaatcttaaaggaattttgctttttaaagttatttctatcaggtcacatctgatgctgctttatttatttatttattttttwtttttttttttgagacagagtcttgctctgtcgcccaggctggagtgcagtggtgctatctcagctcactgcaagctccgcctcccgggttcatgccattctcctgcctcagcctcctgagtagctgggactacaggcgcccaccaccacaccyggctaatttttttgtatttttagtagagactgggtttcactgtgttaaccaggatggtctcgatctcctgacctcatgatccgcccgcctcggcctccgaaagtgctgggattacaggcgtgagccactgcaccggcctatttttctctaaaaatatggcacarttttttaattggaagctgtctgagatcacctagtccagaatctcatttcacacttgaggaaactgaggcagggagcggttacaaagccagtagtgatagagctaggacaaccagcccagtctcccaagtctcattcatgctggctctggaaacaggagcacaagttttatcttaactgtgggccttagaccctccttgcttctgatattccatattgtagtctcctggtttcatttactcttcctcacctttcatttccttcatcaccttgtatagagtaaaccagggtaagtgctggtagatgcattgatgaaaaaatatataatcctgcctaaatacctaaaggcagctcactttctagtggggaagactaatatgcacagaacttagaatataataagtaaatgggaggtcacaggagttagctagtaattttgattagagggatctagagaggcttcatgagagcggtgtagaagttgttattgacatacttcactctgccccactttttcttatccaagattatgtttatcatattttgaccctcctaagatggagccttggaactgattcaaagtaaatcaaaactggtgctccaaaagctccttgggccaagatggggaagaaggtcgtaacttgctgcacctgggtcatgaagctaacactcccattccttttgaaaccaacgtttttttgtccctgatcaaagggacaagagcytcacccaccttgcagcattcccagcacattcttattgccaatttaagggtctttttgttctcttcttatctcatctgccctttattctctgttcttttctcttttcattacttctcaccctttctttgcctatctgcttttcccatctacttttgccttccatctccttataccccatttatccctcaagctggaacctgatgctggcaatataagagacctctaatgcctcttgggaaggggatgaggggattttgagtccctattcttccgttccagttgattttgtcacaacaggcattgacatagtttaactgggcaattgtgaaatttgacatttgttctatgttcatatttaaacgtgtgatgtgatttttgtaggaaatgtatatactgtttatagatgggctgtgaaattttatcttggaatcttttttagaatgaaatttttggttcgacggtggcatcgagtcacaggttctgtttccatcaatattaacagagatggctttggactgaatcaaggtgaagtcaaaatagcatattttcttatgtttatgactctctaaatcagaggtcccccacccccagactatggaccatacttgtctgtggcctgttaggaaccaggccgcacagcagcaggtgagcagcgggcattactgcccgagctccacctcctgtcagatcagccgtggcattagattctcataggagcacaaatcctattgtgaactgcacatgtgrggaatctaggttgtgtgctccttatgagaatctaactaatgcctgattatctggggtggaacagtttcatccagaaaccattctggcccctttgggtccatggaaaaattgtcttccatgaaatgtgtccctggtgccaaaaaggttggggactgctgctctgaattactgcatgtgtaatacttaccaagtaatgaattctggaagcaatgttttccaaagacaaagcccttataactgccaaaactaggtaacttcactgttttaaagagggtaataataactgattttcatggagaacttagtctgcacctggccatgctcttttcatgtattctcccaatcctatgatataagtacagttttactactctcacttttagatgaaaaatcgaggcatggaaaacacaagtcatttgccccagaatggccagtagggaagtgatggaaccaggaccaaacactggcagtctgggtccagagcccacactcttcataactgcatttaaggcacggttcaagacaggattgctgttagtcatatggaagaattaggaagttttcataatttaacaatattcaaacaagtttctgagtttaccaacaggttgtataataatggtaacagctaaaattccttctgtctacacctagaagtggaaacaaactagggcttgaacatttctggcaataaagatgaggtccgaatctggggagcacacagaggacacagcatccctgtgctgtgtattcatagtaaaccacctttacatactctaccaggagctgagcatcctacagaggggaaatagatttggtaccctacacaaagtattttgaaatatcattacactgaaacagctgaaatttgtaccataataagttgtgttttattaaaagttagcaaatcttggtttcaagtcagtagattggaatggttacattggtctaatattttttatccacatcatttcccacaagccacacccactcagacacccctcacctctcatctacttagagctaaggtctttaaagaagaaaatatgccaattaaataattttctttgagacataattccagatatcagaaatactcatattcaaaagtaaacaaaataacatttgaaagccgaatttttgtttgtactgttttctcctttakcaagaataatagaaaatgactataaataggagattgtataatatagtataatagtcttttgagcagttacctattttgtagaaattttttaaggtcttgggattttatttttctttacaaggaatattttgggttactttaggtgcagaaaagactgactcattttatcattcttctggtgggctggagttatatggagaaccaagacatactacgtatcgctcaagatcagatctggactatattaggtcccctttaccatttcagaataggtaagaatatgagaaaacctgcctggaattgttaaatgtattaatatttaacagagawaaatggacatttttagggctttgacttctttgcattgagatagacatctttgttatatataatttacataatatgaccargtgcggtggctcacacctataatcccagcactttgggaggctgaggygggcagatcatgaggtcaggagttcaagaccagctagttggagactagcctggccaacatggtgaaaccctgtctctactaaaaatacaaaaaattagccaggcgtggtggcaggcgcctgtggtcccagctactygggaggctgaggcaggagaatggtgtgaacccgggaggcggagctggcagtgagctgagattgygccactgcactctggcctgggcaacggagcgagactctgtctcaaaaaaaaatacaaaaaaattagccaggcatggtggtgggtgcctgtaatcccagctactcrggaggctgaggcaggagaatcgcttgaactcaggaggtggaggttgcagtgagccgaggtcacgccactgcactctagcctgggcaacaaagcaagakttggtctccaaaaaaaaaaaaaaagaaaaaaaatatacataacctaaggcttaatgtaaaaatgtaaaaaccagtgtttaaatttgtaactgatttccaagggtatagcaaacaagctgaccaagtgttatttagtgtatgctatggttagatattgggaaaagtattgactaaaattgatactctgatcattatgaaaagcttaacagtcttcatgacaagatacatttatacatacccaatttattgagacctctgccacaagcattgtattggacattcttatgttgacttagtagcatctttgaattcattggagagttgtctctttctcatcccaagctccaaagctgaagcttggaggagatacattatgtgtgtacaagtgacccacctttttggggaagggagtggaggcaggttggtaayttatatgcatatttctggataacttgattcatgtacatatttttaatcctttaggtacccaggcactccagctgatttcaatcctggttctttagcatgttctcagcttcagaattacgatcctgacagagccctaacagattatatcactcggctagaggcactgcaaagacgacttggaactatacagtcaggtgctctgagtttaaccacatcttggcagcaccacagtgcgagacccacagctcccctttctttgaaattctttcacactcattaggataatcaaagcttccagtttagtgcatgagctaattattaagttagccaaagcttaaactcttgtaaccagcagagaaactgactttaaataatttaagtgaaaatatgatttatcaccccagatcccactcctcccaaaaatgatttcctactatgttcattcagcggactgatgacacaaaatgcacaatgagcaccagtgtgcaaggtactctgagtctacagagcctaactggagaacgtattcctaagtagcgcatggcagaaagtggtaaggccgtgccgcagcactccagcctgggcagcagagcgagaccctgtctcaaagaaaaaaaaaaaaaaaagaaagtggtaaggcatgcaaatcgggtggagttaaggaggaagcacttactttaagcrcttaatgtaaccattatccctgctactatattgtgcttttatgtatcatcgaaaaaaactatcccatttaaaatactttgtaaggattattttttctttgttcaaaaacaaaaaacaagtcatactttaaaataaaggtggattccctgttcatggaaggaaaacctcttttccctatctcacttcagttcactcctgattcagagactttgaatcattgagtagtttatctcttccttcaagaaatcatttgtttacacccaagcatcttgtagtaataggaaacttttattatcatagctgagtttgttggtttgcctaggcttgttttgttttgagcatccaaatttsacaagacccagattttgaagaccaaaagatttttcaaaaatgtatgaggtatagaacatccaactttgagagcactttaaaaaaactctaaatattagtctcacctaccttgccatagagccagtcatggtgatttttacatatatattcaaaatctcttaaaagtcagcttaagtatatgggctgggcgcggtggctcatgcctgtaatcccagcactttgggcggccgaggcaggcggatcactaggtcaggagttcaagaccaaccagttcgagactagcctggccaacatggtgaaaccccgtctccactaaaaatacaaaaatttgctggacatggtggcatgtgtggatagtcccagctactcaggaggctgaggcaggagaatcacttgaacccaggaggcgggggttgcagtgagccaagatcacaccactgaattccagcctgggcaacagagtaacactccaccttgggggtagtggggagagactcagtttaagtatgaagaggacattttaaggaaaaaaagggctttaaaaaaatggagaataataataatttcctttgtgtgaactctggtgggtctgatacaggtagcaatgtaatttgaaatcagttgaatttcctgtttttctctcataggttcaactactcaatttcatgctggcatgagaagataatcctttgaaacatcattaattgaagtgattttaaatagatttccttttgtaaatcaatggytcttttgtgcttttgtattgtgaatattcaatgggaccaatatgaacacagcttatgattgtatacaaatmccttgccagcacatgaaaacaaactggaatttgtatatataagcattgtgtatgtattcatgcacaataattattgaattacctgtatatttgtggaatgctaatttaaaacattaaattataaaccttgtgtatttatcaaatgggtgaaaagattaaacttttacgcattacaatactgctgaatgtgtagctcgaggtgtcctgcacttttcttataaggctactgaagttacatgttttgcctaatatattctactggtgatgaagacagataatatcacttgtagagacctatttttgtataatggtagaagttttgaattttatggggtattttgtcaagtactgaaataaaaatgacttcaccattttcaccacactgtatttgaaccttcttcatttttaactgagccatagttcttggtacatagcatctcattacttatgtcaaatatgtaggagtgagagattcagagaaagttgtcctaatcttagagttaatactgttgaaagttttccatgtgtctttgtatcaactttacatctacatagtgttttttaaaagctatattggtatttcatgattaatcagtatttactatattacagttagtgttacttgtttccaaagatgtgttctcacaaatccatggcccactaaaaagatgaagaaatcattaactcaaaagatcttaatcacattgcagccgaattaaacagtatccctgttgtccaagccaaattcagactgggaggctctcacagagataatacagatcgcaatgttatttctcatctggagtcctcctcaataacatggcaactcactaaaacagcaagaggactagtatttgatgcttacacctggaggattttgtcttattatttgatgttccatgatttataccaacacaaacaggcatggtagaaagttgtacatgcttgaacatttctaatttcagtcatccctcggcatgtgtgggggattagttccaggatcccccttggatattacagtccgcgaatgcttaagtctcttataaaacaatgtgctatttgcagatagtctacatacatcctcctgtgtacttcaaatcatctccagattatttgatacctaatacaatgtgaacattatgtaaatagttgctaatactgtatttttttattgtggggttttatttttagtattttgaacctgcagttggttgaatcagaggatacagaacccacaaataaaaggagccaactatacttaaattttccacattagaagctgggttccaataagaggaattctaaaaatagcaaacgtactctaaagcagttagttgaaggggcaggttgtgggtaaaaacctttttcagctagcatggcttgccattcaaggctattctgctctaagagacagtggagaaaaaaacagatggacaaatgatctgatcaagctgagttcagtgccattgtttgaccaccacgcctccttatgatagtaggcctctgcaatcacacttgtttatgcatctcaataattaattagtctgtgattaaaaatgaaatctgttaagaagtctaaaactattcactaaacattagactagccttatctcggggtcgtaactagatacttcaagaaatctgtaacatctgtaatatgaaaatatctgagatttctattgacaaaatcatggatactgctaataaaatgctgcccaaattcataattgaaataaatactaaattgcagttagaaattattagtgcaaataaagatgtaatttttccccacccaagttcctggattccctaactctgctcactgaagcacatattttacaattcatgaatacagactgtattttttcaaagagaattttaatctgaaaaattagcagagattctgccttcacaattagagtttaacatgagtcttccagtgttttaaaaagaactgtaatatacataaagcaaaatattttggcatcacctagtgaaaacagacgatgtggtattttttcagccatctcatatagttaggccccgagttacaatttgagataagttgattcctaaacagaatgtgctttacagaatgtgaccaattttattactcccaaggaccttgtttcagattatcttaaaaccagagttcactgatctcacattttaaaaagaaaaaagtttgttaactgttttaatcaatatgagtagtaacaaacatccctaattggattctagagaggaagcagggaaggccaggtgcggtggctcatgcctgtaatcccagcactttgggaggccaaggcgggtggatcacgaggtcaggagttcaagaccagcctagccaacatagtgaaacccccgtctctactaaaaatacaaaaaattagccaggcatggtggcaggtgcctgtaatcccaactacttgggaggctgaggcagagaattgcttgaacccgggaggcagaggatgcagtgagctgagatcgcaccactgcactccagcctgggcaacagagcgagactccatctcaaaaaaaaaaaaaaaaaaaggaagcagggaacaactgagccaaaacaaaattatcccctaaggacttgactttggacttccacataaatgtgaccttgtagaactagatacatatttatcaggtaaataaatatgtaattatttagtaattagatcaagatacatgagcagtctttagcattaataattacattatttttaggaactcttatcaaatatggtcctggatctcttaatttcccatatgcagtgattttagttaaaattccaaaggatttctttttcctataatatctccatttctgagtatcatcataccaaaacaattagtattctcttattcaaggctttagatgttcgattattccctacccttccatcctcacacacacaataattgcccagataaataataataaactgtggtttccaagtatctcactgggatttttattctttataccttgcaggactagtccaagatttgaataccctgaacttatttggcaagagcgatgagtactcttaaaattactatctggaaattatattatttagaatctgccaattacctagatcccccctcaacaattgtttcaccaaggaacttcctgaaagcacatgtataagtatcataactattagaaaatgtttcaaatgctattatatttgatagaaccattcagttaacaaaatcctaaatcataaactggcttttagaattacacacttaaaaaaacagtaaactacaagagttgttttgtacacttcattctcttcgaatgcctttgtggcttacagtgataatcacatatattcgttccttgcaacctttttcattttgatcttcgtttgtaacggataactgggttttcaggggtgtgaatcatagttgtataattcacagtgggaaagtatccatcaatgagatcaaattcatataaacgaagcatagtggaccaaattgtcttaatttgaacataggcaaaattttccccaatacaacgatgacgccctaaaaaaaagaaaaagttataagaatcagtttaaattctttctcatcctttttagcctggggtgatattatctacattttagatgaacagcaaatgtacagataatataataaaaagatgacattcttttcacataaaacaacatgaattattaaaaattccaggagattttcaataccacattttaggaaaacagtacttgactgatcacataacttttccaattactttttctgaaaatatatatctgggttaaatatatggaaagtttgaatcataagatggtaatctagtttgggaatatagtagaatattctgtttgtcccaagaaagccctagttaaaagtcaatatgaaaaccttccaatcaaacctcaaatgtcattataaatgtatggaagaaaatgagatttaatgaacccaaaataatatactaaaaagtcacacccatgtagaaactgacaagctgattctaaaatgcatataaaaatgcaaaggacctaggatatccaaagcaatcttggaaaaagaactgagttggaggacataaaactgatttcaaatctgacttcaagactaaagataaaacagagtggtactaggtaaggatcaacaaatagatcaatggaacagagcagagagcccagaacagaatatttttatggttatttgattatcagtacagacaccaaagcaagccaatgaggaaaagcaagtcttttcaacataaggtccaggaataactagatattacatgggggaaaaatgaaattcaactcctatgtcacaccataatcaaatactaattcaagaagggtcacaaaccatgatgctaacagcataaatttcagtagagaagaacaggagaatatcttcatgactcaggggctaagcaaaaattttaagacagggccagaaagcaataaccatttaaaagattgatacattggactaaactaaaggttattcatttgtcaaaactcaatgaatgttgacttaagatttgggcatttcattgcaagatttttcatcaaaagaaaaaacctaaactgatagtgcttagcacagtgcttgcttggcccataactgtacttatttctaggagtgacatttaagatgagcatttacaaattggtccatatttcaaatataacaactaaagagaagcttggcttacaggaagaatagtccaaggatttaatcgcaacaagcaagaagtatcctaattgaatcaacataagagtagataaattctgatgattcacaaaatgtaatattatgaaaatgaatgaactatatgcaccaacataaataaacagcacaattacgaggtaaaagaatgagtaaagaaattagagacatgtaatgtgatatttaacaagattaacgtaagatcatatatccccccataaattcaagtccatccagaaccttagaatgtgatcttaattgggaaataggatctttatatacacaattatttaagatgagatgaccctgacttagggtaggacttagatccaatgactggtgtccttataagaatgccatgttaagatacagagacatgaacaagaagaaagcctgttgaagacaggggtagtaattggaacaatgtagttacaagccaagggttgccaagagccaccagaagctaggaagatgcaaggaaggattctcctgtagaaccttaaggaggagcacggtcctgccaataccttgatttcacacttccagcctccaaaactgtgatagaatatatttctattgttttaagccacccatattgtaattagttacagaagccctaggaaactaacacaaagattgaaaaaaagatggaggagacattatatctgtactcaaatacctcatacaatataagttcagagactatggttaggaccaactataaatgagatgttaaaaagaaacagatttcagctttaacataaggctctaaaaatgacagctgtccaaacatagaatgagccatcataaaaggtaactgaacaacccacaacccatttctagtaaagttcaagtggaaaccagataattactagtttagaaacgattcctctttggggcagaatttgggctacagaactaatgctcttcccatctgttaacaatctgattctttggccaggtggcatggctcacgcctgtaatcccagcactgtgggaggccaaggtgggcagattgcttcaagcctggaattcgagaccagcctggccaacatggcaaaacccagtctctactaaaagctcaaaaattagctgagcgtggtggtacacacctgtaatcccagctactcaggaggctaaggcacgagaattacttgaacccagaggtggaggttgcagtgagctgagagattgtgccactgcactccagactgggtgacagagcaagactctctcaaaaaaaaaactatgattcttttatatattgtgttatacaccacagtattaaatttattacataaagttaagatctgaagttcccaaaggactttatattttcctttatatgtggaaaaagtgtgaccaatgacaagtcatctgtcatttaaatgatccctttggaaagactaaagcatagaatatagtttaatcagtacagagaaccaatggacagagaaattactggagaaacaagggtatagctaaattattttaggatcttactggaaatgaaatttgcaagcctacacacaacctgcccaaatttaaagaccattttctcatacggatattcagagagcaaaaatgttgactaacgatcgagaagagctttaattttaaaagactgcctttgctttttt

SEQ ID NO: 96718 - DNA, 42619 bp, Homo sapiens
  misc_feature (1)...(42619): n = A,T,C or G
caagcgggcactcattcagtgtgccaaggacatcgccaaggcctcagatgaggtgactcggttggccaaggaggttgccaagcagtgcacagataaacggattagaaccaacctcttacaggtactcggggaaagaggctgcgtgtgtgtgtgtgtgtgtgtgtgtgtgtgcgtgtgtgtgtgtgttggaggggagggtatgagagggagaaaagcaggagagaaaaactaggtaagggagaaagaggcacttcaccggggacagaaatagcagaaagggaaaaaaacaaatgtactgggaaagacagattcaggaaaggttacttcctaatcaaatgaatgcttccatttctggagaaatggattgtactgaccctaggggaaaaaacaggtggaattctgctgcttatttatcgagtgccttttctgtgccagccactgggaatacagaggtaggtaagtcttgccttcaaggagcttgtgggcaaggcaaacagagaaacataccaaattaaactttctctttaggtatgtgagcgaatcccaaccataagcacccagctcaaaatcctgtccacagtgaaggccaccatgctgggccggaccaacatcagtgatgaggagtctgagcaggtatgtggcagctgtttttggtttctggctggcagcttctgtgccgttttgcagtaatttaactctgctttggggaaattttaccccttaattgagtatcgagtattcagtatgtgggatgcactcagactgtctcaggaggggaaagtctgtgttggatagatacatcagaaatttggaattggggccaggtgcagtggcacatgcaggtaatcccagcactttgggaggctgaggcgggagaattgcttaagcccagaaggtcaaggcagtaagctgtgattgcaccactgcactgcagcctgggtgacagagtgagactcttgtcttgaaaaaacaaaacaaaacaccaggaattgggagccaggtgtggtggtgtgcacctgtagtcccagctactcaggaggctgaggcagtaggatcatttgaaaccaggagttgaagactagcttgggcaaaatagcaagaccccatctcaaaataaatagataaataaataaataaataaataaataaataagtaaataaaaggaatctggaattgctcttgggcaacttgtgtcattttacagataggaaactgaggtctagagaggttaagtgtctgaaataacactatggatcagtggcagttaggactctactcagttccttacccttggaataagtttggctcttttgaggcctccagtgcctgttcatttcaactcactgtatgtttctggctggagagaaggtccgctttccagctctctgtgtgttagtgcctcagggaggatgaatagtgcaggcttttccggggcatgaggtagttaggcctgtgctgaaactgaaatgacagctcaaaggaggtgcttctcttatattctctttaggtttctctgatagagatagaaataaggatgctgagaaggttctcttaaccactgcttcctgcatataccttggcagtcacccaagtttgtcctccttcccaaaatcttggcccaggtctttcaggaaaccctcatttgagcaccccttactctccttatttcccctccgggaggccctgctctaagcaagattcccacatggactgcccacacagggctcctcacacatggggtacatagttttgttggactagccacacgaggctcatcacacatgggctaaggtgaagcactgtattaggtgttaagggagtttaaaaaattaagagacacaattccccccacccaacgtggggaactcaaaaatagtctgaaagaacaactgtttctgatctctaggccaggagatagggcactggggcactttagaggaaataaggcggccattcttcttggtgccattattgttgcttctgctaccatattctaatccaacaactctcaccctaatcctctcttctcccaaaccatgggaactgtatcttcacacctaacttccacatattctatgaagggtttgcacacttcgctgtttctatgtcatgtgatctcttctgtccaaagaaaggtggaaaaaaatggggaaggaagggtaagactgagattcaggcctaatcagagacttaatcaattaaccactaaaaatatgccttgagaatatctattatgttccattaaatattccagttttaaaaagggtagaaattgacagtatggtagaatggaaaaaacacaggactgtttgggaggctgaggcaggagaatcgcttgaacctgggaggcggaaattgcagtgagccgagatcgtgccattgcactccagcctagttaacaagagtgaaactccgtctcaaaaaaaaaaaataataataaaataaaataaaataaacaacaacaaaaaacaaaacccataggactataagtcagaaatcctgagtcctaattctcactctatgaatgtctctgggcctgagtccctttgctgaccaagtgaaaagaacaactgatgaggaattccagcccacagttacacttatcagagcctgtgaaactgagtgtacaaattttatgcaggtgtgcattttttctgggggagaattcaccgccttcattaaatcctcaaatgatgtatgacttaaaaatagccaagaattactgagctgatgaattgccaagatccttccttgactttctatggtagagtaccaatgtgatttcagtcttataagtttgtgcgtttgtttgaaagattaacgtatttagattttcatgggtttaaagtggttggttgcttggtttgttcatttggttgtttttaaaattcattaattaaatatttatgaaatacctcctgtgtgccaggcaccatcctaaatactgggggtatgacagtgcacaaaattgacaaaaatctactctgtataacttaaatgttagtatgaagacagaaaaaaccctcaaaactcccaaacaacctaggtaaaatacgtagtgtatcagttcgtgatgataggttcaatggaaaaaataaggccaagcgcggtggctcacgcctactgtatgtagtcttagcactttgggaggctgaggtgggcagatcacttgagcccaggagtacgagtccaacctgggcaacatggcggaaccccatctgtacaaaaaattaaaaaattacccagatgtggcagcatgtacctattgtcccagctgctcaaaggctgaggcaggaggatccttgagcccagggggcagaggctgcagtggccgagatcacaccactgcactccagcctggatgaaagagaaagaccccatctcaaaaaaagaatgagcagggaaatcctcaccaaggtgacaagtgagcaaagatctgaaggtgaggggatccctgggatccctggggaaagagcagtccaggtacaggaaacagcaagtcctgagggagaagcatgtttgaagaccaagaaagaggacatgctgtaagctatctgaagccacagtatacaatcagcgatggccagttttgggttctttttggtgatctgggaaaacccctagtgatgcaagcaaatatgggggatgccaggtaccagtggggttagctgcatcccactcctggctgaaacctattttagagacaggcctgcatcagggaccctgggtaacggaaagtacctttttccttgcaggccacagagatgctggttcacaatgcccagaacctcatgcagtctgtgaaggagactgtgcgggaagctgaagctgcttcaatcaaaattcgaacagatgctggatttacactgcgctgggttagaaagactccctggtaccagtaggcacctggctgagcctggctggcacagaaacctctactaaaaagaaggaaaatgatctgagtcccaggagctgcccagagttgctgggagctgaaaaatcacatcctggcctggcacatcagaaaggaatgggggcctcttcaaattagaagacatttatactcttttttcatggacactttgaaatgtgtttctgtataaagcctgtattctcaaacacagttacacttgtgcaccctctatcccaataggcagactgggtttctagcccatggacttcacataagctcagaatccaagtgaacactagccagacactctgctctgcccttgttccctaggggacacttccctctgtttctctttccttggctcccattcactcttccagaatcccaagacccagggcccaggcaaatcagttactaagaagaaaattgctgtgcctcccaaaattgttttgagctttccatgttgctgccaaccataccttccttccctgggctgtgctacctgggtccttttcagaagtgagctttgctgctacaggggaaggtggcctctgtggagccccagcatatgggggcctggattcatttcctgcccttcctcagtttaatccttctagtttcccacaatataaaactgtacttcactgtcaggaagaaatcacagaatcatatgattctgcttttaccatgcccctgagcaatgtctgtgctagggaaacttcccgtcccatatcctgcctcagcccgccaaggtagccatcccatgaacacactgtgtcctggtgctctctgccactggaagggcagagtagccagggtgtggccctgccatcttcccagcagggccactcccggcactccatgcttagtcactgcctgcagaggtctgtgctgaggccttatcattcattcttagctcttaattgttcattttgagctgaaatgctgcattttaattttaaccaaaacatgtctcctatatcctggtttttgtagccttcctccacatcctttctaaacaagattttaaagacatgtaggtgtttgttcatctgtaactctaaaagatcctttttaaattcagtcctaagaaagaggagtgcttgtcccctaagagtgtttaatggcaaggcagccctgtctgaaggacacttcctgcctaagggagagtggtatttgcagactagaattctagtgctgctgaagatgaatcaatgggaaatactactcctgtaattcctacctccctgcaaccaactacaaccaagctctctgcatctactcccaagtatggggttcaagagagtaatgggtttcatatttcttatcaccacagtaagttcctactaggcaaaatgagagggcagtgtttcctttttggtacttattactgctaagtatttcccagcacatgaaaccttattttttcccaaagccagaaccagatgagtaaaggagtaagaaccttgcctgaacatccttccttcccacccatcgctgtgtgttagttcccaacatcgaatgtgtacaacttaagttggtcctttacactcaggctttcactatttcctttataatgaggatgattattttcaaggccctcagcatatttgtatagttgcttgcctgatataaatgcaatattaatgcctttaaagtatgaatctatgccaaagatcacttgttgttttactaaagaaagattacttagaggaaataagaaaaatcatgtttgctctcccggttcttccagtggtttgagacactggtttacactttatgccggatgtgcttttctccaatatcagtgctcgagacacagtgaagcaaattaaaaaaaaaaaaaaaaaaaatccctgaatgatgattagagacatcaccgctaaaaaactacatttataagctaggatttgttatatgcaaatattttctgcctcttcttttgttctgtttaaaacaataaaatgcatttgtataaaaaatgctttaaatgatggatatgttactttagcaagaacttttaggtcaggtttctcctttgttttgatgaatagtcaatgaaactaatcctcaagatctggaaactaaagatttttatttaatccaaatgttgcactggaagaagaaatcaacagtggtatatttacttaacaaggatgtgtgtaatacaagacaaccctggggattacacacttgaaggaatggaagtggcaaaggttaacaggcagaaagcagctggatgaaacagtttattttcatcttagaagattctagctatctgtggagaccaccactgttccccgaaaagctaaagttgttaagtttgtaggagtaccacaggtccttccccctgctgcaagacagagacttgctctgttgcccaggctgcagtgcagtggtgcaatctcagctcacygcaacctctgcctcccgggttcaagcaattctcctgcctcagcctcccatgtagctgggattacaggtgtgygccaccatgcctggctaatttttgtatttttagtagagatggagtttcaccatgttggccaggctggyctcgaactcctgacctcaagtgatccgcccaccttgacctcccaaagtgctgggattacaggtgtgatccaccacgcccggccacacaggtccatttttcatattccaaagcccagtatagaataaatagggttttcagggatccaccagggctataaaacagagttagcttttggggacatagtcctcttcttccttaaagaaacactgactaaaatagtaggagcaggttttyagagtagagttgggacatcactttttscctgattttctagatctgaaaggggtaacatgtcattaaagggtgatgatattgatatttagtgttgccaactgctattatcactgctttatcttggaaagttgccgactataaagacagattccagcctgcttgagttaagggaaaggccaaggctgctactgaattagcagtttctaaaactgtcttgtttttgccatttaccatatgttcactggtgctgccttcctgctgtagtataatcattttctcaaatcagttgcctctcaggacaagatcagcattttcctagggtccttctgtagcaccacttaaggaatgaacctatcacaggaactccctttgaataaaatgatggtgactcccacacgcaggaaagaatcatttacttcatttgctcttgatatactcccttatgaatttagaacaagtgatccaggattagctgtaactctgtgcttgaaaaatattttactactactaagtattcagaaatctttgttatcagtaggtggtggtagtgatagggaagggagctttgatcactaatctctcagactgtggccagaatggtgatgcttaagccaagtatkaatggctattaacatactgaggttagggaaggagtactgagaagtgctttgcagcaacactcgcagcttgtgtgatgatgcagaagaaaatctgatcatgttcaccctgctttgacaatgagccttgcccattggagaatgttcaatcaatagtagacctaaaaaaaatcaacttgttgctttcatctttttattgatagcacagccagagctaccaaaatgatttactggattctagcaaattaataaatacagtaatttgattgtaaaaggaaacattctacttggacattttagtagaaattgctagagggaaggagctcctggcrtacattctacttggatagaagagaagatagcacaggaggagaactggacagtccaggtatagattgttgagattagggattcagcagaaagcaaagcaaatgttctcattgttcttttgaggtacgaactctgaagagtcaagacattaaaaataaaaagcaattgaaccgggtagccaaacttaggcaaaaggaataaatatttggcaacattttgactttaactgccaatctgagattagtttcttcagaaatttggaagctgcaaaacgttgcctttcttattccatgaaaggcagggcaggcaaaggtaagaaaactgctgagtgggctccttgtaccagcaccaaccagcagcccttgacagcatagatgggatgagtgtaagggctatccttagcataagggaaagacggttataagctgagaagattgaaagaagaatggagccacaaagagaatagcataaataacaagaaggaaacatgaagaacaagcacttaagatattaactttcagtctttctccatttcttgatgtctaatgaggcaaaataactgggcaaggaccaccaagatgaagaagttaaataaaatgtcacaatgaaattgagtgcaataatacaactgttgactgactttccaaaaccacrgtgatcggtagagtatcatcaatgttaccgaggattttgtttctgcctcattataactcacttccatgtattttgtcagtatagtacgtatatttaagcactccagtgacaattatgacaatagtttctggaagaaatctatgactatagctttgggaagcacacaatatgaaaagggaatttcccctaaagacaaggaatgcagacaaattcaaacccttaagaacaacaacaaaaaagatttaaaaagactgatgactgtgaggcaggcacattttcctccttttgctgaactggggcatgaggcatttaggttaaccatggcttaactggtgttgggtaagctttatattataaaacatgaagatggcaaaggtttcacttaagtttttcttttactactttaatttgcttaaaagcacaaatgcttgtgcttgcagtaacttcctaaaagcagaagtaatgttcccttttactaccttaataaagcatttgcccctttgatacaaatgatttttttactgtgctaacagctgaaccagtggcacaaaattgagatggtatttactgcagcaaggtccctgtaaatcaaattctaagctttacataaaaatcttatttataaaaaatacaataccaagtacagtgagaatggagcatggagcagcagtgctccctgccagggccatgtggaagtggcttttgctacagtgcttgcttaatggcacaagtgaaaagctgaataaggcaaacacttgaagaggcagttttctgtaaacttctgggggtggggggaatttcctctcttgggacagatactggtttgggatggctaagatcagaaggtgtgatatttggctgcacctgacacatcacagatttaagatagcttctgctggatgagaccagttaactcttttaggagagaggttatcactacagctttctgcctttactgttacaatgtgcagccgccagatggtatcctcctatggaaaaaaatcacctccaaaatcttcctaagtgaaaagatacaaaataagctaagtcactaaaaggtttccttagcttaaagctccttaagaatcctacattgataactaagtaactttgttagyggtgtgtagctagacacaaatgctttaactagaatatgtattcccactcacttggtacctaatagtgatacatcgtaatgacacttggaaaacaaactggtcctgaggaattttggcctcttctcatgtcctcacttggaactttccagctttcgtgaygtatttgactcctttaaatggcttatatttctccccatacatgtccaaacggtttacttttaagcctgtatcaaaaagaatgaaaaagaataaattatcatcaycccaaccaatataatgttagcaatgagcgctatatggtaaatctgacattaaccagtgtcccttccaccatttggaagaaatgtctcttctatcatttacaaattattgcactttgatggtatggttttggttaagattcccacacaggcagggaatgtctgtgaagtataattctactttctgtgaatatgaataactctctttttggtgcttaaatgagggcggaggtgaggggaagctgtttgaaataaggtgctctgaaaaatcatttggtcggtgcctgtgagactgccccaccaagcacagtataaaaggcaaatgggctactgctctttctagagaaggaaacttttgttactcttctaaatgcctaataaatgagcttgcaaaactcaattacccttaactacaagtcaaccttatccttacctgaaatagcaagctgctggatcttaaactgtatgttgaggctcggattctcttctggtttgggggctccagactgtaaatttaccagtcctttaagacttgggagcttttgtggagtaatttttcccacatcccatgttagtaccttaaaaagacaaaaaatgaaaaacaaatagaaccatttattaaagacaaaccctcaaaaacaaagttcaaagatatcataaacttctgtacaaactgaagtgcagtctcttgaaaacaagagatctggcatctacagtgagtttacctctgattaattctgtgactttgaatggggagtgagagcagagaatctacatttgttgagcattttcttttgtattagcaccgtgcttagcattattcatatgttgtctcattgagggctgtgaagtagcttttgtcttctatttacaaatgaggaaattaaagctcagaggacattaaggctcagagatcaaatgactcgctcaaggtcacatagttagtcagaggtaaggctgggatttgaacctaaggccctctgatttcaaatgttctccatcataaccatcttcacttttctctgggcctgtttctttttcttttttttttgagacagagtttcactcttgttgcctaggatggagtgcaatggtgcaatcttggctcaccacaaactctgcctcccaggttcaagcgatgctcctgcctcagcctcccaagcagctgggatacaggcatgcgccaccatgcccagctaattttgtagttttagtagagatggggtttctccatgttggtcaggctggtctcgaactccygacctcaggtgatccacccacctcggcctcccaaagtgctgggattacaggcgtaagccactgcgcccagcctctgtttatttttctgtaaaataattagattgacttaagatggtgtttttaaaacttttagctgtgaaacccattgttcaaatgaaatcttcggtgtgaaggctcaacagcagatgagaaagaaagcaaagctgtcatagttgaagctgtggtaaagggccaggaatctgaagctccctttctcagccctgtgtggtctccaggaggaggttctttgaatccttacaactgtattaaataatctttaacattctatgatgttattcaaaaaacatgtcttttcatttatcaggtagctcaatgactctgctattgaaaacaatcatatttaccagctaatcaggaagctgagagaaaatcatctgctacagtttctctgaaaaccctctgttacacaaaaatttaagtagagtgaggaagcaactttcctagccctgtgaaagagtatgaaataatgcttttaaattataaaggaagaaaaaggtcttagtgatcaatttatatagaaaacttagtaattcatagaccatcataatatcttcttcaatctacataatgttttctctttttaaaaaagcttttacttctttcttattagatagcagagtcaggctctggattaataatggatgagtgaaggcacactctgaaaaaggacagaatgacacatttttctgttcatctactcagtagcagctgcaggattccttctgcagccagtggcagaagcacagcacagtatgctctctaggttttgatacgaactttagttttaaacaargtgccaaacctttccctccattcctccccacaaatcacaaaatagattgcagaaacacttgstcactcttgatttgaagtggctgtaccttggtgactggatcaaatgtatagctgccttgtgtgggtgtcaggttcatgttcagcacaacttttggcatgtgaactgtcactgtaattccttcaatagttttccccatattctgctttggtccaattgttatatcaaatctgccgcaagaactgttctccttaaagctgatactatgtttcacatacactggtattgccactagactaaaaagagaaacagagaaagatacaaaagcacaaacacaattaatggtgtggggagagctccagaggtatcctgaaaacctctgtccagagtatcctaccctgcctttaactccacaataaggtactacagagttggctctctgtagccacagttctgcatccttgaatttgaccagctgaggattgaaaatattatttcacaaaattggccaggcgtggtggctcatgcctgtaatcccagcactttgggaggccgagaccagggttgggaggggatcacctgaggtcaggagtttgagaccagcctggccaacatgatgaaacctcgtctctacaaaaattagctagggctgggcgcggtggctcacacctgtaatctcagtactttgggaggctgaggtgaggagttcaagaccagcctggccaacatggtgaaacctcgtctctactaaaaatacaaaaattagctgggtgtggtggctcatgcctgtagtcccagctatttggaagcctgaggcaggagaatcgcttgaacctgggaagcggagattgcagtgagctgagatcgtgccactgcactccagcctgggcaaaggagcgagacgccatctcaaaaaaaaaaaaaaaaaaaaaaaaaaaaaaggtaaaaaataacaatataactacaataaaaataaaaagtcaacatggtataacaattatttacacagtgtttacagtgtactatcacaagtaacttggagatgatttaaagtatacaggaggatgtgcataggttatatgcaaatactacaccattttatgtaagggactcgagcatctgctgatttttgcaaccagtcctccaaggataccaagatggcagtacctctagaactgcagattcagtatctacacaagggggagctgagtacagcataatgttcttgtaccactgtgctgggaactgtatacaaatcaagacagaaatctgaagtttaataacagtataaacaattggggtggctgggtgcagtggctcacacctgtaatcccagcactttgggaggccaaggcaggcagatcactggaggtcaggagtttgagaccagcctggccaacatggtgaaatcccctctctaataaaaaaaaaaaataacaaaaaacaaaaattakctgggcgcggtggcaggtgcctgtaatcccagctacttgggaggctgaggcaggagaatcgcttgaacccaggaggtagaggttgcagtgagccaagatcacaccattgcactccagcctgggtgacaatagtgaaactccgtctcaaaacaaacaaacaaaacaaaataacataaaacaaacaaacaaaaacaattggggcaaatggccctagtttaaaatgaattatgatcccactgaaaaataatgtaaaatatgttttatataaatgaaaacagttcctatgtgataagagccaagaaacaggccaggcacggtggctcacgcctgtaatcccagcactttgggaggctgaggtgggcagatcacctgaggtctggagttcgagaccagtctgaccaacatggaataaccccgcctctactaaaaacacaaaattagccgggtgtggtggtgcatgcctgtaatcccagctacttgggaggccgaggcaggagaatcacttgaaccctggaggtggaggttgcagtaagccgagatttcaccattgcactccagctgagcacaagagccaaactccggcttcttcccacggggtgaaggatnnnnnnnnnnnnnnnnnnnnaaactccggcttaaaaaaaaaaaaaaaaaaaaaaagggaaaagaaaagagccgagaaataatttctctgtttttgagttctgtcatgatgttactcaaataacttttggtattttcaagaaacaaactacctataactccgatccccaatgctaaattttttttttttttgagatggagttttaccctgttggccaggctgtagtgcagtggtgtgatctgtcactgcaacctctgccttccaggttcaagtgattctcatgcctcagcctcctaagtagttgagattatataggcacacgctaccacgcctggctaattttgtgtttttagtagagacagggtttcaccatgttgaccagactggtctagaactcttgaccccaagtgatctgcccacattggcctcccaaagtgttgggattacaggagtgaaccactgcacccggcccctcaatgctaaacagttccttaaaaactcaacgcagagaagacgtacttgaagcaggtaaattggggaatgtcctcacgaactacaggtaggtctgtctccttgttggccacaaactctacagactatggtaagattatggcaatggttcatggttttgcccaggttatgcatggtccgttttgctctgcttgcaaagtactcagctttcagaagcagagcaaaatggactatgcataacctgagcaaagaaccagtgccataatttgaccatgcataaccttgcaaaggaccggtaccacaatttttgcccaggttatgtatggtttgcttgttcttggctatagattttactctagtctcacttagtaccactctacactcatacattcaaagtatacggattattttaggtgcgtattttcacccgttctcactgggtctcctggtgagctatggttaaagtgagcagtgatgacctcaagtactcaactttcagaaagaaacagggaaaggtgagttgtacttgatatgtatgatggcagattctggctgatgcatcaacatacttttgtgagctgacacggtatgatatgagtcggaaatttccatctggaggaataaatgacaaaactctttcagattcccaacgcttgaaccggatgcaggggtgaaagctgacatcatccagaagcctagggttctgccagaaaaacagaagacagtcgttcatagactataatgaatatgggaactgtactcagataccttgacaaatatgttccctgaagataaagcagtcatggaagagtttatgaccacatctacacaaccttatagtttcataatgctttaaagtttgtaaatattttatgtacattattttatttgaatttcaataactataaaggagaaaaggcaagtagtattatttccctttaacagattaaaaaactgaggttcagaggacttaaggtcagagcaaactggtgacaacaccagaagtcagttctcttaattgttcctagcagtatatcatgctgactctaaaatgatacaaaagaccagtgtcctttcatatcagcaaagcaaataattattcagtaaaaatgatactggatatttgcagaagccagccagccaattttaagccccttctagcacactcaggcaaagacctcccttagtctttccacaaagaccacgctcatcatgtaagcgactgtcttaggaaactctgctaggaatatttctgagataatcctttgcaatctaagatgcaaacttatctcaatatttatcatttcatttagtacttcacatgtattaggcattcaaggggctataaaacaggagaataaaacttaccatgaaagaaagggagagatcaggcattccagatagtttaatgcaagcatcaatgaccccctgaatttctgcaaagactgtagatcctgaagaaagaaaaaaaaaggaagataacatcaatggaatatgagtcttcactagacctatcactgtatctttttatttttatttattgtttttagagacagagtcttgctctgttgccaaggttggagtgcagttgtatgatcatagctcrctgcagcctcactcctgggctcaagtaatcctcctgccctagcctcccaaatagctgggaatataggtgcgtgccatgacacctagcccaacaatcactacatctagaacaatagagataccctctgggtgtcagattaactgaagctttacatctctattaacaggtcaggggacaaggtccatacttaactctggctggaatataataataattcttttatttttaagagataaagtctgactagctagtcccagctggtccccagagtaactgagactacaggtatgccactgtagaatataatttttttttttttgagacagggtcttgctctgtcacccaggctggagcgtagtggtgctatgatagccagcctcaacctcctgggctcaagcaatcctcccacctcagcctcccaagcagctggtactacaggcatgcacctccacgcctggctaatttttgtattttttttgtagagacagggtcttgttatgttgcccaggctggtctcaaacttctgggctcaagcaatccgcctaccttagcttcccaaagtgctgggattacaggtgtgagctaccatacccagccagaatatgctaattctaaggaaaattaaactgtttcctttatggagccaaccctgtaagatgactggatatgagtttaaaacatttggcaggacgcagtggctcatgcctgtaatcctagcacttagggaggctgacgtgggtagattatctgagctcaggagtttgggaccagcctgggcaacatgccaaaaccccgtttctactaaaaatacaaaaaattagccaggcgtggtggtgtgtgcgtgtagtcccagctacttgggaggctgaggcaggagaatcgcttgaacgtagaaggcggaggttgcagtgagctgaaaccacaacactgcactacagcctgggcgacaatgtgagactctgtctcaaaaacaaaataaaacaaaccaaccaaaaccattttcaatagaattttatttttttttaattttttttttgagacggagtcttgctctgtcacccaggctggatggagtgcagtggcgctatctgggctcactgcaagctctgtctcccgggttcacgccattctcctgcctcagtctctcgagtagctgggactacaggcgcctgccaccacacccagctaattttttgtatttttagtagagatggggtttcactgtgttagccaggatggtctggatctcctaacctcgtgatccacccgcctcagcctcctaaagtgctgggattacaggtgtgagccaccgcgcccggcttcaatagaattttaaaatgtggcaagtgtattatgaaatggactaagttaacttttaagaaataggatccataatagaaagatatctctttttttttaagagacagggtctccctctgccatccaggctggagtacagtggtgtgaacatagttcaccacagcattgaactcctgggctcaagcaatcctcctgcctcagccttctgaataggtaggattaaggaagccatgcctagctaatcttttaaatttttgatagatatggggtcttgctatgttgcctaggctggtcttgaactcctgggctcaagtgatcttcctgcctaagcctcccaaagtgctgggattacaggtgtgagccaccgtgcctggcaaaaatctattattctataagatggaatgttataatgaaaaggggactcatggaagagaagatattgactataattcacaataagccatcattacatattaacaagttgtgtgacctggaacagttcacttaacccttctgggctttccttatgtgtaaaataaatgtaaaggaaggactagattttttttcttttttctttttttgtttttttagagatggagtctcactctgtcacccaggctggagtgcagtggtgcaatcttggctcactgcaacctctgcctcccagggtcaagcaattctcctgcctcagcctcccaagtagctgggtttacaggcgcctgccaccacgcccagctaatttttgtatttatagtagagacggggttttaccatgttggccaggctggtctcaaactcctgacctcaagtgatctgcctgcctcggcctcccaaagtgctggaattacaggcgtgatccaccatgcccggctgctatttttaataataaaattttacgattcttatagagtactattgttttgtctggttaaaaagataatcagattgggtgtggtggctgatgcctgtaatcccagcactttgggaggctgaggtaggtaaactgattgagcccaggagttcaagaccagcctgggcaacatggtgagaccctgtctgtacaaaaaaaacaaataaaagttagccaggcatggtggcgtgtggcgtgtacctcctgattggctgggactataggctactcaggagtttgaggtaggaggatcacatgagctggaggtcaaggctacagtaagcagggactgcgccaatgcactccagcctaggcaaaagagcaagaccctgtacttaaaaaaaaaaaagaaagtgaaaaataatcagataggggcttttaccagaagtactgcacataatgtagtagcaaaagcatggtatatagcagattttcaataaatgttagaaggaataaatagcaagaggtagaggtacatagggtaataattggcttaaagtaaggcattatgagttctgatttacatgtttggcagacctcaactagtggttatgaaaattatatgtaacctatgggcaaaataaacagatttatgggccaggtgcagtggctcacgcctgtaatcccagccctttgggaggccaaggcaggtggatcacttgaggttaggagcttgagaccagcctggccaacattgtgaaaccccgtctctactaaaaatacaaaaaattagccagggccgggagcggtggctcacgcctgtaatcctarcactttgggaggccgaaacgggcagatcacctaagttcaggagttcgagaccagcctgaccaacgtggagaaatcccatctccaccaaaaacacaaaattagctgggcatgctggtgcatgcctgtaatcccaggtactcgggaggctgaggcagaagaactgcttgaacccgggaggcggaggttgcggtgagctgagattgcaccattgcactccaccctgggcaataagagtgaaactgcgtctcaaaaaaaaaaaaaaaatttagccaggtgtggtggctcatgcctgtaatcccagctacttgggaagctgaagcagcaggatcgcttgaatccaggaggtgaaggttccagtgagccaagatcatgtgattgcactccagcctggacaacagtgtgagaccccgtctcaaataaataaataaataaacaaacagatttaaaaatcatcagataatgaatgcctttccaccgaaaccatactgccaaaggacttcaattttcttttcctttcttcttcttttttttttttttgttgagacagagccaggctggagtgcaatggcatgatcttgtctcatygcaacctctgcctcctgggttcaagcaattttcctgcctcagcctcccgagtagctgggattacaggtgcgcgccaccatgcccggctaattttttgtatctttagtagagacagagtttcaccatgttggccaggctggtctcraactctgacctcatgttccgcctgccttggcctcccaaagggctgggattacaggcgtgagccaccgcgcccggccaggacttcagttttctattcatctgtgtcagatgaattgtttttccccaaataagatgacatgcacacaattacctgatttatctataattgcgtctatttcttcaacaacatcaaaataggcttcattgtttgtgtactttacccctgcccgacgccatggtatgttggacagctgcccggtggggagtgtgtccccaacattactactgcctagaaaccaaaaaaggagaaggcaaagctgatgtataaaacagtcatgagaaaatttattactaggaaaaaaaaagctgcttcttcaatgtttggatttttcttaatgaagttgtggatggtcactagaattgtcagacatatccataccaacatgatcaaatttctagaaaagaaatataggccatgtggccctctgtctacctgccaaaccaggttaaatttatttacttatcttttgcctcctgtgtgttaacagtaatctaatctaattccagtggctcaacaacagaatctctgccactgatgaaaaaagaggttggttgtttcaaaaccttctgccaataaaatgtctccagtgagaatacagagttataactaggcccttcagtattcaactttattttacatgagatgctgccaagcacgcctcagtggagtaaatggaatctggccttttcctattttaaggtcagcatacccatacggctgcaatatagctagtattcagtatccagctcatttcctggtaaactgacacatgcctaaaaataagtctggttgtccaaaacacatatctttgagctgtgacttacttaatattttggttaatttatatttcccattcgaaagtactacatacttaacaacaacaaaaaggtagagttcagagaagtggtttaaagaaaaacacctgtcttcttactaacaaaatatatctaccattaacatttttgttaatattatggtattaacattttaatataatattaacattttggtatatttctttgaatatttccaccaccagaaggttgcatttttttctattttgataattttggtttttaattgcactttaaaatatagtcgcaatcatactgtatctacaattttgcagtctacttatgattggtgttcctacctgcaacctataatcatgttatcttcctgctcaaaaacgttcaatgtttgctcactggctttatgataaaagctaaatatttatcctagctttgaaggactttctctactttttaatttgatctctaacttctcaagtgaaaaacagttctgcttctgctaaagggattaataaaactttaggtttttctctttcatgtgtgtttttttctcatacagttccaccatggagaatgctcttattccttcctcacttcctgaattctactgattttccaaggtggccacccaccacagttcaggagggattacttcattaatggaaccattctcttgaactttgtaatacactatctaatgaatctgttatgttttgcattatatattttagtaacttttctctgactataaaatacatgtttattttggaaaattagaaagtataaagcaaaaataaatataatctgtatttagctgggtataatcattgtaaatacttttttgtcggagtgaatatttatatataagaataatttttttcagttttgtgctgacttttcaatttaacgttacatcatgtgtatttattttccaatgctattactttatctgtgaagtatggaattgctttttaaagtcttatacagttatttacttaattttttttccaatgtcccattcagagtataagttttaggagtacagacacaccatcttatctttctttgaatttctcctaacattcgtccttacacaaaggatgaataaagagctgctgaatgatctttttcttataggcctctctcacctcatttttaggtcaaggcactggacaggggtttacaatggttgacagtggagttggagtggcatataacatttcataggaatctttgtctaaaagactttaatgctttcgaaagaatattggtatctggatgtgcctaatttctagctacactcaagaattaaacccagctggaagcttacaacacaagtacaggcccacaatgcatgagatctcataagtaaactatttcctattttttcttaatacatcttctgaatgcataaaaacaaagacttggaggagattgtagtactgtgtggttaagcgtcttaaattttctattctctagtaattgtggagtagcagcataccagttatgtaatgctattttaaatattaaaatgccagtctataaatggactaaattctcttctargtgggctcatatactggcttctttaggaataactggaacaatttattcagtcttagtatttagtgttaaataatggtaataatattgttgtggtgttttagaaaaaaaaaaagagtaataaccaaaagttctttatcacttaaggtctagcctctttccatgaaaataaatatatagtacatccattttaactttaccagtaactttaattatggccaaattgtactaccttaataatatgtcagatcatgagcaataatgagttgtttacaaagttttaattgctcagttactagcacagtatgttttcatcttacctgtaatagagttgacaacagagcgtagaattgttggtggtttaatcaattctttcaaaatgttagattcggtagccagtggaaatccattgtctaacatttcttctaagagttcatatactatgaccacattatccttaattgcagcctctgaacactcaccaaagtagtcctgacaaaatacacacaaaatatcacacaatggaaggcamaaagaaaggcctgctaaatacttttygttctgaagaataaacttagagtagcataattcattgcttaagctgctgaacatatataaaacagagcgggggaaaaaaccctctatagtccgggcatggtggcccatgcctgtaatcccagcaatttgggaggctgaggcggatgcatcacttgaggtcaggaattcaagaccagcctggccaacatggtgaaaccctgtctctactaaaaatacaaaaattagctgagtgtgatggtgcacacctgtggtcccagctacttgggaggctgaggcgggaggattgcttgaacccgggaggcggaggttgcggtgagccaagatcatgctactgcactccagcctagggaacagagtgagactccgtctcaaacaaaacaaaacaaaacaaaacaaaacaagcaaacaaaaaaaacccctctatagtcctaatattattcctcaatattttcttgatatttctaggttgaatttaattcctattacatattataccagaaagtattgaaacattaaattggaatttgagctataaacttcattcaccctgattatcccaaaatacatatagataagcttaaattatttggtatattccgcaagacaaaataataaaatgtaaatatagaagagttcataaccaatgaaaatcttgagaccattgagagaactgtatgcggagggcattattgtttcctgatgatatacagtcatcccttggtatttgtgggaattagttccaggatcccctgtagataccaaagttcacaattctcaagtcgctgacataaaatggcatagtatttgcacataacttatacacatcctcctatatactttaaatcacctctagattacttgtaatatctaacacagtgtaaatgctatgtaactatttgttatactgtattgttcaagtaataatgagaagaagtttgtacatgttcagttcgatttttttgttcaaatatttgccatgtaaggttgggtgactttatggatgcagaacccatgtatatggagagccaactgtaatctgtaatacatataaaaaatagtgaatagagcagccatgtgtgtaactgtataccacacagaaaagggcttatgaatttacgcttaaacagagagagacagacagtaaacatcaaaacctgggtaattaaataatataatcatgtctcaccttcagctaacttgggtcatttaacttagaaaggtatgatagataaccaacctgaaaagtgtcagcaactcgatgtaggaactcaattacaaagagaggtggcacttcggtctgtatgacagatacaaagaagagcttatcccggtagatactgatgaggtagtggtgaggtgttgaaatgacaggtggtacattttcaacatcagcagctttctcttgagcttcaaagaaataatcacagacagactggctcacaacgctcttccagtgcttctctagaaatatgtcaccggaacagtttatgagaaatagactgtggatcattttctgttggggcaaagaaaggtttaaatttattatacattaaatatcatttaacatacacaaaaagattatacaccttgaccaagtgggatttattctaagaatgcaaggctggttcaacatacaaaaatcaatcaacatgatatacaataagaactaaaacaatcatttcaaaaggtgcagaaattgcatttgacaaaatccaacatccttttacgaaaaaaaaaaaaaaaaagaaagccatttaagaacaaaaagaaacttcctcagccaggctcagtggcacatgcctgtaatctcagcactttgggaggctgaggtgggcggattgcttgagctcaggagtttgagaccagcctgggcaacagggcaaaacatcatctttacaaaaaatacaaaaattagccaagcatggtggcacttgcctgtagtcctaggtactcaggaggatgaagcaggagaattgcttgagcccaggaggaagatcgacgctgtagagagctaagattgcgccactgcactccagcctgggtgaccaagtgagacactatctaaaaaaaaaaaaaaaaaaaaaaaaaatttccttaacctgatgaaaaccccacagctaatattatatttaaaggtgaaagaccgaacactttctccttaataacaaaacctaacaaggatgcccagtcccatcatttctattcaacatggtactagaggtttgaaccagggcaattaagcaagaaaataaaacaaaaggcttccaaattggaaaggaagaagtaaaactgtatctgtagaagatacaatcttatatatagaaaatcctaaggaatccacacacacacamaaaaaaacctattagagctaataaatttagttcagcaagcttgcaggacacaagtcaatataaaaatcaattatatttctatccactatagctataaaatactaaaaatgggctaggcattgtaactcatgcctataaacccagcactgtgggaggctgaggaaggaggattgcttgagctcaggagtttaagaccagcctatgcaacatagtgagacctcatctctattaaaaaaaaaaacaaaacaaaactgaaaatgaaataaaacaatttcaggccgggcgtggtggctcatgcctataatcccagcacttggggaggccgaggcaggtggatcacctgaggtcgggagttcaagaccagcctggccaacgtgcagaaactctgtctctactaaaaaaaaaaaaaaaaggccaggcgcggtggctcacgcctgtaatcccaacactttgggaggccgaggtgggtggatcacgaggtcaggagatcgagaccatcctggctaagacggtgaaaccccgtccctactaaaattagccaggcgtggtggcacgcacctgtagtcccagctactcaggaggctgaggcagaagaatcgcttgaacccgggaggcggaggttgcagtgagccgagactcaagattgcaccactgtactccagcctgggtgacagattgagactccatctcaaaaaaaaaaaaaaaaaaaatcccagctgccttttcgtggaatttgacaggctaatcctaaattcataaggaattgaaaaagatcaacagccaaaacaatcttgaaaaggaacaacaggggcgaacggggtggggtgcgccattcctccctggccagggtgcttgggagcagggacccccacctgcagctgagcatccttcctgggagccactctgctgttccaaggacctgggaggagccctcggtcccccgggtgccagggccctggggcgcacacatccaccccagcccgagcctgcgtttcctgagccaggatctggggcgagatggctgcaggcggccgtgcgcccaagccccacgtcctcgtctgccttggggcgctcctggccagctggtcgccgtaggttaaactcaccttacacctgtaaccggtggacttccctacatacctttgcaagcccttctgtgccgaccagcgccttcaaagcggggtcttctgcctttacttttggaaaagcttttcattttgaaatacttggctgacttacaaaagacttcccctcacacttgacatgattgacaaaaggtctgaaatgcttcatctacagtctgatttactatgaaacaagaattggggggatgcttacaaaaatatgtagaattaaaaagattgaaaaaatatatatatttgaattaaaaaaaaaaaggaacaacgaagatggataactcgtgcttcctgatttcaaaacttactacaaaactactatgtggtattggcacaaggacagacmtrcagatcaatagaacattaacccttacatttatggtcaactgattttcaacaagggtgccaagacctgggtgaccagttggagagagaacaaccttttcaacaaatggtactggaacaactggatttccacatacaaaagaatgaaattggatacaaaaagcaacacaaaatgtatcaaagacctaattggaaaagccaaaatgataaaactcttagaaaaaatatgcatagattttgactctggattagacaatgttttttaagatacgataccaaaagtacagacaagaaaaataaaaaatagataacccagagtccatcaaatttaaaacttagtgcttcaaaggacattatcaagaaagcaaaaattcacaaaatgatagtaaatatttgaaaccatatatcttaaagggacccctatccggaaaatataaagaacttttactcaataataagaagggccaggtgtggtgactcacaactgtaatcctagcactctgggaggctgaggagggaggattgcttgagcccaggagtttgagaccccgtctctataaaaaaatttaaaaactagccaggcatagtggctcacacctgtagtccctgctacttgggaggctgaggtgggaggattgcctgagtccaggagtttgaggctgcagtcaactatgatcccaccactgcaccctagcctgggtgacagagggagaccttgcctctaaaacataaaaaataaataaataaacaagccaattaaaaaatgggcaaaggatttgaaaagacatttactcaaagaatatatacatacaaacgaatcttacaaatacgatgttgaataaatgaagccagatgcaaaagaatatacacagtatgattccatttatatgaagttgtagaacaggcaaaactaatctacgttaaatcaaatggtttcctttatggagagtggagggccatggggatgatctcctagagtgctggtaatgttttatttcttttttattttccttttttttttttttttgagatggagtcttacactgtcgcccaggctggagtgcaatggtgttatctcggctcactgaaacctctgcctcccaagttcacgagattctcctgcctcagcctccctagtagctgggattacaggcacacaccgccacacctggctagttttttttttttttgtatttttagtagagacgaggtttcactatgttggccaggctggtcttgaactcctgacctcgtgatccgcctgcctcagcctcccaaagtgctaggattacaggagtgagacaccgcacctggccaatgttttatttcttgacctgcatgatgtttacaagctgtgttccttctatgataactcattaggctttacattgtgatttgcatactttctgagtgttagttatgcttcctataagaagtttattgtccctgcaatatgggggacaatggaaaaatgtctaattatcttaccttgttcctatcttttacgtgtataagcaccagtatcaggtgtttagtctagtggctcaatcattccaagtaatagtactatagtctaagaagaaagaatttaagacctatgaatacagtttctatgaatgaagataaattccaaagaggaaaggaagactttccagaattgattcatttgattctgttgacagaaaacaacatcaaccctttcttttatgaaagcrgctgacatttaaagaatatgtggtgatgatctcctcttcccattcgacacatgttcagtagttatcaataatactagttactaagatatgttttagtaattattgtattaataaagtatgaatactgttaacagtttagggttcctgtttaattagaaccaaaaaatttctttgtttaaagccctctgtttagccaagaaatcaacttgagttattagcaataaactctgacacctcagggttggaacctgccaaatttttctactttatctagtcagatgctttgcttagtaggcttgctttgtgtcttatatttctgtctgggtattaatataagtgccattagaatacttagacttgctatatagaacctgctgattttaactataatctttagctgataaacttttcattttcattttttaaatgaaacaggaatatccaaccataagatctgcaactaaatttttattattacacmtttttcttggaagaaaatcagcatctgaaatatataatgtatgacttcaagtggagcactgtaatccacaagcagactcagatttgggcacttcaggtgagtcacatatggaacacagcattctttgcaaaaattaatcttttggccccattcaatgtggttatttttggccaggcacagtggctcacgcctgtaatcccagcactttgggaggccaagactggtggattacctgaggtcaggagttcaaggccatcctggccagcatggcaaaaccctgtctctactaaaaatacaaaaattagccgggcatggtggcgtgcgcctgtaatcccagctacttgggaacaaagcttgtttgtttgtttgagcagagtctcccactgtcacccaggctggagtgcagtggtgtgatctctgcttactgcaacctccgtctcccatgggcaagcaattctcgtgcctcagcctcctcagtagctgggattacaggtgtgcaccaccatgcccagctagtttttctgtttttagtagaaatggggtttcaccatgttggcctcaagtgatccgcctgccttcgcctcccaaagtgaagctactgtactcagtccccattcaaagtgttttattcattaaagataatgaataataaatgaattaatactatctaaaatgtattgagtacttattatgggccagacactatgctagacactttatctcatcttattttcacaatgctacaccataaatactactattatccccattttacagataagacaatgtcatctcagaaaagttaggtcaattacctaagatcacgcagtaagctaggattcaaacctaaatccagctgaattctgagctcctgctcttatctgccttgtagagactaattattaggaacacgttctaatacagcactgtccaacagggctttctgcaatgatggaaatgtcctttatctgtgctaatatggtagccactacacccatggctattgagcacttgaaatgtggctaatgtacccaatactgaagttttaatttttttgaaattttaattaatttttttttgagacggagtcttgctctgtctcccagacaggagcgcaatggcgtgatctctgctcactgcaagctccgcctcccaggttcacaccattctcctgcctcagcctcccgagtagctgggactacaggagcccgccaccacgcctggctaattttttgtatttttagtagagatggggtttcaccatgttagccaggatggtctcgatctccggacctcatgatccacccgcctcggcctcccaaagtgctgggattacaggcgtgagccaccatgcccggcttttttatttttattttttttttgagatagggtctcgctctgttgcccaggctggagtgcagctgcgtcatcttggctcactccaacgcccacctccagagcccaagcgatcctcccacttcagtctcctgagtagctgggcttacaggcgtgcatcaccacacacagctgagtttcaaatttttgttttgtagagacaaagtctgcctatattgcccaggctgatcctggactcctgggctcaagtgatcttcccaccttgatctcccaaagttctgggattacaggtgtgagccaccaagcctagcctgaagttttaattttaattaatttaaatttaaataaccatatatggttagtagttaatatattgaacagtgcatgaatgtgctgctttagcttatgatttttttttttttttgagacggagtcttgctytattgcccaggctggagtgcaatggcacgatttcctcttaccacaacctccgcctgctgggttcaagcgattctcctgcctcagcctcccgagtagctaggattacaggcatgcgccaccatgcccagctaattttttgtatttttagtagagatggggtttcaccatgttggccaggctggtctcgaactcctgacctcgtgatccgcccgcctcagcctcccaaagtgctgagattacaggcatgagccactgcacccagcctagcttatgatttaagaggaggaggtaaaagacatttcttgtttagttaggaggcaaaagacattctagttgttatgctgaggaagtttaataaattatttagagtggaarttatatttaaaagcaccgacacaggttatctaaaatcattcatcctatcgaaaatatagttcacaaggatttatagtgctcctttgccacaatacactctgaaagagttgcttgttttgaaagtaagtgattttgtagttactttattttagggccagatctctactcatcctcttaagctggtgaaaaattctttccaggaaagtttccaccgaagttgtttttattggcagtagttcaggtctcagaatacagaaagttaaaccagcctcctagatttattgttgttatccttagtgctgagatgaaagcataacacttgtaagttctcgactgtgcttagctttaaaacccatcttaaccttctataataggaaaagagagcttacttcttctatccatattatgaccaaggtctaatgcatataacaattaaataataccatgttgcagtgtaaattagcctgtttctttatttatcgtccttttggtagctgcagttatttttttaattattattttcataaactttctgagaaaactacacactcattattaccacaaccatctttttgttcctagtggcttttgagtcataaaacagaattctcccagcttatttaaaagccactagaagaaactgtgttcagaggcagacccaccagagctttgactgcagcttaaatacatcataaatcctttttactaaacattttataatcatcctgggtaattcacaagcaatgcatttacaatagtcaaaatattcttggaagacagtgtctaaaaacaaaaatgtattccttctatatataatatgatggaggcacagaagggcctatactgaacttgagagaatgagaccagaaaagcatctactcttctgattctcagccaatatcttgaccacatattcattcaacacagagttttgaggcactgggtatataagaacaaacaaaattagagttcctatactcacagcatttagagatgagcagagaagacaacttaatacagttaagatgtaattcctacgatgatacaggaaatatagtgtgctgtgggaatctacaaggcttagaggtgagagagaacacaagacaaataaatccagtataaatttagcaaatatggaaggtggagggaagaggggagatgaaactggacaaggaggtaagcagagactgattggttcatggagcatgctaaacttgttaaggagtttggactttattcttagtgcaatgtaaagtcattttataatttttttaattaatcatgcaatccgatttacatttttagaaagatcatactaattacactgcggaaactggataatcggtaactgaacactgtgacaccagttgggagatgagtggtgatggcctggtctagagtcttgactatgaggatggggtacagtgaaaagataagagaaacatttaggttttgtgctaaaaaacatttaggcttggaggagggggtgtgtggagatgagagagatgtgtcacttggcctggtcctgtgtaatttgaccaattctggatacatctgacccaaataaatatattcaaaaaactattatatatacccttctggtgctttagagaagccagattggaatcagaattgtaagtaatcaggattttttgttaatgggaattaatcaaaaggagaattgaaacaaaagaaagaatgtgcatagtatgaagagagcttatggcaggaactccaacatttgagtaggaggtgggtcaaggaagtggacctaaagaatgaccaagatgtgactgaagagtcctaagaaaaaaaaaaaaacagggtggtttttagtaactatagcttattagtgtatttccagaagaatggagtggtaaatactgttacatggcacaaagaggttaagctacgagaattgaaaatgtcagctgggcgtggtgctcacacctataatcccagcactttgggaggccaaagtgggagtatcacctgagctcgggagttcgagaccagcctggccaacatggtgaaatcccatctccactaaaaataccaacaaattagctgggtgtggtggtgggtgcctgtaatcccggctgctctggaggctgaggcaggagaatcgcttgaacccgggaggtggaggctgcagtgagccgagatggcgccactgcactctagcctggatgacagagcgagactccatctcaacaacaaaaaagaattgaaaatgtctgttgatttaagagtgttttttaaactttcttttccttaatgcctgctaaggagcccttttagactccatcttctcaccaccctgccaatcaaattcctcacccataaaactttttattattctttctttttcaactgtaaattgacaaattatagttgtatatatttaggggtaccagatgttatgatttatgaaatgtggaataattaaatgaagctaattaatatcaccataaaattttaataccacagaatattctctgtttatgtattgtatttgtgctttacacataaaaagagtattatatttttttcacctcacaagaagcagtttttatctgctttgagaatgcatgatttaacacacagaggacactggtgatcttggtaaaggtagttttggtgggctgggtgcggtggctcacacctgtaatcccagcactttgggaggctgaggcgggcagatcacgaggtcaggagttcgagaccagcctggccaacatggcgaaaccctgtctctactaaaaatacaaaagttagctgggcatggtggtaggcgcctgtaatcccagctactcgggaggctgaggcggaagaatcacttgaactctggaggcggaggttgcagtgagccgagattgccattgcactccagcctgggcgacaagagcaagactccatctcagaaaaaaaaaatagttttggtggtagttcagtggaatgctagaaataagacattgcagtgggctgggaaataaatagcaagaagtgtaaaaaaatagagatatgtagagtagattcaagaagtctagctgtgaagaggatgaaaagacaggaaaataaatgcagcagttcataaagtgaaggaagaatacattcaaatgctgaaggaaaggtgtgaatagagggggaaaagctgacataggagagagggaaaaacggaaagaggaccctgacatagcaggagaggatgctactgagagactaggtcaaagggtttgccttctctaaggagaaggaacactttctactcttcagattgaagggaaggtttgtatacttgactgcaggcagatgatggctctccttctctgtgtaatgggagagaggtcatttccaaagggagagagaagtcctcttctctgtaaataccatgtgctactcatgaattgacacagtactgagctacttaaaaatatttaaatctgcaaagaactcccatagcgtatgtgtatatgtatttttttttaagagatagggtcttgttttgttgcccaggctgaagtgcagtggaccaatcatagctcactgtaactttgaactcctgggctcaagtgatccttctgcctcattctgcctctacctcctgagtagctaggactacaaccacatgccacaaagcctggctaatgtttaaattttttgtagagatggagtctcgctatgttgcccaggctgatttccagctcctggcctcaagtgattttcccgcctcacccacccaaagtgctaggattacaggcgtgagccaccgcactccatctgcccatagtatattggtttgttttttttttttttgagacggagtcttactctattgccaggctggagtgcagtggcgcaatctcagcttaccacaacctccgcttcctgggttcaagcgattctcctgcctcaacctcccgagtagctgggactacaggcacgtgccaccacgcccagataatttttatatttttagtagtgacggggtttctccatatttgccaggatggtctcgatctcttgacctcgtgatccacccacctcagcctctcaaagtgctgggattacaggcatgagccctaccgtgcctggccgtatattatattaaatggttagaaataaaaatcataagattaagtaagaaaatataatcttgttgcaaagagagctttcctaaagatacgtaaggttttttttttttttttttttttttttttttttttttttcgaggcagagtctcgctctgtcgctcagggtggagtgcagtggtgaggtctcagcttactgcaacttccgcctcccgggttcaagggattctcctgcctcagcctaccaagtagctgggactacaggcgtgtgccaccacacctggctaatttttgtatttttagtagagacagggtttcactatgttggccaggttggtctcgaactcctgactttgtgatccgcccgcttcagcctgccaaagtgctgagattacaggcgtgagccaccgcgcctggccaagattcgtaaattaagataattcttcattaacctcattcacttcacttctcctatagtgtcaattgaaagtgtccctctgtctttcccaaattaatcctttcacttgtaacttgatcccattcctttccttctcttctgggagacaagactttttcttgaatcttcaaatagttgcttgcttcctgcccccaaatagatatcttgtattctttaaaacaaaccccaaactttcccccaccttgccactctcaataatcttgcttcatgccccaaatgatgaaggattggtctacacttgcagtctttcctcagttactattaaagcatctctctcaaacagctcaatgactttctaattataaaatccaacgacctattctgatttcagcttcctcctctgaccattgcagcattttatgtcattgataactttctcctaaacaaaaatacttcttacccttttatatgaaacttcatctgttttgggtctcaccttgaaagtctttcgggcttaattctcataattttttttaaagtctttctacaatctccatgtaaaccactgtttcaaattcgataaaactcaaactccataaaatacctcctcctgtcactggcaccatcttcttaatcacacataargctgtaagtttcaggttcaaacaaatctaccaaatacaaacagccacatcgcccgtcactcttccacactcactgccacctgctcagcttagaaccccgttacctctctcctgaagaactgcaacacccttctcactgcattcctcaccccaggctcttccaggcaccacccgctaacaggacgtctgctcaggtccgtttggggttttgtcctccaaagcagaaacctgggactgagattcctgccgtctgtactccagctcactatagagggggaacccagtaagcttgacctccggggctcaggcgcctgagaacactgggctgcaggtggaccgctcccttctggccttgctggcgagaaagcccggaaggccgggagtgggggggaagcgaggcccgggccaacagcaccaaagacgctcctagagcccagatcggagtcgggggccccagctattcagcctactcccgggttttggagctgtccccagtccacagatttcccgcccctcacactcaccccaacacctgtgccagtcagtgattcggcgccggatcctctcctaccraagctggagaagccgagaaggccgcgaggacccgcagctggagtgcccaggaaattgcctgattaacagcttcaaagacaccgactctgtctaccgtattagaaattttaaatatgcaggaagaccgtaaatgagaggaaagacgtctcttgaggcttagtatctaaatcttctacataatccagggcctagaaaaatggtgggtttctctccatctagattcaggcggtcatctgctgcctaacgcagtctggggtccctcatggtaggggaggcggggtcaggaatgggcggggcattcgctgttggtgccgacggatagagccaatgattgtggatgacagcggcacagaatgggcggagtctggaggggcgggatttggagaagagaaagcggtgatgcgaagagggggcgggaccagagagtggatggcagaggtgggctgtagagccaaagtggggtgggagcgcgaagatggcagctgctgaggaggagccgaagcccaaaaagctgaaggtggaggcgccgcaagcgctgaggtgagcgctgccggacttggggaggagggtgacggcgctgcaagcaagccagggcccacgtggggttgcacggccccgacgctgggtggtgtctctcactgccagcttggggccaacacgcaggacctcccccagctgcccgcttggccgcgaccccttgccagacgttctctccgtttggctgagtccccgcctgtctggtgcagctccggctccagcagcccttcgccagtcgtggcccgcagggggaccgagctggctgaccgcgccacctgcgagcaagcccaggctgggctggtgcgaccccggagggtcggaccggagcagcgtctgtaggcggccgccttctcttcccgggggatggcgggaaagaggctcggcaactgctgtacactggggcaaagtcagaattcttggggatttttcagagtgttgcggaagggcacgttgaccttccttttcgtgcacattctgaaagcccgtacctttgaggaccctctaccagggacccagacccctccgatgctttgcaggggcagcatttggatgaatggataggaaaggttgatttctcttttttatttacactttttggcagcaacggggacagtgctgcccctaacacctgcctcacatgtgattgatgttgcaacttttacttatgaagagtcatttgttaaaatatcccttcctaataagtataaagtgaagcaggcagtctttgatgatttggaaatgttcgctgaaaggcagcgatttttttttccatcttaaaatagacatatcaaactgatttaaaactattaggacactcctgattaaacaggacatatcccatttcttccagtatcactcttcttcacctccaaaggaaggaatcactcacaattgaaaagaaaaggacacttaggggcctggtggtgtgttcatgctgctttgaatggagggtgaacaaatccttgccagttcctttaatgtattcctactaccctcaaagggttagtgtgcctaccttataccaagaacataaactttaaaataaaaaccctcaggatattctatttttattttaaatattccaactatatgcagaataaaaagcaacggcttttgaatcagacctacctgagttcaaggcatgtgctttccctactctgccctttattagagtatttccttataaggcacctccttcgccaaactggaagacagatgcaacttttccctaccatcctactgaacatataacccttagatttccttagatttttccttaataaaaattattatatataatgctgatccattttcactgtgttttcctatttattatcttgttggacagttctgtgatcaaaggaaggcaagaattatgcctattttacaattgaagatattgaagcccaaataaaacaattagtacaggaacagaaataggaactagctgagcatgttttcttatacctgcagtcctggtgctttgtgaggctgtggtgagagcattccttaggcaactaaaattcactttacacaatatgaatttagtgccacctgtagacatgaagttaaaagattagacacttgagtactgggacaaatctctaattttgtggggagacattttaggatcggctattattacttttattatattaatttgctttcagactcaaagtgtgataatgcattgagtatttacactgaatttatgatgacttgcttgacaggggattgctactggttttggttaaggagaatggattataaagactttgcataatttaatgtgcagcatcagtgggaacaaataatgagatatatttgtagatgtcaggaaaaatatttagatttagggatttgtgagaatttggtcagctctgggataataattctccaccaggggaaattttgccctccaggggacatttggcgtggtctagaaagatatttttggtagggagagctattggcacctagtggatggaattcaggggtgctgctaaacatgctacataggacaacccccacaacaaagaattatctggccaaatacgtcaacggtgttgaggttgagaaatctgttctagagggagcatctgacaagactagtctgcctttctcaaatatctattatttttctaggctcggttgcttttcagcatataacagttgcttataaagaaagaatcaggctctaacatgttttcacgtgggattaggggaaagaagggaacgttaattgagtgctagacattatactatgtgctctatatatgttatctcttttaaccctcccagtgacctatgaggtaggagcaatgattcctgtgttacagacgagctattttgtgatgaaagaagtggagaaacatttttgggaactgctccctagatgaaggtgttccatgatgatcacttatatttaagacaacttagttttcttttctctcctttggaaatctcatccaagttcatttctttagcgatcgcctcttaagaggctacagtgccttccaaggcttgttgagcacgtgccaagtcttttccttcagtttgtctttcaagtacatgctattttagacatggtgttaaaaactggatatatatagagagagaaagaggtaaggcacaggtaccatcctcttggtgggaaataagtggggtttgggaaaatgacacctgagtattcttaaagatgactaggagttaaccagtcatctgtgactgtagggtatctgtgaagtagggtatctgccttataggaaagtttgtttggtggcagaactgggagagagctgcctcttggggaagtgcagatagtctgactgaagcagagatgtatggggtccaggctttgtattagacactctcacatgtgtcctttctatctctgtgcctctcagttctcagatcttaatttaatttaattttgtatatatttttgagttggagtctcactctggcgcacaggttggagtgcagtggcaccatctcggctcactgcaacctctgcctcctgggttcaagcaattctgctgcctccgcctcccaagtagctgggattacaggcgtacaccactatgcctggctaatttttgtatttttagtagagacgggattttgccatgttggctaggctggtcttgaacttctgacctcaagcgatccacctgcctcagcctcccaaagtgttgggattacaggtgtgagccaccgtgccctgccttcccagaccttaatttttactgtctgctgagtatgtgcttctgagtgactttctgacatttcgaagtcatatataccaaactaaattatctgttatcctgaatctgtgcatttttccatatttcctgcatctgttaatggcaccagtaacctcctttactccaaagtttgagacctagatatttgattcattttacatccacattataatgtctttccttttccattcctgctgccacaccttacgtttagactttatcttttgcttagattttgttttgacttcctaagcagtctctttaccttcagcctcaagttctgcctacttttctttaggcacagctctacttattcatcacggcaaatatttgtaaactctgaagttgatgttaggaaacgttgaatcctgaaagcccatatcattactccatctgacattagcaattaaggattattaaggatcatgacttttaatagtactaaaaaggaaacaaactacagttctctaatcagcaaatgctgagcttttctcaaatattgcttcctaactgtttcacttccatggaccccttttattattttcctctatctcctacctcactatggaccctgtgttctaaaattaaacctaggagctgggcatggtggctcacacctacattccagcactttgggaggccaaggtgggaggtttgcttgaacccagaagttcgagaccagtctgggcaacaaaatgagaccctcgaatctttaaaaaaaacgaaacaaaaactagctggacatggtggcataagcctgtggtcccagctacacaggaggctgaggcaggaggattccttggcttcccaaagtgctgggattacacgtgtgagccaccaagcctggccttaattaatgtttgttgcatagagtggcactgataactttcatttttctagaccctatatatatatttttttgtttgtttgtttttgtttttgagacagagtctcgctctgtcgcccaggctggagtgcagtggcacagtctcggctcactgcaagctccgcttcccgggttcatgccattctcctgcctcagcctctgagtagctgggactacaggcgcctgccatcacgcccggccaattttttgtatttttaatagagacggggtttagtagagacgtgttagccgggatggtcttgatcgcctgacctcgtgatccacccgcctcagcctcccaaagtgctggattacaggggtgagccaccgtgcccggcgaccctatacttttaataatgcagcctaaaattgagctttgctactattttcttttttcatcatgataatctactattgaaagagtttggttatttttggatgatattgcatgccttttacttatattcgcaaatttaatcctttaagattaaggctttgggctatgaaggaatggaaaacaaaagtcccctaatgcacttagtatgaatgccttaataagatcctttcctgggcaatatatactagtgcagcgtgagggtggtagagagagccagaggaaagcttgcatggatggttctgggtatccagggacaagcatggaagtgcttgaaactcagggaaagtgggaagggccttaggaaaacaaggggcattgaagactatgtttcttattttgggtacaggcctagactgaatattcagcctcaaataaaacatgaggctgatgtgctgcttttttttacctggaatatgtctttgctttacttccatcaattaaaatcctggccacatggtgtggctcatgcctgtaatcccagcactttgggaggccaaggtgggaggattgcttgaggccaggagttctagactggcctgggcaacatagtgagaccctagctctacaaaaataaacttagccaggcatggcagcaggttcctgttgtcccaaccactctggaagctgaggcactggcactactacattccagcctgggtaacagcaagactctgtctcaaaaaaagaaaacaaaatatctttcctgtgtccaaagtgtttacagttaggtgggggaaaaaaagtatcaaaattttaaagagcattctggtcagaatggatcccagtagagcagtggttaagagcatggtctctggcatcagctatctggtttgacccttgatccttattagctagtgatctcgggaagattggctacttgccccatacctcttttctcacctgtaaaatgggtatagtaatagtacgaacctcataaggatgttgagagg

SEQ ID NO: 96719 - DNA, 20030 bp, Homo sapiens
ggagaaacattcccactcccctttggcctccctgtactctgagctgtgaatatttttaaccctgtaaatacggccagctcttgtgacacagagactattttatcaattgtcagtcccgttcctttaccataggattctccacagtggcttccgactcaggctccaatggaccaaataaaagcgttttgttttgtaatcacgcctcctcctcctgctgttgccccgcgcagggccctgtggaagggcggggaggttgcaggtctgaggggtaggccctgcccaggcatcccgggcaggcggacgggtgggggcccctggagatggccgtggtggggtgactcacaagcttgtaaggggcagccggccctgccaaatggacgcagccaggaaggacggagtgactgggcgggggcaggggtcagaccctgcggccgcagccccagggccgggaaggactgggcagacgggacagcagcgcatgcagcttcttccagcgaggcatccgcacggggggctctgtctgaacccatcagtcacccggcaggagcagatggagtgagggggcgcgtggggagaaaagtttcctgtcccctcccagcctcgtcccagggtggcctctgcccccacacgggtgctgctgagcaaagcgcccgctcggaggctctgctgtctccctggacggagttgggggctggggtgcggccggcgcggggtaagaggctgtcacgggcagcgtatcgaatgtgaaagcaattaaagccaccagcagtgttcgctccgggcgggcctcgggcggcggggagctgccagaacacatctcacctcggtgcccgcggacgccggccctgctgctccgcgactgcgccacgtcacactcctcctgtgggtgggggccgggctcgtgcccgctcctgtttggcacagagctggctctgtctagtcctggggtatctgggacccccgttcctcccgagaccctgctcctctgtccctggccccacccccaccaccacccacctctctggcttctgccaccccagtcctggggtggcccaggacagaggcccacaagaaggaccctccttcttgcaggagtcccgcacagcaggcaaggggtccgtgcccaccccctcagctgcccagagtccccactagcccagccagcagcctcctctccacttgaaagcccccgggagcagctcccacagggaggtgatgagggaaagggggggcgtctgcagaggactcagggtcccacagcacagaccctgccaggtgttgggccggggccacgtgaggggctgctgcggaggcctggaggaggcggctggcagcaggtaaggggaaaagatgcgagcgtcctgcaggcagcagggaggattggctgggcaggacacacagccctggcgcggggcagaccttggtggcagctgtcggggctgactccttcccactgtcactgcccggcccccgcccagccctcccctcccttctctgtgcaggcctctcccctcccccgcatctcctcctgggtctcacccccaccaacagcaccatctctctggtgtatctggtctgtcccagccctgtgcccccacggtgccctctcctggcccctcttgttggcgctgctggccacagccttcccggggtgggcagtggcgagttctcacttatgaggcatcgctgtcagaagcatttagtgtacaaattagccgtggcctcctcgcctccttccacagctctgggctccaggctgactgggccgcggctccaggccctctcccgcctgcccggggcgcactgctgcccagtgtggacccctggctgcctgcccatgtcctggcaggagtgcccgctccccactggccggccagggctcctctaggaccccgacctagacctgggcaggggtggccatggcaggccgggggtgctcagtgaggttttggggggtgggaggccaaggcccaggacccggatctaccccaacagtggccagccctggtgctgagggctatgggggggctggacatggggccccaccaccccacctgccagttggaggccccgccaccccgcccgccagcccgcctgccactcaggcggggaaaatcatctgtgacaggcccaggaaggccagccccgggggccgcagagagacacacacagctcctcttcccaacatatggctgctgtcggccccgggcgctgctggccagtgccaggctcgggagccggtgggggctcgagcagcctcagcctcccgtcccacccgcctggctggctgccccctctgtcagtctacatcccagcctcctgggacggggctcactcccaccacagcagctcagccctccaaggagcgtcctgtaccctcctccgtcccagaggctcaggacacacagagggtcagccccgcacccggcccagggtggccagtgacccggcacgtctatgagagtgtagtgcatggggaagggcccagctggggtcttccagagccgggaggcgggtggggaggggactctctggtgtggactctgggatggtcagggctgctggggaggactatccctggtagtgctcgagccggaagactcctggagcccccattcaggcgcctcctaacagggcccccgttccctcaggtggatggacccagggaccccagagctccgcaggctcttcgtgtgccccccacacccttgggccgttgtcctgggcgctctggcccactcggttgcccagccccctccgttctcccctggcacccccactgtgtacccgcccatcaaggccagcagcctcaggctggtgccgagggccctcacgtgtatccatgaccccttccgccaaggctgggctgcccctctcaaccagggatcctcaagtgggcagcaaggaggaagcccccaggaggcctatgctctgtagacctggggttcttgaagtgctcagggtggccacaggccctggggtccgttattgaaaggacagacatcagctgtgtccggacaccttgcaaggtactgaccccacgtgggggctccaacctgctgccgctggatagattgccccggtctcaggacctgcgtggggcctccagcctggctgcagccctgacactgccctcactgtgtgggtgcaggcaccccggcccctgcacctgtcccgacactggctgtgtgtcgacactgaggggatgagacaggcctgcccccgggcactggccatgccgagcgctgcctccgctgccttctctgagcccagctctccgtcctgcccgtgagcccccggcacagagtcccattgttaatggaggtgacaggcgggcagccgtgggcagaccgggcagaagaggttaatggccaaaaatgagcttctggctggaggcagaaggaggggccatggggtccccatcccaccctgcactgggactggctaaggagacatcagggcacccactaggaccagagcagaagtgcccggacactgagcaccccactgcccattctgcagatgggggccatgggccagaaagttgggggggtgggggcacaggtgccaaaacagagtcccagtcactgcctcaggaagcagaagccacctctccaaacccaaagtcagcccagtgtgcaagagctgggacccagcaggtgggtcatggccacagtgaggaagctgacgtgcccagggggccctgtggttgcggggtgctggcactgatatcccggcctcgcctggctgtttgtgatgggaacagtcatctgggcacccagtgtactggcctcacatgctcctcaccccccacctcgtgcacggctgaatctcaggacccccaccagcaggtgcagggccccctcatcctccctgccagagtccttccgggaggccagaaacacgtccaagttgtgccccggggcccctctcgaggctgcccctcttctcttctcatgcaaacttctgcaaaggcccatcggtggtgaggggtggaggtgctccttcagcctgctcagcgctagacacggccttgttccccctctggggctccttggtcccctgagcttcactgggctttatttcctgtatgctgacatctaggtgctccaagaccaggcctccctgctccctactttcctcccctggacaatggccagagcctccagccagttggtctcctgtgctgtcagctgtggcctcttccagaccttcaaaggggtcagtctcgggctggccactgagggactactggtgtcagggtgaccttggaccctagtctcccggggcagtgctcagctgaacacgtccagagtagagtctatgtacagaagcagccggcctcctggcccccgctctccacggggctgctggcgtgacggcagcccaagctgtctcccggcccggagctgcctgcacggtcagctggtcagctgggccaggccaggtgggcagagagaaggctggcatgctctgccatccacagcacccctcccagtcccctgccccgccccagggacttccctcagacgggcgtgtgcggctgtgtcagggaaggtggcatggaggcaggagggagacagagccccacgcccaccccagaaccaggggctgttcctcatggaccctgggtgtgctctaccagggggctctgccagcagccggaccggggccacggagatgctgctgagctctcttctctgccccattcgaggggtgacacccagaagccccgtggggtcctcccttcttccccaaggcacccctgaccccgacctgagctggggacagcccgggagcctgcggctgagcctgcagagagccccaggtcctggggagctatgtgggccgggctccctgtgctgtttcagagtcagcagggagtagcacactcccctctggctggagaccccgagacgcccgcctaccgcaagtgtcgggtttaggacgtctcccctgagcgaagtcaggggctctgccccagccatgcctgtgtccgggagggagcaggccggtcaggcgaacctcccctaggccccagctgagcagtggggctccaggcctttacgttctggcagctcagggagctgcttggaacttggtgcagcccgggaggtggggctgggagcagccctggccctgcttctctcctccaccgccccaggtcctctcaggaggggactcccgtggggagggggtctttcaaacagcagggaagtgcgtggcctcgtggggcagcgctgaggcacctcccacaggagccgggagtgagggctggaggggtccgcatccaggaagggggagggtgctggagaccagccccaggtggaggcggtcagccggcagggcggggtgcgaggggccggtccgggcagcctccggtttagaggaaaagagaacggagggcagggctcgcccagggagggcaaggaagggagcccggctccgctggctcagtccgcggcacccctgtcccccaggacagcccccaggggccctggctcgggtgggccggcggctgtcaggggccagagccctgatggataagcgctgacggcccctctcccgcgccccgcgccgctgacacccatcacgccgcggcggggacccgggagacctggcggcctctgtgcacccccgcggcagcctgcgggcaacgggggcgggaggcgccgggcgcccctgactcggccgcacacctgcgccgcagtccgctctccgtccgctgcctcccgggttcccggccgctccaccgcgcgccccgagagctgagccggtcccggcgcacgaggccggtgagtgcgcgccagggggcggcggggggcgcgcgggcggcgggggcgcggggttcgggccgggggctgctccttccctcccgccgcgagcgcggtcggaggtcgcagcgccccccggagcccggagcccaggcgcacgcgcgcccgcctctgccgccaacttcgggaggtgcgagcggcgtcggggggacgcgggcggcggcggaggctgcgggagtcgctgccgctcgagggaccgcggacccgggaggtccggctcccggcgccgggcctcagtttcccccacgggagccgcatcccacccccagagccccagcgcgtccgcggggtccgagtcgcggccggcgcggggcggggaggggcgggaagtttgcgccctacacgcggcctcgcagacttggcggctccgctcccggccgggcgcaggtaggagcggcgggagccgcgggggcggccagttgggcgtcgcggggccggctggacgcggggcgcgggggcagcgggtggccaggcgtgtggggggcgcggggggcggccgggtcccccccaccctcttctcgaagtccaggagcagcgcggggggagggagggccgccctcaggggccaggcggggagggcaggggccgggtctggggtctggggcagacgcctgacctcgcgctcgccgcacccgcctgtgtggggcgccctgcgttcccgggggggggggcagcaggatctgcgggtggccgatcagggtccccggctgctgggtgccccctcctgccctgtgggggtgcctgtgccccccgtgccaccggttctcccccagctctcccccaaacagggacaggtgagtggggccgggtgtcggggcctggcacagggctgctggctgcccggggagcgattgccgggtccggctgggacgcgcgtgtgagtgcgtatgcgtttgtgtgtgcgtgtggctgctgtccaggggtgtcttttgctctgtgtacacacaccaggtgggtgccagctatcctccgggtccccaaggggtcagcagctgctgagacagccccttggacaagcccctgacccgggagcccccggtccctgctgggaggcgggatgggttgtggcatcggctggcacagctgtgtggctcccagggctgggtgatcgatggcccggcacagccgcctctgtcgccggagcgcccacacccatttgtcatccacatgggtggggggggcggcgggcagggagaaggggccgcctctgcacccaccacccagtccaggccgggtctgcagcccctcggggagccccaggacctctcctggcccagcccctgcctcccgaccgccaccctgtctcagccacagaccagctggtcagcctctgcctgcccctgcagcccgtgactgccctgcagggccccaagcctttggacgagtggacttctccagccctgttggtcgtccccccaacggcaccaacacagtgttttgggggcagcagacagcagtgccccagccctaccctgctcaacccactggccatgcatgaccacgggtgcgacccccagccaggtctgcgtgtgtcctggggagtcggtgtgtagggcctgtgtgagcatgtgagtgccgtgttggagtggtttggaaagcccccccacacctggatgggtggtgagtgtgttatcacggacaagcagccgtgttcaccgtgatggagtgtgaggtgtgtgcagccagggccccgcacttggtggcagactccgttctgagcttaggtggcacagaggtggcttctccgggcactgggtgagggctctgtgtgagcctgtgggctgtgtacacacacccaaagcccgtgtgcgcaggcgtgctgtgcaccccacacaggcgcgtgctggggcggtggacagcccaggtggcggcccagatggagtgtggcgcgcataccagcgccgtgtggggcgtggggaggagcgggtcttggctgagtgtggccgctgcaggctcggccgctgacctgcccgaagccacccagatggagctgggctgagcaggtggctgagccgtggggccatgctgggacgtccactccccacagcctggcctggccccacatgagactgaccccctaagagacccccagtgcccacctgacgccctgctagagcaggctctgtgccgcctttagacacacacgcatacacacgcactcacacatgcatgcatgcacacatgcacacacaatgcacacacgtgcacatgaacacaagcatgsacagaggcacatgcacacacaggcgcacacacgtgtgcacacacacgcacatgcacgcacacacacgtgcatgcacacgcacacatgcacacacacagacacacacaggcacacacacacacacgcagcatcatcccacacagacccttccgttggtgtctcatctcagtgccttttcctaggctttgaacaggcagattggcaggggccagggttgctggagggaatgagaccaggaggctgacgtccacccgaagtgagctctggtcacgctgattcttttagccactcacatgctgtggggagatgggtgtgggctgaactatcctagaaattggccagcaagtcggcctggcctcaggggtggggatgtgtgtagggtcaaccgataaaataaaggacgcctagttaaaatcgaatttccgataaacaatgaacacctttctagtgtgcctttccaatattgcctaggctacacttaacactcagaaatgacgtgctgctgatcggcgtcagatgcagctcgctgtcctggacttttttttttttttttggtgccctggactttgctgccaccctggaagtgcacgtggggaggagccgaaggatggggctcggggggcacgttgcagggcagaggcggcggggyggggggagcacccaggctccrgtccctggagcctggggagccatggatggagaggagtggggagttagtcagaggcaggcttggcactgactgtggccccatctacaggtggccatggtgcccggccctgcctcatagcaggctgccatgtcgcgggaggcgggctcatgccgcgtgggcacaggggcgagggcgcggtctcggaagcccaagaagccacactacatcccgcggccctggggcaaaccctacaactacaaatgcttccagtgccccttcacctgcctggagaagtcacacctctacaaccacatgaagtacagcctctgcaaggactccctgtccctgctgctagactccccagactgggcgtgccgccgtggctccaccacgcctaggccccacgcacccaccccagaccgccctggggagtccgaccccggcaggcaaccccagggagcacggcccacaggtgctgcccccgcgcctgacctcgtggtcgccgacatccactccctgcactgtggcggaggccccaagtccagggccaaggggtccccagggccaccaccccctgtggctagggccacccggaagggtcccggccccagtgggctcctgcctgagtcgtggaagccggggatgggaggggacccaaggggcgtgggtgcgggggacatggcctcagcaggccctgagggcagcgtcccctgctatcccccgcctgccccaggggagttccctgaggcccacagcctccacctgtctctgctgggcgtcaactacccgctcagccccggcctcttctcctacttggggccctcactggccgctgcagcccatgtgcccttcctggcctcggccagccccctgctgcccccggccacggccttcccagccgtgcagccccctcagcgccccaccccggccccccgcctgtactacccgctgcttctggagcacactctggggctgccagcaggcaaagctgcccttgccaaggcccctgtctcccccaggagcccctctgggactccggctcctggcctgctgaaggtgccagttccagggctggggccctggccccgagtcacccccagggacccagggcaggagggggagctggagcgggcagcccagagtgaccccaggaggaggctgtccctgggaagcaggctggagcttccgaaggcatcccccagcctgacaaggttctgttcccggagcaggtgggcgtcttgggctcccggttcctggggtggacggaggggctgggcggctgggcatggcggttgggcggctgggcatggcggctggggtccgtcctgagctcagtcgctgggaaagtgggctccaggccacagaggggaactgagacccgagagccagcgcgggggtcctcggggtctccaggagagcctaggctctaggctggggccacagggcagaggccgtgaggggagaggggcaggggccgggggcgctgtgggggcagtgcggcctcctgaccagcttccaccccacagcctgcccaccggctcctctgtgatgctgtggcctgaggacggggatccaggcggccctgagacccccggccctgagggccccctccccctgcagccacggggcccagtgccaggaagcccggagcatgtgggcgaggacctgacccgrgccctcggtgactacgccagggtggagcagcgcctgggacagttggggcccgcggggggcctggccccgagacccctgcgggagcagctgggcaagatccgcctggagctgctcaccattcaccaggcgctggagcaggccgtgaggccgccagacgcacccctcgacctctctgtgaaacgtgcgcccgccaaggggccccaggctcttggagaggcgtgggggcggcccgagctgggtcccgtgttgaccgggggcacccccgagccacccggcatgctgggccctgcagcgccccaacccttctctggccacaccaccaagtgtgaggccgactccagcgtcccacccccagggctccccctcgcagccccagatgaccctgtcattcctggcagtggctggggcacctgtgttgcgacgaggagttcccagacccctgaggctgtctgtggcctgcagagcccccagggcgccgaggtctgacctgcagcgcctgaggtctgactgtctctgcctgcagcatgccggcccctctcctgcagcccctgcccctcacctgcctgggacctgccccgcctccgcatgcatgtggatagacccccacgggccgtggccaacgcttgtccctggggccacacagggacactggaggtcacagttatttattgatcacaattgtggacattaaaacagaaactgttcacacacgccgtctgtgcctccttcctttggggccctagtgtagccacctggacacccccctaaggaagtgtcctggcctgggaggcctgggtgggcagcagtcctgctgggcctctgtcttcagactcggccctctcctgtgggctgggccctccccgcggggctggggtctgggggtggggcgggacatcggcgacgggagctgagccaggagagccgtgtggactgggctgctcggcctgtgtcttggtgtgtcgggggtggagagscgtgtggactgggctgctcggcctgtgtcttggtgtgtcgggggtggagaggcgtgtggactgggctgctcggcctgtgtcttggtgtgtcgggggtgggcacggacccctgaacatcctctagcctctgaatccagcaaggccgcgctcatatcagctctcctgcggttaaacggtggccccggggctctgtggctggaggctgctcacccagcgtgggctctgctggcccctgccagcccctgcagccgtgataggtatcagccttcacagctcactgcctccctcccagcagggcctggcttggccctcccacgggcaggggatgggcagacagggaggggcacccgggacccccacagcaaatcacttctctcctgggagagctggccacaccctccacgcccaccctggaatgggctctggagcccacatcgcccccccaggaggagaagcagttcctgcctgcgtccagccgggctggggccagtccaagcaggctggcagcggccccattaactaccagggagatagcatcagccccgaccctgcctcggggcagctagagctggggtgctgcctggccaggcgcggagtgctgtggggacaggtcccagccgggcccctctacccagaggcttcctggaggggctgcagggggctctgggcagccaggaactgttcccaagtcccgagtctgagggagactccctgtcctcagcccccgccccccatatgtccactgcaccccatatgtccactgcacctcagtttctcacccccactgagcagacaggtgagcatggccttgctgggggcaacagcacccgtctcccaggtgtggagacacgacctccttcgctgtcacccgtggggagcaggacaggcctcatggagggtgcctcagccagcaggtcacccgcctgtggtccagacccaaggaccctgcttgggggtggcagcctggggctgccttgccacttggagtaatgaacttgctggttgtggggggaccatgggggacccctggaggggggtgggctgcatggcatctggccgtgtaggggacgtgggaatagtgtccgggcagagggcgcagcctgcaacaaggcgcggaggcaggaacaccacagcatggggagtcctcaggggacctggtttttctttcatagaagcttcaggggccaaggccggagactgcactctccctcctccacccggcccagctgcgtccctgccagtggctcctcccacttcctccagttctagtttccaacaacagaggctgcagccacccagccccgaagcagggcccagmgagacagggcccaggtaagagacccctccccccggcctctctcggtggggcaggtggaggccctcggaataggctgcctcgcccctaaggggtcagaagtctccctgacctaggggctcgggtagaagggctgtgtgtgggtgaccgcccccccgccgtagaaaggggttccacaggcagatggatttgagaaatgttgcttatctgtctgaggcccatgagctcatctggggctcaggggaaaacccacagcgagctccacgggtcatgtgtctcccagactcaagtcccaggcacctagacactagggtggccgctgggcttggtggccaggtagaccctcaggaccaggaggacccggcctcataggaagaaactggaggagtgactttgccattcccacacacmgtggggccttattctctctcttgcagccccaagcgtgacccagctgcagagaagctgagacggtgattcggactgactggactctggcctccaggtgtctgcacctcacactggacccacctggagactccacgggctcccggcagctccggctgcttgggtggatccgggtgcccgcaggggctgtgggagggccccggggcctgcactgctcccccgatggcctgctcttcctcacggccggggctgcaccctgtgtccacgtgctagatctggagggacgccccatctgcctcctgccctgccgcactccggggagcggggccttcgttccagaggacgtggctgtgacagcgtcagggcttgtggtggtcagcgatcccatccatggggctgtccatgcactccagcacacagcccgggaccccgggggccamtgggtgacagtgggcaccttcctgtctccccgagggctggctgtggatgccctcaaccgcctcctggtgacggactacttgcctggggctgtgcacagcttctcgttgggtcctgcttgggagcccctggccccagcctccatgctgggtctggagggcccctgctgggtgggcccagggcctgatgggggccttgctgtgagtgaggagtttggggatgtgaggctgtttggcagtgcccgccaacccctgggctccctggggggctggacggggcacactttcggctgcccagcgggcatctgctccaactcagagggcaatgttattgtggcagacgagcagaggcgccaggtgaccctgtttccccgggctgggccacccatctgcctggtgtcagaggggcttgggcagcccttgggagtggcctgtgcaccccagggccagctcctggtggctgatgccaaggacaactccatcaaggtgtaccagggcctcaaggagctggcctgacctgaggctgggttggagcagccctcctgtgcctgaggccagctcccaggcccttggatcaccgcgggaggaaccctcaggatgggtggagcctccaggctatgggcattgcctgcctgatgccagcaccacctgggctgggccctgggcttggctcgagttctcctgctggtgaggctccggatctcaggagcagccctgagtctgcttcccaggctgcccctgccaggcctgcagcctccccagccagggctgctctctgctgtccccattcagtgccctggcccctgcattcatgccccccacaccccctcaggccctgtgcctggactttggggctggcagctgaagccttgagatcctgggccagctgccggcacacagctaggcagactctcccaccaggtgcccctgcccaggcctcctaatcgggggcagacaggcagggagggtgtggctgggctgggctgggcggggcggcctggggcaggggtgtggcccctaaatgtccccaacctcagagggacctagagtcctgagcctccagtagcttctctgggcctggcagaggtaagggggaggcaaccctggagtgtctggaggcccatggctggctgaaccctggatgccttttcttccgcgtccccatgaatgaaagctgtctgggccttcattctgcagacagggacaaacagctccatgctgtttgtcctcccagtgcagccgtgctgggagggtctgggggagcttcctacaaggagagactcctgctgctttggaaaactgagaaaaaataggggtctaaccctctcctcccattttacaagtggggaaatgaggcgtgaaaggagaggcgtctgggttactccgtgggtctggggtccagggaagggcctgtatgggggagggagctgggaggggacggtgtctggctctacccctgtggggtggggaggtggggctcccctgtatcacaggacatcccccctgagaggtccctcatatgtctgggtcctgtgggtgggggactaactgcgcaatgtagttaggtgctcaataaacggagttgccgctgaggtctgggctggggtcttgttcctgggatcgggaggggctggacgcctgtgtgttctctcctgacgatcgctggcggcagcctctgggctggtcctaccagggctcaaaattcccggcaccactggccttggggatctgggggcggcccctctgcagacaacagagtgacgggggcgggaccgggctggggctggggccttcctggaatcccgcagggcctggggacctgttcacttggggaggctgggagccaggcggggtccgggttccacgaaggccaggtccagtcagtttctcaggtgaggaaaccgagctgacgcggggctggcggcccggaggcaggctcgggaggtccgggcctggggactgggcgggcacgctgcgccgcggaacgctcgggtcgggcgggcgggcgggcagcccgggcgcctttgggggccggaccgtcgcgcggcaacgcgcggagccggcggaagtggggctcgggtcccgcggcggggctggaggcagcgagcgccgtcgtctgcccgggcccgcccatcggggtccccaaccccatccggaccccgccgcccgagcgcgcggccccggaagcacccggtgagcagggggggtgggcggcgcgcggcgggacctcgggcagcgcccctgcggctccgggcctgggctgggggctccgcactcccgcccgcggcgccgctgctttctcctcccagaagtggggccgcccccgggcccgcgccgacctgggcccctgtggaccctgtgcaagggcggtcggcggcccgggcctggctgtgggcccttcgcagttgtcccggtttgcaggaaagggcaaaaaacggaatcgtaggctcttcccaaatgagaggggaaggccctgcttgaggaaggcaagcaagtttgtttgtttgtttgttttgagacggggtctcaccatgttgcccaggctgaactcgtgtttgtttttcattatttatttattttgagagggagtctcgctctgtcgcccaggctggagtgcaatggcgcgatctcgggtcactgcaaccgctgcctcccgggttccagcgattctcctgcctcagcctccccagtagctgggattacaggtgcccaccaccacgcccggctaatttctgtatttttagtagagacttggtttcacccccatcgaggctggtcttaagctcctgacctcaagtgatccgcccgcctcggcctcccaaagtgctgggattacaggcgtgagccaccgcgccaggttggtgtttatttttcaaacaaggcgctgggaaacgcaaattctccagagctcttgtggagcggtggcagggaggggcggctcagccagagatggccctggcccgtcctaactgggctggggtgcccccattccctcattcacggggaggagagggaagtcttagtcttactactttatatggtcgacctccctacctgcctggtctgggaatggcttctcaagagcactcgggctcattcttagcagaggaagctcttctggctagcctggcgcccgtgtgtgtgtgtgtgtgtgtgtgtgtgtgtgtgtgtgtgtgtgtgtgtgtgtgtgtgtgtgtgtgtctggctagcctgtgtgtgtgtgtctggctagcctgtgtgtgtgtgtgtctggctagcctgtgtgtgtgtgtgtctggctagcctgtgtgtgtgtgtgtctgtctggctagcctggtgcccgtgtgtgtgtgtatgtgtgtgtgtgtgtgtctggctagcctggcgcccgtggctagcctggtgcccgtgtgtgtgtgtatgtatgtgtctggctagcctggctcccgtggctagcctggtgcctgtgtgtgtgtgtgtgtatgtgtctggctagcctggtgcccgtggctagcctggtgcccgtgtgtgtgtgtgggggggggggctagccttgtgtgtgtgtgtctggctagcctgtgtgtgtctggctagcgtgtgtgtgtgtgtctggctagcctgtgtgtgtgtgtgtggctagcctggcgcccgtgtgtgtgtgtgtgtgtgtgtgtctggctagcctggcacccgtggctagcctggtgcccgtgtgtgtgtgtgtgtgtctggctagcctggcacccgtggctagcctggcgcccgtgtgtgtgtgtgtgtgtgtctggctagcctgtgtgtgtctggttagcctgtgtgtgtgtgtgtgtgtctggctagcctgtgtgtgtgtgtgtggctagcctggcgcccgtgtgtgtgtgtgtgtctggctagcctggcaaccatggctagcctggtgcccgtgtgtgtgtgtgtgtctggctagcctgagacccgaggctagcctggtgcccgtgtgtgtgtgtctggctagcctgtgtgtgtctggttaacctgagtgtgtgtgtgtgtgtgtgtgtgtgtgtgtgtctggctagcctggcgcctgtgtgtgtgtgtgtctggctagcctggtgcccgtgtgtgtgtgtgtgtgtgtgtgtgtgtgtggctagcctggcgcccatgtgtgtgtgtgtgtgtgtgtgtttcctcagtctttaaagatgctcacgttgctttctcctgtcccatacctcctctgctatcgatcgcttctctttcatcttcctctggctgtgtgatcccagcagctgctagtgcaggcttctttgtgccgccgaccgtcccagaggctgaggtgggagtgtgatgggcgtttgccccacagtacgttgagttttctctcactactcgacagagaagagtagcttctgccctcccatctccttcggtagacacaaggcactttttttttttaaggtaaactttgtagatgaagcacaaagaatacacacaaagaaagcgcacagatcgtgagcacgtagctcggtgaatttacccaaagtgagcccaccgcagaaccagctccccctagaacatctgtttactgttagacccattgtgtttcttttccgacgatatctgtgggcagttttccttagtccctgtgaaagctcttccccagcagggcgtgatgggtccctgggctgagctggtgtgaaaggtgggctgtactgggtggtcccctatggtggtcacacagccagacacgctgggcccctcgcaggcagaatcactttgtccctctcacgatgtccttggtgcctcacgtcagctggcctccaggcatccacccgccgcctgccctctctgaccactgaggaaatgggcatttgaggagttctgcagcctgacccagaaggtcccttttcagctagaacccaccgccttgagtgactggatcctccagccccagtgcgggctgcctgcaggggaggagagcagctgcaccaggggcctcttaagccccaggcatttccgtgtgaggcctcttccagagcccctccaagcttcgggagaggacttacaggtcacaccaccccgacgtgtgcatcctgctctgttccctcgtccctgaggatgtggtgggctctgagacctccaggcatcctggtctgttccctcatccctaagggcgtggtgggctctgagacctccaggcatcccactctgttccctcgtccctaagggcgtggtgggcactgggacctccaggcgtcccgctctgttccctcgtccctaaggatgtggtgggcactgggacctccaggcatcccgctctgttccctcgtccctaaggatgtggtgggcactgcgacctccaggcgtcccgctctgttccctcgtccctaagggcgtggtgggcgctgggacctccagacccaggctcaggccaagctatgtccctccctcgagtgtggctccagcgtggggggtctctgctcagggtggccgctccactcttcgtgcaggcgagatggggctttctgtgtctgaggaaggcgagcggcccagccagccggccagtagtgcccccaccgctagggagtcctcctgccctgtggggccccgccagggaaggcatcagtggagaaggagccccagctggctgcatggctccgcaggggcctgtgagaaagggggaggagaggcccagggcctgggaaccgcggtagctcaggtggcttcctactcaacagccaccttggaaggctggtgtccctcagcctgagagtgcaggatgcagtttctccacacctccgggacctgtaagcctctctctccccgtttctaggcacccatgtcgttggagaaatatatcctggagagaaaatgctccctgagggagccctgccctggggtggctgtggggatgtcagggagggccaggcactgccgggtgccaccgtgggcgggggtcagagtggaggccgaagccctgtgtgccctgagcaacgaggcaggtccttcctgcccccagggaggggcttgtgggaggcagggaccttctggggggctgcccgccgtgcgcacgaggtagtttccacagcccagcagcacatcattttacattttcatctttattcttgcttaatacgtgaatcatggtttgtcaaggtttcaattggcgtgaccttgctaatgagattgtacagttctcctcgtgctacacctttaagcacacctctctaatcaggtttcttaaaactaagaagcctggagttcggttcggccccacagccgcgtcaggtggtgccgaggaggccgtgccctgggccggcctggaaatgggagggcaggcctggtggctgcatgtgcgtcctgcctcgtgcgggtggggctgagctgggcctggggtggacttggggccagcactctggctgccccttggagaagcatggcccacgcgaggcggcagccaaggagccctacggcgtccaccaccgaacttgaagctgaggtgccccgacctggggccctgtggctgcacctgtcaggccgtctgtgca

SEQ ID NO: 96720 - DNA, 89171 bp, Homo sapiens
tgacctcatgatctgcctgcctcagcctcccaaagtgctgtgattacaggcgtgagccactgcgcctggccaattctacccccttttaatggtctagaacagagattctcaacttcagcactactggcagtttgggccagatcattctttgtcgtggtggctattgctgtgcattataggatatttagccacatctctggcctctaccactagaggccagttaaaccccctcccacaattgtgataaccaaagtgtttgcagacattgccaaatgtccctgagggacaaaacagttcccagctaagaaccactggttagcaggatagcctgtagtcccagctacttgggaggctgaagcacgagaatcgcttgaactcaggaggcagaggttgcagtgagctgagatcatgccactgcactccagtctgggtgacagagtgagactctgtctcaaaaaaaaaaaaaaaaaaaaaaattttttttttttgttccacagccaaatttctgcattatcacttatgcaaaagtcctagcttatgggctactctgactttagatgggtccggtagttgattagtccaaataaccaaccacacatgatttcaatagattattttagctacctagggattctgaattccccaaatccctgaaattgcttgtaataagtatctacagaattgtgttaatagtcatcttattcttccagtaaaaggcagtactgatacagtactgtactatgatgtgtttagtaaatctttaacaagtgcacataggtataagcgtttgtacttttggaaaaataggcaatctgagaaaaataaatattggaggtttaaactactaaagctgtctttggcctatggcaagcacttgacacgaccctaaagaaaatggtagaaggttctcaggctctacctatccccagagactgctttagacaattggtgggaggggagaacttttggaatctgtttaatatgctgcctaggtgatttaagcagctagggttggaaatgacttgtttttgccctgtttgggttctctttactcctttcaaactcttacagtaattggtattaaatgaatattctacaaaagcacccgaatagtctatgtctactcatggatacatggctcccacaattctcttgctcctgcatttgccccaggtaaggagcacgagatgcaaacctatgtctcaggcaaagatacagctccagcagtcctctcctctctctactgcatctattttctttctctactaaatcatttccaaaagcataataagcatgttattaaaaaatcttttgatcctatatcccttgctagtgattattttagtgctcccctttataaaagcaaaactcagttttctaaacttcctccagtttattaccccttccttttttttcaccaacttgttttattaggaaaagaaattcaaacagaaaagttgactttcccacttaaaatacttccctaatttaacatcgagtccttatttcagatttttccatgtgtctcttttttaaatagctaccctcatcccccaaacacgattcaattaagattcctactttctggaaatactaggcctgttgtcttgttgagtttttctttgtactgtcattaattttaacttctgatatccctttgaactttctgtaaactgaaaggtctaaagttttcgcaagtttcgggttaaacttgttgtgcaagagtgcaaggtgatgctatggtctccatattgcatcacaacagttacggcttttccaggctgttaagtttggacacttggttaggtcatctgataggtgattagagttcgtctcctctctgttactcttagtaaaaggcagcaaagatttccacattgttaaatctaatcagcagccagcatttgaccttgaagcactcttcagttggcttgcaaaatactacacttgctttgacgtttctcctttactggctgctccttctctgtcttgctgttggcccaatcttcatttccctgcattttgctaaaacataggtgtgcccccgagcttgaccttgggctgcttgcctcctctcttagtactcatcttggtgatctcatcataaggacatcagattatattaacgtcttcatgtgacatcttcagttaggtatctagtagacacctcgaaatttacgtctaaaacttacttttgcctctgaaatttttcctctcagtcatcctcaatcacttaatggccactccattctttgtttctaggcagaaatggtcttgcactcctcacatccttcatctgatcttagttccaccttaaaatattaacatctctactgctattaccctaatccaagacactatcatagcttgcttggattatttctgtggtttcctaaccggtctttgttttgcctcattttgtctcctctcacccatcctattctactctcatagcaaccagactgatcctttaaaagtctaagtcttgtttagatggcttcctaagtaaaagtaaaacttcacaaaggtctgtggagccctaaattacctgcactctaccccacctcattcaattcctattgaattcctcctgctcactctaccttgtccacattggccacttttgctgtttttccagcataggatttttgttactgctagtgtctgcctagcatgctcttctcccacaaaacttcatggaaaattttttcaccacttttgactttttgcacaaacgtcatctcaatgaagcctgctctgaccactctttaaaattgcagcctgacatcctggtgctctgccctgctgctttctttgttttacttcctgtgctaaacgcagtgaaggcagggttctttgctcactggcatacagtgcctggcacatggcacatgcttggtactttttgaatgtatttcaccctacttcgattcagggttttcagatcagtatttcattaaatgaaagatttagtaaggcagaatacttcctttgtaagatattttggtagaggtttcctgaattacagaatggacacagaattgaactggcatttcataggctgtcttgagggttttgtgctccattaatgattaccacaaaggagcttcatgttttaattttatagctcttttgtgtattcattgtgaaaatagggcagttttcgactgggcacggtggttcatgcctgtaatcccagcactttgggaagcctaggtgggtggatcgcttgagcccaggagttcaagaccagcctggccaacatggcaaaaccccatctctactaaaaatacaaaaattagctgggcgtggtggcacacacctgtggtcccagctacttgggaggccgaggcaggagaatggcttgaacccaggaggcagaggttgcagtgagcccaaatcgtgtcactgcactctgggtgacagagtgaaattctgtctcgaaaaagaaaatagggcagttgccatcctgctactttcttacataatctttagtgaggaaagtcaaagtggttcagggcatgacatgcgtttatgatggataaattcaacttagtgcccagcagaggaaaagtaaggcatggctacttactctactcagtgaatctgtgccttatatatgaatctgctggtctgtgtgaggccagttcctctgtaccttacagtgtaaaaagcatcttgctgtatgagtgttgttcaaagtaatagtttctaaacactgacaattttatctggtgctcatatgcatcatttgaaactacattgtacgtagtgatggtgtccttgtattggaagaccttccctgttgccaacttccttaccttaaatagatggaaaaatcattaaaatcacctattctttccctagatttgtaccaaccattgtttaaaaaatgaaacacatggttggaggcaagactagaagaagaatgactagaatattgcgaaaaaatattgagctaattgctatgaaggtaaatcatggaatctcagtgacttaacatgagaaatttattctttgatcatattcatttggtgggctgtgttccacaccctcactcaaagacccttagaatgacagaggctctgtctttaatacatggattccaaggtgtcaaggcttctatttgtccagttgctttctatggtagtagtggtacttgtgtttgcatataataaattccttaacaaacattcaagctgacagtcctgtgtacatatgtacaggtgtttacattctgttgaataagaaatcctggcaccttttaaatgaagatgaaaagatacctaatctaacttaactacctacgctggtcattgtctttcccaaagctctgcagggctaggtgctttctgctctgacttgcagttgattatttatggtaccttggggtttccccttccttttagccttggcaacattttgacattttttgagatatatttcatctagcttttgttttgttttgtttttgagacggagtttcactctttctgcccaggctggagtgcaatggtgtaatctcagctcactacaacctccaccttctgggtttaagcgattctcctgcctcagccttccatgtagctgggattacaggcgtgtgccaccacgcccagctaattttgtatttttattttatttttttgatacagagtctcgctctgtcgcctaggctggaatgcaatggtacaatcttggctcactgcaacctccgcctcccaggttcaagtgattctcctgcctcagcctccccagtagctgggattacaggcgcccaccaacacgcccagctaatttttgtatttttagtagagatggggttttaccaggttggccaggctggtctcaaactcctgacctcacgtgatccacccgcctcagcttcccaaagtgctgggattacaggcgcgagctgctgtacccagctcatctagcatttttatgtgcttaaagcagggagtgaggtggggagggtgagcagctaccgattaatgtcatctcagcccaccacgctgccagaggtctaaggtgttctttattctaagctcatattaatacctccttttacattcctgaatgaaggaggtttgattatgcaggctgaatatcccaaatcctaaatcttaagtgctccaaaatctgaaactttttgcgtactgacatgctcaaaggaaatgctcactggagcattttgggttttggatgctgaactgaacttgttaagtataatgcaaatatttcaaaatctaaaatccaaaacacttctgtttccaagcattttggataatggatactcataaaactcttcaaagcctgtgagcacacacacgggcacacacacataatcctgcaatgacatagttctaaggtttgcaaaccaagttttttctggacatggactttccccccatatctgcatggtaattttgtatgttagtgagtagccttaaagtcccataattctcttgggagtagagcattaaataatgaactttagctatctttgtttcattatgtcttgctgagtttctgccatagaagagatcgagatgtcatttcatctgggccttactttgctcatctgagttgtatttgtttgggatgtgatttgtagaggccttactggctccatgacaggtcatcccgaagtagaatatttactgcctaaataaagccaaacagtttgggactttttttttttgacacggagtctcactctgtcacccaggctggagtgcagtggccgatctcagttcactgcaacctccgcctcccgggttcgagcaattcccctgcctcaggctcccgagtagctgggactacaggcatgtgccaccacacctggctaattttttgtatttcttaggagagatggggtttcaccttgttggccaggatggtctcgatctcctgcccttgtgatccacccgccttggcctctcaaagtgctgggattacaggtgtgagccaccacgcctggccttttttttttttctttaaagttgtaagactacaggaaatggagaggcagagacagttttggaacctatgtagtcaccaggagaaacaacctgtaagatattcatgttacttactgcctactacactaaagtgaggaatgccaatgcagggaattgggagaggaggaatgaggattgctaaagcaactgcaaataatttatactcctggataacggaatttattacatttacatactctaagttcaagaatgatttactcacaatttagtaatgactttggaaagtacagtaaaatgtgtgagcagttttagttacrttattatttgttggagtctaaagtactccacaggtgttttgatacatgcctgtttggggttagcartgtacttttctggttaaacatcaatgggggttacacrtttatcttctcaacaaaacagsctcctctaatatatgtaaatatgactggtcacctttttctcttaagctaaatgtgatagttctggctttgcttatttgctttctagcagcctccccatgttagtcttgccacatggtcagtcttctgtttggtaggttttataaatcctaaaagttctagttcagaaacagctctaataaaccgagcactggaggctttaattaaggaaactggccgtgctgtatttttgacaaaaagggattaaaatctcaatgttaaaatactagttggtaaaatgaagtagatagttcagatataaactcctaaattaaactataactgttactggaaaacattaattagaatccactatcaataaaacataaatggaaaagtacttaatgcttcctaaatctaatgttctacatagtatggaaattgctccccgcccccacttctaaacgtacattagaaaaatagagaattcagaccaggtcagtggctcacacctgtaatcccagcactttgggaggccgaggcaggcagatcacctaaggtcaggagttcaagaccagcctggccaacatggtgaaatcccatctcccctaaaaatacaaaaattagccaggcatggtggcaggcgcctgtaatcccagctatttgggaagctgaggcaggagaatcgcttgaacccgggaggtggaggttgcggtgagccgagatcgtgccactgcactccagcttgggcaacaatagcaaaactctgtctcaaaaaaaaaaaaaaaaaaaagaattaggccgggtgaggtggctcacacctataatcctagcactttgggaggccaaggcgggcggatcacaaggtcaggagttcgagaccagcctggccaacatggtgaaaccccgtctctactaaaaatacaaaaattagctgggcttggtggcaggcacctgtaatcccagctacttgggaggctgaggcaggagaattgcttgaacccaggaggcggacgttgcagtcagccaagatygcactactgcactccagcttgggcgatagacgagactccgtctcaaaaacaaacaaacaaacaaaaaaaacaaaaaccaaaaaaagagaattcaataatggcagtttcatttttggtaaattttaaaatataatcttgatataaatttgataccaaaagttttaggtttggtctcattttggattaaattcaaaataaagattcagaaatttcagttattctagcaccatatggttaatattaacaagtaatacggttgtttggagtacgcctttataaatatctagtgtagacctggagaaattataaacttatattttatgtgtagttggacattgtagaaatggttttaaaaggatactggataatttcattcatttcttctgaggttgcagaatttgcatccattttttcagcagctgtcacaactgttgcaaaagccttttgaatagacaagacagaagaaaataaaaatgtctacagttgccaaacatcttttactatacttcttttaatggctgttgatagctggcacatattcttcattatatcaaatttaagattgtcaaaactacactgatgatcactttaaaccacttatatattaaaagataaagtaatggttcctgaataatcttgtttcagagaactaagagtatgcagagaaaagaaacgaagctagtcaaaggtaaaagaacaagaaagccctgtttcctctactaatcttactccaggaaaatatctatttttcttggaagcagccaattatggatattttttaatggtgacaagacatctgtaaggcctttaatagagttaagatctttgtaatactattctgaagacagaaagaatagttgtttattttaaagaataacaacagttgtttattgccttgccaagtattccttatacttcctgattgctaaatctgttgtgtagttacttcaattttttttcttttaagcaagaagagaaatgctagttaataatatactttattttgtgaaataacagaactgacctaaattgtttagtttttgcttaatgctaactattgggttagatcacatacttattttgacctagcatgaacacagaattggcttggttaaggaattcaggatcagagggcaggggattgggagtggggactgttgaactaccacttcctaaggaacttttaaagtttgaaatgatttatgctttccaaataaaagacaaggcattaaacacaagataaattccaaagcactaaaagtataaaactattctgagaaagtcatcatggatggttagaaaaatatctagcttgttcttttccctacaacctacctctgaccagtccacgaggttgatgagcctgctacactctaggtgcagtttgtatgctatgcagatgtctggggcgatattcggaatgcagccttcttcgcttttcagtgcttcattctaacaattaacagtaaactaagatgactaacttttataaattattaggaataaaatcagacattaatgaagcccccaacctaaactgagtaaaccagtaaatggaatcttggtttcccttatttagtgagtgagtctattcaatagttagctagttcttgtttaggtttatgtcttggtcataacccctctagttcttagtcactagaagaatattcccaggattagaagataagcatatttttcatttcaatccataaattactaatttctcagacctgaatgcacttaatgtaaaaagtttatggaaatctttaggaatacttaataaaatggtacttccaacacttataattagctgaattctaacaattactatactgtattagtaaatactaataccacttaccaggggtataaatttcttttaaagaaaagactacgttgtcaacactgcagaccttaagccctatagaaaccatcagtgtttcttcaacctatttgaaatccatggcttttactgagaaacacaaagtcttacatacacaccctgctctgatattataatatcaggggtatattataatatatcccacccaaagacaactgaaatcataccagttctcttctgtgacccaccagccaagaagaagacagattttgtaagttttaatttatggtttatatattaaaattaactgattttttggttaagtatgaaattattcagtggttttcaccatcactgaaaaccattgacttatatcgtcctactcaatattcttgtaatactctgcatgtttgtgtgccgttttgcaatgagaagccagtacactggaatgctcttcataggtcttacggagttgtttcttaagtatttattgtggcaagatttctgggtatttaacttaccactctttcatgtatatacagcttattgaatgtttaaagtgatcattttgcccggtcataagaaagctagtttctaaaattgtgagctgtcttgaactattgtttaaagagcttccaggagttgataactgtgtctggactttagcaagggcagctgaagtgtgctgccccaggagttttagtggcagactgctggttatcctctacactcagctctgcagatgctctcagaatagacctttctttgttttaaaatccaagatgaagtcccaaagtatttctctttcccactagaaacaaccatttcggtctttcagtaatttattaggccatattgtttaatccctgtctgctgttatgtttacaggaaacatttcttttattttcacaagagtggtaacattatactctcaagtctttgtgcctatgatctgactttagcatgtgaagggcaaagattacacatggtcaaaaactggcagcaacagttgactactaattgctatctttatggggttagaaatttttttctacagtctaaagaatttttaaaaatatatgagacgtgcaaccctgaattgccgactctctgctcattaaaacataactgcaaatttagtatatttttatgacaatgacgcccagagtctgagctaaactatcagaaaactaaatgttcatcttaccttgagataatagtaaggattgttgagtgcagtatggagggcaattcgcrgagcagcatttaaatgctcacraagggcatgggcagcactgaagtacaccacctcatggagaggctgtgtctcaggaggcagaaggtattctctgaaacagccagtcaggcatccatgtttagataagcacaggtttattttctttatatataatatatatwttttttcctttaagctctgttggacttcaattttcactataacatttttgtcaatcctctctctgtagaggactgaaccatttactaaaagcaaaattaacaaccaaaaacaaacgaatgaaacaaacccaaatatcagctctaatacagtttcactcagaactgcatctcttccatataatagtttttaaaactacctctagactctttataagaagctgtatatttcagttctgagttaaacctttaggaacaaatgtatatatactacatttctgcttagaaatctttaagatagcatttcttaaagtaaatgagaaaacagatatctacattttctagcacagcaaacatttaacctttggcaatattaaacacaggcctggaattaagagttcaggaaattcttcttggatcacagaaaatttttagttgatatctttcatggaaatgacacctcaaaagttgtggggtttttttgttttgttttggttttttttgagacggagtttcactcttgtcacccagactggagtgcagtggtgcaatctyggctcactgcaacctctgcctcccaggttcaagtgagtctcctgactcagccctcagcctcctgagaggctgggattacaggtgcccaccaacacgcccggctaatttttgtatttttaatagagatgaggtttcaccatgttggccaggctggtcttgaactcttgacctcaggtgatccatcagccttggcctcccaaagtgctgggattacaggtgtgagccaccgcacccggcccaaaagttttttatatattggaattacttattacgttagaaggcagaaaagactaaatcttagtttcagagtattgaaaaacaaatcattaataaaatttcacttataaaaaatctgccataatttgggatttttttcacctatgagctagatgataaaacaattttaataaattcggaactaaaaaatatggcattaaaaatttgctttgcatgtataatgagcccatcaggtggtctgtgccatgacagtgatactatactggatgcctggagggtggcaaattggaggggagaagctttggcacacataacccatagacagagtaatgtcactaactggattaaagtatatagttaactcacatgacttcataaagaagatttctggggcttagtccagtcctgagcctaaagtattttggccacatgacagcttgtgtcagctccttttcctaccagtacaagcagagcaaagcagctacctcagcccagtcactggggacattattccccttcttccaagtatcctttctcttcttctggagaggataccactccctagaaatcccctacacttgctttgtcccgatgtggccaggagctctgaagaagagaggaagtggaaagggtattcaacatggacatcactcttcaccatcctccttttctcccccatctcaagagctaatgaccccttgctcattctaattctaggtgctgctccttctccagagtcaactggaacaaaacttacttgcaaagagtgtatgattttgacttgatcctcactaagaaacagtattctatacctcagatactgttaacatcttaattactcaaggttaagttaacttagctgtagcttcaggaaatagtttctgtgatggctggctaccaatttktaatttctgaccataaactcttcctacactaacctcaggcagttatttcccaatcattatacatggctgtcattaaaagatcttgttgcagtccctgctatgtaataaggattggatatctaacaaggcaatcagatagagtcaacttcagaaactcaaactatcgcctcacattttaacatttttacatgtsatatatagaaattcaggcatttcccaaggcaaaagacctctctagatatcctcaaagaaccatcagagcaaaaataaaatatctgccttaattttgtttccactggctacattagttgaacaacaacagtaacaaaatacattatacattagaatttttatctgactgcagacttggagattgacatagaaatatacttctgtgacttatttatgtgagaagaagtaagcaatgagtctggcactaaagcactgcattatgctcattttggattcagaccagacaaatgataggccttccctgaaagaggtggttctgaaggaactggaggaattagtatcaacaagggctacaaagttgaagcttgctattggcaaaaacagtaacttagaaagtggcaatttattctcagctctcaagatctggcaacttattcttgcctgccagtatttttgccaagagctgctcatggtatactgtgaactctgcctcctgaagtctcctgcttatatttgtctttaaaggacatcctttctccataactccaagctctgcccagacatctgtggtgtggctgttgagggcagtgtagagaaatggagagggccttttggcagatgtcaggagaatgagactgtgtgaccttgcatgagtcacagcccctctctggcctttagctgccacagggctgactcttcaggtctcttttagctttaacatgctacaattctaatctcttccctcctgggacaatcttggtaaagacactaaatcctagtatggaagattttgtgattttacaacaaaacacatttaattatactgagcattatttcaacaactgctcagaaaggtaaaaagtcagacatattaggtgaaggatcatgacagggaaacggctgatgtgatttcagagcctacaatttggaatttgtaagaactctggaacctgacatttggcctaaaattggcaaatcacattgcaaaattatttttagtgactaccatgttcactgcctggtaaaagggaagagtcaagagtttggggctagactctacaagaacaggaaagcccagtagggcaaggttaactctgtgggttctaaaatgtaatttttgaccagtatttggccaatattgcagttcatcactttttttttttttctcgagatggagtcttgctctgttgcctaggctggagtgcagtggtgcgatctcagctcactgcaacctctgcctcccgggttcaagccattctcctccctcagcctcccaagtagctaggattacaggtgtgcgccaccatgcccagctatttttcgtatttttagtagagtcggggtttcaccatgatggtcaggttggtctcaaactcctgtcctcaagtgatctgcccaccttggcctcccaagatgctgggattacaggcgtgagccaatgcgcccggccttggttgatcgttttggaccttttcatggcattagcaatttctccccaatgactaggaacaatgactctgtccccacattattctggaaaactaagcttttcactttcagaaaagacatgtaatttgtcagaaaagcactctttctctttaataattgtgctgctattttctcagtactttattcagtgcctagcctgctgttgggtttaaactgccattaaaaattacaataaacagggccgggcgcggtggctcacgcctgtaatcccagcactttgggaagccgaggtgggtggatcatgaggtcaggagttcaggaccagcctgaccaacatggtgaaaccccgtctctactaaaaatacaaaaattagccaggcctgttggcacatgcctgtaatcccagctactcgggaggctgaggcaggaaaatcccttgaacccgggaggcggaggttgcagtcagccaagatcacaccactgcactccagcctgggcgacagagtgagactccgtctcaaaaaaaaaaaaaaaaaaaaaaattacaataaacaatgataacaggttctcccccccccgccccactttttaggtattaaatcgttttcttttgcacacttctcatttttttctgtagcatgcccaacttccaccaaacttaggtgggtgattttacacggctacataaagctgacttttgggaaatccatgaatcagaatgatctgggtttcctaaaaaggaaacatcttaaaatacaggctggattggtagacttctaaatttacccagcacatgtctcaacataaatttagtgctgataatgaggtgcactggcattgtttagaattaaatgttctttcttcaggataaaatagagcagcatggctagtctgctctactttctgggcttggctcagatccagcatttactcctagcaaagataaagtgtaatacaaatactttattattagaaagagaaacattcactttctatctcatctctccccacctgacctaatgaagtagatcaaatttaagcctatattcttaactgagattaaaagaatgaactaagtcatttgattagacatcttgataatgatggaaaaagaataaaaattacaattctttttttttttttttgagacggagtcttgcaccgttgcccaggctggagtgcagtggcacgatcttggctcactgcaagctccgcctcctgggttcatgccattctcctgcctcagcctcccgagtagctgggactacaggtgcccaccaccacacccagctaattttttgtactttcagtagagacagggtttcaccttgttagccaggatggtctcgatctcctgacctcgtgatccaccagccttggcctcccaaagtgctgggattacaggcgtgagccaccacgcctggcctaaaaattacaactctaagctagatggagagacctgaaaagcataaagcctaacctaggagaaaaatgttctggattggctatagacagctatgacaccagtgttatttggaaaaacagcatgatttttagctcttaagagctaaatttagacttacctcactagacagtcaatgaagttcacaacattttctctgagtacttcaaatttggtttgcttcttacttcttcttaactccttcatttccaataaggactayagataaaagaacatagcttttctggtgatcctcagacagaaaacccctcagagggagctctgttggtaagttctatagaagcacctgatgccctttccataagacaggatgtacagagaaagatcaaaatgggttttgtttattctttttatttttaaggtctggcaagaatctcgcctcaaaggtgttttgctttataatatacaagcaaatttttagggaaagaagaaaagggcagttcactttactactaaattacatggcagagtgctcactattcagtccattaagtcatttaagaaaaggacttaacaggataaagaaaaaaatcttgcctttttgccatactaacagaatagattccatgtgttttattttacttagattgaaattttactctacatttatcataatttggtatcacagtacaaagaaggttcttcatttcgacaatcaagatcctaaagttagaactatctgaaaaagaatatattggatatactgtggctcaatttctgctctatacttgaatatgcattttaaaaaatcaagaaaagtaactaaaactaattagttaggctcttttaaatctctcagtttgatcaaacagaaaaatacatcagataaataatcagatttgtgcagccatgttcccattttctcttattgctagctgattctctttctcttgctgagcccacaggaatggtttccacctatgttagctagtaggttccagaatgtgtatatgtagagtaatgatggcratgggactaacaggatgttcaacttagaagtgagttaaaagtctgctttgttcctggttgtggtttaaaaatgaaaacaaaaacatccaggcagagytaatctagagcacaaactgaaaaaagggagtgtcacaggatgcagctggaagggaagagagtracctgaccttctgaagatgatagaggtctgtcttctgaagcccctttggctgtgacccagaagcatcttcttcctctttggtttctgcttttaatacaaaaccagyagacatcaatgagggtaaatccaagtcaagggaacaaacatttctactactccaaagtaaaagtttcacctatatatatttttttaatgtggcaagggatcaagattccatctgataaatgatttcttacagaagctgaaggccaataatatataacttgtgctgtagtgatgtcttcaaaaaatcagctactgaattttaaaagtgtaaccacaatgaaaacaaaacaaaatacaacctaacaaaactccctcaaaccaacagcaaaaagtctcaaaaaaaaaawtttttttttttcagatggagtcttgctctgttgcccaggctggagtgcagtggcgccatcttggctcactgcaacctcctcctcccagttcaagtgcttctcctgcctcagcctccggagtagctgggattacaggtgccggccaccatgcctggctaatttttgtatttttagtagagaaggggtttcgccacgttggccaggctggtctcgaactgctgacctcaggtgatccacccgctttggcctcccaaagtgctgggattacaggcacgagccaccatgcccagccagtctcaaatatttttgatgttatacatagctttttaaaaaaataataaaaacttaaaactgttttcctttgattatgtcaagattgtaaacaacaaaatttgagtatgaggagggtagtgtgtaaaagttttgaaataatccactaaaacataaagtgcatcatggttctttagcaaagggaaagaaaaccataactgcttaaatgtacagctgtgctccttctagagagcataatgctctcatattcttcttcaagtgcaggttgggttttgtgaaccccacacacatggtttgtttggcctaaaactatgacaggaggatgcagctggagaatatgcattggcttaaagaataaactgctttttagctacagctaatttctggttcaaaaaagacataactaaaggttaaaatgtctactagattctttgtcccatgtcattaacatgtagtttgctacatgttaataaacctaatatgcctttgaaatatatctaatatgggctgaatgaagtgcctcattcctataatcccagcactttgggaggccatggtgtgaggatcacttgagacaaggagttcgagaccaggctgggaaacatagtgagacactgtctctatttaaaaaaaaaaaaaataataataataattaggctgatgagggggcttatgcctataatctcaacactttgggaggctgaggcaggcagattgcttgaacccaagagttcgagaccagcctgagcaacatggaaaaaccccatccctacaaaaatacaaaaaaattagccaagtgtggtgggacgtgcctgtagtcccagctacttgggaggctaagatgggaggatcacttgagcctgggaggtataggctgcagtgagcctatcatgctactgcactccagcctggacaacagtgggagactctgtctccaaaaaaaaaaaaaaaaaattcagctggatgttgtggcccttttctgtagtcctagctactcaggaggtggaggcaggaggattacttgagcccaggaggtctgagggaactgtgagctatgactgcacaactgcacttaagcctggacaacacagcaagatcctgtctcaaaaaaaatctgatatgacactctgtcctacttaactcttcccaactgtaattttaaacccaaactgtaatatgtaataaatgttaaggaacacagatagcatatagccaaatatttctactcatccaacgtggggagttttagtttcagtttattattaataatgagtcacttttgaaaatcaggaaataacagacatttcttcaagacagtggttgtgctttaatttgtaaaattctttattctttaggctactaatcatcttaatcttcgaccttcccatttcaaaagctgcattcctttatttagctctagcatatcacagaatttgtttactagctcatattatatgaactctaattaaaaatgtatctagattacctcgttaatggtgcccagcaaaaaaagaagaaaaaattatatgtgcagtttatttttacagcaatctccataagtcccattttgtaaaagactgaaatttacacagtatttaccttctatttttctaagccttttaccctatttatgtacttaaggttggccccttgctgatccagtgatcactattagggcgtatttatatcgtgaattagcgacagaaaaacaatgaactagtggttaagagagatgggctctggtctgagtgctaccactagctagctgtgtgatctcaaacaagctgccgtcttctcctagactttagtttctggttatatagctgaactcaatgatcttaatgataccaacatccagcccttaaaagtttttgtgttctgaagagtggttgagttcatgctgcagtggcaagagcaatgcccacacataacctgaaagaaaatcccttagtgcctgctgatgacttcctcactctggctgctcaggccactctagtcaggcaaacattctctttcatcttccatgactgagcactcatcaggtgcctcacattgtagctatggagagatatgggaagatttttgcaaaagcagtttcctaaagccaaaagatttttaagacaaagaagcacttgccaaacataaaaaaggattaaaacagacattttaaataagatattttcaacatgtcatgtccaattctatgtgattatatatgaaaaaactacctgttcccccaaaactccattaaaaaattgccctaaatttgggaaaagtaaaacgtacacaccaatatattttattgttgttattgttctactaaaagaataccatactttggtgctagaaacagagcaagagaagagcccatgaaaagctagtatttagggaacagaacatggctacctatatacaatcagacaccctaagcattcaggatatataaatgatcatgtggaggtcaagcaaaagagagaaactgtaaccctccaacagtgaagagtgccaggctgcttcagttaatttaggactgaaagattccagcttttgtaaatccgattaaagtaagcctcatgcagattttggtaatcaacataccaatgagcctcactgctgtgaaagcagttcatagctattaatttttcaagcttacagatgatttatgcagtgctttggaaatctataaagaacttgatgaaatgcttaagaaaaaacctctaaaaagagttcttaattatgacaccctgctactctttccaatctttttgatttctttttgttgactttttaaagacaaatcccccaaactgtcgatctggagaaagattttctttttctgcccatttgatgctctccattgtttaaaccaaatctagaagagaaacatttggcctatttgtgattgttaaaatgtgatactatgaggcttggcatactgactgatcatgaactactttatctctttatctctaagcacatcagaaggtggggttttccatgccattttagttaaatgactgtcatggccaatagaattggaaggatattacactcttaccatcgaggctctgaaactgggccargaactcctctattctcttagctgtgctgccaaggtggttttcacaataagacttaaaaaccttgaaacatttctcaagtatggtcatcagttcatcctttgccaacatcctagaacagagtcagtgacaggaaatgtaatataactagaaaattaacacttaaaaaacattttatttaatatacatattaaatgtttccgctcagaagataaaagaaattcttcattagtagctaccaacattttttggagagattttcctccatatatgtgacattcagaagaattcttgaagggttctcatgataaagtttagcttagaaaatttacaaaggtctggattcatagtgtggctctaacatgatgtttgtaataaagaataaggttattatacatctctgatccttggttcgttgtctgtaaaatggaaataataacttgcttatttcacaggttagatggagacttaaaaattaaatgagaagaagcagtggaagactctagcacagtgcttaccacacagtaggcatttaatgatagttttcctttcttttgatctaaacgtacatatgaaataagaaatgtctacagaagatatgacgtgctaaatgtaaacttgtttgaaagaaccaaaatagtacactcatttctctaattatcaccatttaaactatgctttacatctcctatgggctttataaacatcagtcagtaaacccactgaactttaaatgaagtaggcagatctaattgttatttatagcacaggcagagtggttgagtagctcattcacagctatagaagaaatctttgttagaaatggagagaaaatacagatattctaaagttaggatcttgttcttggagtttacaggatttctccactaagatcatactcagtaatggcatcaaaaggaatcagaccaatattaggaatttttaagcagtggcattacacaaatattcaaattattctcagcaaatgcatctaagtcattaaaactatgatgattaaaagttctaatatttccaggcacggtggctcacacctgtaatcccagcactttgggaggccgaggcgggtggaccacgaggtcaggagatcaagaccatcctggctaccacggtgaaacctcgtctctactaaaattataaaaaattagccgggtgtagtggtgggcgcctgtagtcccagctactcgggaggctgaggcaggagaatcgctggaaccggggagtcggaggttgcagcgagctgagatcacgacactgcactccagcctgggcaacagagtgagactcagtctcaaaaaaaaaaaaaaagttctaatattaaccatgaagtaacagacaaatccagaatgtgggcattttgtaatacaactaattcacttatatttgacatctttcataataaaaaaatgaggagaaatactaatattgctaacttgggagaaagaaacaaagctaagtagactatgattactgagaaattgaactggttacttgaactaaaatttaaaccccaacaacaacaacaaaaagtagacaaccactaaatatggcaattgttaagggtagaccaaatagtaaatttccacagggtttttttaaaagtataaaactttatcttcctctttctacaataattatctaagatataatctttatctgtgaaaggcagctaactggtcaaggaaaaataagccaagacatttcatacttgattacagttgagatttaaaatttgtggctttctattgcccagatagagttatgagaagaaagttaactcaaagtcagatacacttgaacaatctgttaaacctgacctttaggcctattcaaatagacaagattagcatttctggtgtccaaggaatcaccrgcactgacttgcttggaggggaaagacgggtgaggttytgctggcagaagatctaacccaagttagcagcatgtgaaggattagcttcccaggataggggcagcaacagctcttgtccactttgagctccaaataactgaatatcaaggaaggccaaacctagcctattatccaggagaccaaaaaagagggcattatttcatataactttggaagcaaacttcattagtcataactcttaatgtgtcacttggagaaggtactcagatgtaaactgccagggattcaaatagttattagtcctcttattctttttttgttttttctttgagacgcagttttgctcttgttgctcaggctagggtgcaatggcgtgatctcggctcaccgcaacctctgcctcccaggtccaagcgattctcctgcctcaacctcccgagtagctgtgattacaggcatgcaccaccatgcccggctaattttgtatttttagtagaggcagggtttcaccatattggtcaggctagtctcgaactcctgacctcaggtgatccgcccacctcggcttcccaaagtgctgggattataggcgtgagccactgcacccagtctagtcctcttattcttagccaaagattatgttttgctcccagagcagaaagatcttacactttctcaagtattctcttgtttaatgtaaaatgacaagacttgagataaggctgattagaaataataacttaaccaaccccaataaagtcattatttaaaattttttttccagtaaaattatacacacacagaatcaatgctgcctgctatcatcactattattcagcatcattctggagtctagatgctacaataaattaagaaaaagaaatggtataaatgttaagaaggaggatgaaattaatcatttcatatgatgtgactgtaaagttagaaaatctaagaactgcaaataaaagagagtgtaaaagagctgggcgtggtggctcatgcctgtaatcccagcagtttgggaggccgatgggaagaccacttgagcccagatgtttgagaccagcctggccaacaaagtgagaccctcattcctacaaaaaatagaaaaaattagctcagcctggtggcgcacacttgtagtcccagctactgaggctgaagtatgaagactgcttgagcctgggaggtcaaggctgcagtgagccgtgatcatgccattgcactccagcatgggtaacagagaccctctctcaaaaaaaaaaaaaaaaagagagtgtaaaaaagtaagtgaataaaaaatatatatgcatgcatatatacatatccatataatgtaatcaatatcttataytaaactacataatgaaaaaaaagcccatgttcaaaatggtaacaaaacctactaaatacacagcaatacacattataatatatgtgtatgacctatattaaaaaagccctgaataaatgaatagacattttaacactcactattgtaaagatacaaatctttccaaattaatcgatattcttaacagtttgaaacaaaattacagagggtaaattttatttttatttttatttgagatggagtttggctcttgttgcccaggctggagtgcaatggtgcaatctcagctcaccgcaacctctgcctcctgggttcaggcgattctcctgtctcagcctcctgagtagctggaattacaggcatgcactgccacgccggctaattttgtatttttagtagagacagggtttctccatgctggtcaggctggtctcgaactcctaacctcaggtgatctgcccgcctcggcctctcaaagtgctgggattacaggtgtgagccatggcgcctggccgtaaattttaaaaactaaaaattattctgaaatgtatctggaataattgttctaaaaaacaggaacaatgtgtgtacacttgagtgtgtatggtagggctgtaaatacattaaacagtgttaagctatgatgattaaaattgatggtacttgggaatagacaggtcaacagaagagaatgagttcagaaagagatctaggtgtacatgggtgtttgttatgtcacagggatagcatttcaaatcagtgagggaaaagatactgggtatcagaattaactattttaaaaaaacaggtcactatctcaccttatacacaaaaatgcatttcagatagaataaaaatgtaagtacggtctgggagcagggaaaaagaactagctcatcaaccataaaatactagaagaaaaccaagaaagatatttaagcctgataatatccagcagcagcaaaagtgtagggaaatacacactggtacatggttggtgtgagtgtacactgtacaacaatgtttatattttagactcaatatgtttacatctacctttgttttgtggaaatagttatacaaatacacagacttaccactgctcatgattattgtttgtaatagtgaagaattagaaacaatctaaatatgtatcaaaaaagggtctgattaaataaaaagcactttaaaaacatgatattatatagtgatgagaaacaatgaggtagggcaatatgtaatactaatgatgacagctaacatttatacccacatatgtgtatcaagtgtcatttgatacaatacaatgtaaatactattattattcccatgttagagatgagaaaacaaaggcacagagaacttaagtaaacttgtccagaatccaatagctggtaattggcaaagctggggtttgaacctagacagttcagcttgacatccatgctcttactgagcatgctatattgcatctcaaaacatggcatctgtggtagaatattaggcacaaaccaaaataaccaccacaacaaaaacaaaacaaacacaaaaaaacaaaaaatgcaagtgtggaacaccatatatagtattatttaatatacatttgtgtgtggaaaaatatctgaagtgcaaatagctaacagtggatgactggttttcgaggttatataatacaaggggtaatatcagaaaaatacttattttttcacttagattattagaatgactatagcaagcactttttttttggttttgttttgttttgttttgttttgtttttgaggcagagtcttgctctgttgccaggctggagtgcagtgaggcagtctctgctcactacaacctctgcctcctgggttcaggcaattctcatcctttagcctccagagtagctgggactacaggcgcatgccaccatgcctggctaattttttgtatttttagtagagaggcggttttaccatattggccaggctggtcttgaactcctggcctcaagtgatctgcctgcctcggcctcccaaagtgctgggattacaggcatgagccactgcggccatcaaagcacttcggataaaccaaacctaactgaagaagatcacttgaaaacaactacaaaatatttagcttattccaaaaaagtgtgtttatatatagcacctcaaataaaaaattaaggattgagtctagctatcagacaagcatttttcaaactgggtttcaactcctttgtcagtcatgaaccaatcattcaagagatatttattgaatgcacactacatactagtcactgttctgggcatttgaggtacaccttattgaatcaaaaatcactgtcctcacggaacttacattctagtgggagagctgggagaagcacagacatgcactatctatctatatcatatatacgatatatgcgttaaaaattgataaatgttatggaaaaatattgaacagaataagcggagagccatgggaggaggaagctttcaatttttaaatggttagggcctcactgaaaaratgacatttgatcaagtacataaaggaggaaaggaagttagccatacaaatatccagaagagcttttcctggcagacagaacaatgggtgcaaaggttccatagtgggcatatctggaatattcaagaaaacaaggaggccaagatgtctgaaatggagagagaaaatgagcagtaatcagagagaggccatgtggggagaggaggggggcrgtcacatagtgtcactgtatacggcttttactctgagtgaaatgsggagttaacggagggttttgagcaaaggagtaacattatctgaaatattttaaaaggactattctgactgctactttgagaagaacctgtaggggagcagaaaaaccagaaaggaggctactgcaataatacaggtgagcaacgacgatgacttagactatgatggtacaagtgaaggaaggtggcaagaagaggtctgattctggataaattatgaaggcagagcccaggcttctggtttgaaaaatcagaatgataaagagacagtaggaaaatgatagatttcaggggaagatcaggagttcagttttgggtaggttaactttgaggtgtgtattggatatctaagtggaggtattaaataggacataaatggacataacagcctggcactcaggagagaggtataggcttacgattaagccctggggcactgtaatgttaagatgtcagagagaagagaaagcactaaaggagaatgtraaggagcatatactgaggtaggagaaaaaccaagaaagtcctagaaatccattaagaagggagtgatgaactgtagtcaaatgctgataacaggttaatgctagatttaggaacatggaggtcactggtgactttgatcaaactagttgtgatctggagcacaagcctaattgtaatcagttaaagagaatgggagaagaattagagacagtgagacaatgctttccaattttggtacattccaactaacattttgttttaaaataaagagaataaaattgtaaagaaaatagcagaactaaaaagtttgaaagccaccatgtgagattaaagagaaataaaaaaaatgtctaagataggtcacattaatgccacaaaagagcgatttatctttatcccacttaattaagaaataattacttcacaattggcagagcacggkagctcacgcctgtaatcccagcactttgggaggccgaggcgggcggatcatgaggtcaggagatcgagaccatcctggctaacacagtgaaaccccatctctactaaaaatagaaaaaattagccgggcttggtggcaggcgcctgtagtcccggctactcaggaggctaaggcaggagaatggcgtgaacctgggaggtggagcgtgcagtgagctgagatcatgccactgcactccagcctgggcaacagcgcaagactccgcctcaaaaaaaaaaaaaaaaaaaagaaaaaaaaagaaaaaattatttcactatcaggtaaatggtccaaaaaatgcctgtgatacctaatgtattaaaagctttataggtaatctgtcacwggagttgagaaaaacaataaaggctttatagattgtcattttttaaaaaagttttcttaactaagaaagagaatcattaagcaatcattaaaagcaatcatcctgcagggcaatggagtattctgcttcatcatacagaaagccaataatttctggttaagtactaattatataaatgtctgattataagaactggctacaaggaaaaactggccaatccatggctaatgaaaacatcttttgcctgacgagttttcaaattctaaacaaacattaccattaccagctagttttgaaaaatactcagaactcaaacttgcaaatgtatatatatcaatgaaggctggaagttaaggaaacaaaacaaaacaaaaaagcatgtaaaaataataaaaagcatgtaaaaaaattaagaagcatgtaaaaataagaaattgtcttattcaaagactaacacaacaaagcaattatgtaggatgataacaatgaaacagaaaccaaaagtatgtgtatcgcctcctaagccttgatatttcatattaggtgccccttcctagagaagctgccaaccccacaaatggaggttaactgtccagtctactggttcctcagcaccctagccctgacccatcacagctcttactactctgaattgtagctctctactgttcatgtcaatgatttgaccaaaattctgtataggtaaggaccagggttatctttgtcatctgatcagtggtttcaaaaatgaagcatttaaaaaaccccttttttttttaatggatgggcaaagcaataaccatgcaataattaataatttcctaacctaatgccttagtgaagaatactttttctaaagrgaacagttctcaaactggttcatcctgggaagcacctggaagtcatgatgccctttgtgggatgccatgcttttttgtggaatacatcaaaaagaataaatttaattcatcacatggttagaagcaacttgagtaagttcaaatatacacatactttattgatgcaatttttttttttttggatggagtctcgctttgtcacccagcctagagtgcactggcacaatctcaactcactgcaacctccacctcccaggttcaagtgattctcccacctcagtctccagagtagctggaattataggcacacgccaccacgccaggctaatttttgtatttttagtagagacggggtttcgccatgttagccaggctggctaactcctgcaacctccacctcccgagttcaagcaattctcctgcctcagcctccctcgtagctgggactataggcgtgtgccaccacgcccggctaatttttgtatttttagtacagacagggtttcactatgttggccaggctggtctcctgaactcaggtgatcctcctgcctcagcctcccaaagtgctgggattataggcatgagccaccatgcctggcctattgatgtaatttttaaaagtacagtcagccggccgggcgcggtggctcacgcctgtaatcccagcactttgggaggccgaggcaggcagatcacgaggtcaggagatcgagactatcccggctaaaacggtgaaaccccgtctctactaaaaatacaaaaaattagccgggcgtagtggcgggcgcctgtagtcccagctacttgggaggctgaggcaggagaatggcgtgaacccgggaggcggagcttgcagtgagccgagatcccgccactgcactccagcctgggcgacagagcgagactccgtctcaaaaaaaaaaaaaaaaaaaaaaaaaaaaaaaggacagtcagccatctgtatctgtgggtcccacattggtggattcaatcaaccttggattgaaaatattttggggggtaggagaagagaccgtatagaacatgtacagacttttttcttgtcattattttctaaacaatacaatgtaacaactatttacatagcatttatattgtattaagtaaaaagtagacatgatttaaaatatatgggaggatgtgcacagcttatatgcaaacactatataccatttcatatatggaacttacggtgtcctcttaaaaccaatcccccacagacagtgatggatgactgtataaccctgagttcacaagaaagaaagaaaagagttgtcaaaatttgatgagttatttctgagtttttaaaattaatgtttcttagttatctgttcattttgctaacagaaaagtgacagtaggcagtaaatgtttaataaagaaaaacaaaatacaaattcagatctttttttctgtttactgtgataaaaaccattagctcactattagcggaataccgcagtccagttttcgagccaatttgagatcaactgcctacagccattcagcttctccacaaataaagacttttcctttgatggcttcattgttttcctcaaaagtttccycctccccgctttttttttttttaacctctccctttattttctggaagtatttgtcaaagtatagttcctgggtcatctgtctgaatgtgccagagtgcttgttaaatgcaaattcctgctgaaacaccataccagcgttcccaacagaagctctggggaaagagctgaaatgatcaatatctcagctaattctctgacctcctgatcagcccgcctcccaaagtgctgggattacaggcgtgagccacctcgctaggccatatctcagctaattcttatgcacattgaagcctggaaaccattacacaaaaaaacagtgactctcaatatcttttgtttcaaagagagctttaacaattctgtcccaagcctgatttcatcatctgtaagcctacagataattgtgaaggccctaatgtgatgcaaattcaggattggcaattccttttctaaaataaagaaattatattattttatttatttctatttttttatttttcattttatttttattttttatttatttatcttttttgagacagagttttgctctgtcgcccaggctggagtgcagtggtgcgatctcggctcactgcaagctccacctcctgggttcacgccattctcctgcctcagactcctgagtagctgggactacaggcgtctgccaccacacccggctaattttttgtatttttagtagagacagggtttcaccgtgttagccaggatggtctcaatctcctgacctcgtgatccatccgcctcggcctcccaaagtgctgggattacaggcgtgagccaccacacccggccatttatttctttatttttcattttatttatttatttttgggacggagtcttgctctgttgtccaggctggagtgcagtggtgtgatcttggttcactgcaacctctgcctcccggattcaattgattctcctgcctcagcctcctgagtagctgggattacaggcatgtgccacactaatttttgtatttttagtagagacggggtttcaccatgttggccaggctggtctcgaactcctgacctcaggtgatccacccacctcagcctcccaaagtacttgaattacaggcgtcagccactatgctcggcctatttattawtttttttgagacagggtttcactctgttgcccaagctggagtgcagtggtacaatcacagctcacggcagcctcaacctcctgggctgaagtgatcctgcctcagcctccaagtagcttgggctataggcatgcaccaccacgctcatatactttttgtattttttgtagagatggggtttctccatgttgcctaggccagtctttaactcctgggctcaagtgatctctctgccttgacctcccaagtgctctaattcataggtgtgagccaccgtgcctgccagaaattatattttaatgatgcagtcttacaaakctcttggatggataaatctacatcatcataagttagattattaggaagcttatcatagattgtggagctgtgtcatttttcctaagtagatctttaaatatcacctaaagttgatctgcaaagtcaggaaataatgcattacttagagtccaaatttctagtctctttgaactaagctgaagtgatcaaatgttaacatcattattcaggtcatgtttttattttattttatttttttactcaatgaaagctgagctgacctgctaatatattactgtttaagtcaaaagccttactcagaaattagaataattcctttagcctaaggtaaattcctccagctatcaatcaccttcgatttgtaagtctgtttctttgcaagctcataaggttacacttaggataagcagactagacactgtggctcctttcatttatgtctgtgtcctgtgccaatatgactagtgtcaggatgggggaggagggtatctgagtccacagaagcttgctctgctggtttaaaattttggatacactctgaacatgtaatactggccacaaaaccataaatttccttttattaccacctctaagtaactggaatagggttgaaagagtttyagctctgtcaactgtagaaaagtcaatgtttctggccttggtttcctcatttgaaagaaaatggaataactgtagatgagtaattctcaattgatgaggtagagcacataaattcccctaagaagtggggcacacttttcattatccccaatccaagaatccactgctactggtatgagagtgtagtactcttcagatctggctgatccaacatactcctttaagttgaggctctgattttttttttttttgagatggagtctcacttggttgcccaggctggagtgcaatggcaaggtctcggctcactgcaacctctgcctcccagtttcaagtgattctcctgcctcagcctcccgagtagctgggattagaggtgcttgccaccacgcctggctaattttttgtatttttagtagagacggggtttcaccatgttggtcaggctggtctcgaactcctcatctcctgatcttgtgatctgcccccaccttggcctcccaaagcgttgggattacaggcatgagccaccacacccagctgcctctgatttacaataacccttaaaaccttatttatgcaaggttcagtgaattttaaaaatatgaaaaattactggcctagcatttgatttctagatgggtgttcagaaattttctccaatagaggggtaaaattttcctcttacagtctttcacatctgataaggaaaaacagttgtacttacctagctcactgctgggttagcatcatttgttactactttctgttcccaaatggctttttaatggaaacatatccttatataatgacacagggttgagtgaaaaattaacctactcatatcccatatagggatgtggtcttcatactccaagagttgactgagcaaggaaaggcagaacatatgcagaaccactgagctcatgtcaaataatggcatatattataaatgaacacttgcatgctccccacacacatgaatgtctgttgcatacatttaaaaaataactgtgatataaaattatataggtctttttccactaataaatatgtgacataaacattctcccacattattacaaagtcactgtaaatatgttttaaatggtcaccagatatttcttcaagtagatgacatattgtttgttttattttccaggtttcaacagttttattgggaggttttgttttctgtgaaatacactagaggctgaagaaggggacacattccctttacaagataagggtttcccaccactaaagaaaaggcatgaggcgtgacatactggggtttgaatccgcctccttctgctttgctcacatttctttttttctctttcttttatatgtatatttttgagacgaaatctcactgtcacccaggctggagtgaagtggtgcgatctcagctcagggcaacctttgcctcccaagctcaagtgatcctcccacctcagcctccaaggatgggaccacagatgtgcaccaccatgccaggctaatttttttttttttttttttttttttgtatttttggcagagagggggtttcaccatgttacccaggctggtctcaaactcttgagctcaagtgatccgcccaccttggcctcccaaagtgctgggattacaggcgtaagccactgtgcctggcctcttctttctcaaaaagtatcacagaacacaaacacaaagccaagagataaaaacagcaacatcaacctccaacagggccacacccacaccttgtcccactccccaggctgggtcaggcctgggaggggctggggcagctacttactctacagtccccaggctgcagaaggctgcaggctcagaaggggtgggactaaattaataaattagaataaattggggggaggaatgcaactttgtgctgggagggccccttctctctaacacgcaagagagttgttgggggaaggtaggaggcatcgccaaaggccactatggtgggggtaagagcagcggaggcagaagtcaccttttcttccatgttcttcccaaacaaagcagaagaattaggggtagagggatgtctacagccatactamcctgaatgggctggatctcatctgatctgtggttatttaaacatgtcagcttccacatacagattgagtatcccttatctgaaatgcttgggaccagaagtgttctgcattttggattttttcagattttggaatatttgccatatgtgcataatgagattatcttgagaatgggatgcatgtctaaacacaaaattcatttatgtttcaaatacaccttctacacacagcttgaaagtaatttcatagaataatttaaataattttctgcatgaaacaaggtacactgaatcatcagaaagcaaaggtgtcactatctcggccaactagatggacaatcaatctgtagttgcttggtatccccatcattactgactcttgaatttatatgcaaccattttcttacacttattcacatataagtacttaacacttaaaaaacaggacacaccattggtacagtgaaaaaataatgtgttaagtgtaactaagtaatacccatatcagtgttaaacaacagcaacaaacaatggcaagctgaataaactgtggtgtgcctctgttttgctgcaacccatttcatgaggtcaggtgtggaattttccatttgtggtatcacaagtgctcataaagttttgaaatttgaagtgtttcaaattttagaggactttgaatttcagattttcagattagagatgctcaatctgtaaaaagcattttttcttgaaaaataatttaagctgattcttataaaaaatttcaaataagaaatttaattagattatgtttctaatagtaccttaagcagttattctttccaaagcatcattcaggggtcattttagtcttttctctcatgagttaaataaaatttcaagacaggtgatgagaatggtctcaagttcaggtgatgcctattgagaatgccttaactaaaaagcgtccctgacttctgctctacatcaaatctgtacaaaggagaaaaggctgattccagcccagaggttccccaattcctttcctcttttatagaacccagactcctgcctgtccttgctgtaggtattatatttgacccatagtgctttttacattgctttgctcttgactgcccatgtttctgacctcagcttagcaaaatgaaatctcattttctattttttgcttctgctgtactcagatctccaaatccatattttagatcttggccaagaaaagcagaaggtataacagctttgaagtcagacctggagtagaatcctggttccctcagcagctaggtgatctcaggcaagtcacttaatccctgtgtgtgtttcagattcctcagggggtaaagtgtgcctaataatatctaccataaaggtatattaagagttttagattggaaaatgtactgagagtgcctaacaaagtgccttgcacacagcaagccttcaataagtgatggttactgctatcaccattactactgctgctcatgtttccttaccctactttggaactggcattcttggttcttgactgtaccctaagacaactggtgttgggaggttcagaacaaaaagaacaagttcctctttgacaaaagaatctatgaatctgggaacacctcactggagaaggaagacaattactaatcacaaagcttaaaagagaaaaacctgaaagaatcaactgggtatataagataggtatatttagaaagcaaaataagtctcagaaatactatagttgacataagcttataaatacatagaaatcttattgggattttttggtttccttatgggtaaaaaaaaagaagaaaaaagaaatcttgttgggattttaaaaaatgaaataaaacacagcttttcagtggcaatctagtttccatggggaggtatttttccagatagcatgaaattcattttctatcttaagctgcacctgctagatcactaatatttgtattattaagtctctggacttgaagtgctttcagtgtgaattttcctcctactgtgcccatctgttcttttcttgtgggcccagaggaaagcaagacttaataaatattcagttttcagacttctttaaaatatttttatataagcatttacaacctctgaggaaaattataaaactggcgaaacttagctcacatgtgatttccccttataactatccaagtgtcatttttttatggaagactaaaaagtaactatacatataagaagtgaaaccaaggaatataaataataactttaacactaagatattttatttacttgtatattattagataaataatttatgaattagccaatgttaaggtgagggaaggcaccaaggccactgcctactccttgctgctcctagtcaaggtcagctgtgaccactgggtacatatcacccaatgatgctcttcctgcattcaaccaggttggggacatggtgacctcacttttcatgacttgctttccctgccatgatgtaaagttggctggattcaaatgatccatatctaagctctcttagggtagtgtcagtatttgactaaacaatcatggattttcctttaaaaaccacaagctcaaatgcaaggttaaaccagcaaagaaacggatagttgctatattaaaaacatcataagctacatggataaattcaagatatatgcaaatattcttagacacaacatggctatttatgaaactttttggcaggcagggttctagaggaaggtgctacttactggcaggcttatagcagacaaaaatagaaaaacaagaaaaaacaaaactacctcagcagctgcaagactgatgcatactcctctgaatcccatatgttcttttctaaacatgtacagtacaactctctgatctgtaagggaacaacacatttgtgaggaaccaaaagtgtatacacactactagtttggcaaaaatcatttctggtcaacacaaaaaaaattaatgttattaaaagtcattttctttagattataatagacttggcatatatctcatggatcaggctttataagaatgcaatttacggccaggcgcggtggctcacgcctgtaatcccagcactttgggaggctgaggcgggcggatcaggaggtcagaagatcgagaccatcctggttaacacggtgaaaccccgtctctaataaaaatacaaaaaactagccgggcatctgtagtcccagctacttgggaggctgaggcaggagaatggtgtgaacctgggaggcggagcttgcagtgagccgagattgcgccactgcactccaacctgggtgacagagcgagactctgtctcaaaaaaaaaaaaaaatgcaatttatataaaagtaaaatgaggctatactgagattggttgatatcagtggtcattttaaaataagaaactgataaaggaaaaatgagaaaaagaggctcatttaaggctcaatggcaaaaatcacctcatgaacaagtcattctttttttttagacggagtctcactctgtcatccaggctggagtgcagtgatctcagctcagtgcaacctccgcctcccaggttcaagccatcctcctgcctcagcctccctcatagctgggactacaggtgtgtgccaccacgccgggctaatttttgtatttttagtagagacagggtttcaccatgttggccaggctgttctcgaattgctgacctcaggcgaaccacctgccttggcttcccaaagtgctgggattacaggcgtgagtcactgcacccagccaacaagtcattcttacatactggtatttgttctccaaagctttgagctaagatgatttaggaatatagaatttctctgctaaaatctactctacagatggttgataggtttatcgaataacataaaggccagctgagcataatttttcaagcagcagaagtactgcttctctttttattctgggygtagtgcaaggttaaccatcaagcattctcaaacagattccttcttccattaagggaagagaaacagctctctcagtacaggtgacaaggaagtgttaaagaaggaaagttcaaatgccttagtacaaaaacattgtaggggaagcaacaccactgggattcatacggctgtttctagctgtggccatctgaacaaaaaaacaatatcaattaccagtaatgtttacagctggaatggatttagattgtgttctcattgtaaggattggcttcatttcacattctgatgcctgaatgctacaaaaaccaaagcaagaaaatactaacattcctacttcatggattacaaatgaggaggcttggattacctgtcgacctagtggatacttgggaagagaagaggtgaacttatgaagacatctcaaaaccaggaagtaattcatatgataaacatgcaggttttctagtaataattgtgtttcctcctaaaaatcacagaatatattattaatatgtaagtcagctaataaaagagcataataatacaatctacttcatggctataaaaatttctggaaaactgacaagaagattcaaaactacaaattaattcatgaaaatttgaaatacatataaaatccagaatacaggcagagcatttctgatttagtatcaagtctggtgatactttacacaagccagaattgatactgtattttaatctcctgatagctctagcattcccacaatactttggccaccaaaattacaagtatgcaagaaagcaccttagtggatgcttgcctgtgcccatcacctggtgtgtgccacagcaagggaaggtgctttatcctccaccttgctagcatcagaagagtgagatcaccagacagaatggtaccaacctaatgaacttgctaaagttctgcttatgttgcatacttttcctaaagtactactcaagtgtgttagtgtgtttgaaggggaaaatgaaaagactatggcagaaacacaagtgattctgatgagtccctgcctcttgctgagatctccaatactggttttatttgcttcaccaattaagaaaaaaaaaagaataaataaataaataaatctgaagccaacaagttttataatttagaatctagcaaggatgatgacatgagggatagtgtcttaagaaatctatgcaggtgtagtggctcaygcctgtaatcccagcactttggagggctgaggcaggaggatagcttgagcttagaagtttaagacctgggtgagcaacatagtgagacctcatttgtataaaaataaaaaacccacaaccgaaaactagccctactcgccatattagggatttagatacagaaaaaaagaagaaacctatggatgattaatctcacaaatcagtttcaaaaggttttgttgaggggagagagaggttttctagagcctcctgaaatagtttagaaatgattttaaaacattatatcctatcaggtaattttcaggcctcaattccttttataaccacttactctgtaacattttcttaagaggattatcatctgtgccatggtcttcaatatttttctcctttaagaagtcaaataaaggctttgctgggctgtgtctttatttcagtaatatcttgcagatacccattatttttagtggtcagccatatagaaaataactcagatatcaataaattcaagcaaatctaacctctrtaaagcaataaatatgacatatcttcctaaacaccaactcacttaggaaatcaattccttggtcaacgatctacgggtcattacctgaaagcacatggcagattaaagaaaagtttttagcacctaaatgttttccctcccattatttgagttgattggtaatttcaaaatctatgtctcctatcacaacaaaatctaaatctcctatcataacaaaagtagccataatcaaaaattgttttaaccaccattgggagggtatactttagttctaaactttagcttagttctttagttttttactgtgagccataacatacagatggcataaagccattaattaccttgatgtgtgcttaaatagcttttaaacagggggaatattttgaagaaaatgaactctattactgagtaatcacactgcatgctacttgtgctacctattttcttttgccttgtggaatagctatgtgtacaagtatctgggtgatgcagtagaagtgagtatcttcattccatttacttggataaggagagaaaagaaatactttacccactatagggcaatactgcatactcaaggaacatacctgccctggaataagtgttcgatgaggaatataaacatgtttttctcctaggtggtctcagttccttcatacttttcactgtgtggtgcatccctgtgctgagtagagttctagtgtttaaaaaatgttttgttttgctttaatcattattttattttaagataaaaataaaaattttaagatgaagtctaactctctgctcactgcaacctccacctcccaggttcaagtgattctcttgcctcagcctcctgagtagctgggattacaggtgcctgccaccatgcccagttaacattttgtatttttagtagagatagggtttcaccatgttggccaggctggtcttgatctcctgacctcaagtgatccacccacctcagcctcccaaagtgctgggattacaggtgtgagccaccgtgactggcctaaaaaatgttttgtattgtattgttttgttttgttccatacaacatggcagactatatcatctggtgctcaactgaggaaatggtggttggttccaacaatggggaaaaagactggctatgatggacttaacgaatgagagaaggtttgctgtacctttctaagggatttttcaagagtaatttttgaccatcccagatcttcaccttatgtgctgactttagaacctaatctccacataataaagatttcattgttatttatatgtgtttttatcagttgcaacaaaaaacatcacaaatgattaacattttcttataacatgtcctctaagttttccatcttacttagatacctgcacatatgtatctgcctttacttattcaaacaataattcttttttgtttgtttgtttttggagatggagtcttgctctgttgcccaggctggagtgcagtggcgtgatctcagctcactgcaacctccacctcccaggctcaagcggttctcctgcctcagcctcctgagtagctggaattacaggcgcctgccataatgcctggttaattttttgtatttttagcagagatggggtttcactgggttggccaggctggtctcaaacttctgacctcaagtgatctgcccaccttggcctcccaaagtgtcgggattagacactgcgtgagatactgcacccggccttaaaacaataattcttaatgtacttatggacactattttacaaactcaaacctgtaaaaggttttgatatatgagaaaattttcgggccgggcagggtggctcacgcctgtaatcccagcactttgggaggccgaggcgggtggatcacctgaggtcagagttcaagaccagcctagccaacctggcaaaaccccctctctagtaaaaatacaaaaattagctgggtgtggtggcaggagcctgtaatcccagctacttgggaggctgaggcaggagaatcacttgaacccaggaggcggaggttgccgtgagccaagatcgcgctgttgcagtccagcctgggtgacagagtgagattccatctcaaaaaaaaattttccatttaatacattacagcagcatcataccatgtacatgtgaaaataaagcctgttgaaatattaaccctactttccatatgttaaatttttcttcaggcactttttctgcacactagtcatagctgtcaccattttgtttcataattgtgtttacaatgattcttttctacggagatacactttgtctaggaatatgcattatttactaaaaagatatgctttctctgttctttaagcatgaagacttcttagtctttactgatttttgacaaaggaacagaaatatttctctgctataagaaaaacaggcatggcatagtggctcatgcccataatcccagcactttgggaggccatagtgggaggatcacttgagcccaggggttcaagaccagcttgatagtgagcaacatagtgagagaccctgtctctacaaaaaaaaaaaaaaaaaatttaaattagctgggcatggtggcatgtgcctgtagtcccagatactcaggaggctgaggtaggaagactgcttgagcccagaaagtcaaggctgcagcaagctatgattgcaccactgtactccagcctgggtgacagagcgaaactgtctcaaaaagaaaaaaaaaaagcaaagcaatacataacagcctccttgctcttcttcaaatatggcagacatgctccaacctcaggtcctttctacctgcttagaattcccttcctccagattcttgagtggcaagctctgtgacttcctttaggtctttactcaaaatttaccttctcagtcaggtccttatttaaaattttgactccacttcccacgcacatggaacttcatatccttcttctctgcttcattgtttttatctcagcacttatcactaacagatattttacttatttatcttatttattgtctgtctccctgatacaatgaaaacggtagaagttttggctgtttggttcactcctgtattctcaaaacctagattaacaccgggcacataataggcactagaaaaatattggctgaatgaagagtacattaatgaatgaaggctgaacacttagtctctcttttatttatttttaatttttgagacaggatcttgctctagcaaccaggctggaatgcagtggtgcaatctcagctcactgcagccttgacctcccagggtcaagtgatcctcttgtctcagccttccaagtagctgggactatatataggtgcacaccaccacacccggctaatttttgtagagatggggtctcattatgttgcccaggctgatctgcttgcctcggcctcccaaagtgctgggattacaggtgtgagccactgtgcccagcctcagtctctcttttaagtaagagcaaccatattttgtcttgctggatgtggtctagatttcctgatttttcaaaagtctgaatttgtaacgtaaaatttctcaatatgtaaatattggttctaacattttttttaaatgtatgtttaaaaaacacatttacattagactgtgggttgcctcttaatgtgcaatataccctcttaaattagtcatctccaacctcatcaatcctgtctgttattcatacaaaaatcattcactgatagcatgtcttttgcagcaacatggatggagcaggaggccagtatcctaagtgaaataactcagaaacagaaaatcaaataccgcacgttctcacttatacgtgagagctaaataataggtacacatgtatatacagagtaaaataacagacactgtggacttcaaaaggggtagggttgggaggggtgasggcagagaaattatttattaggtacaatgttcactattcaggtgatgggcacactagaagccaaaaactcaccatcatccaatatgtaacaaacctgcacctgtaaccccctgaatctattttttaaaaatcatatatcactgtttacttatatgacagagcccctattgttattgagctagctgctttctctggaggagaagtcaatacatatgtaaaacttatacaggtraagaaaaaaaggctaggcagaattacatttgccatgcatttatttctcttctacttccatagtacttaccacttttgtctctaraattgtatgtataggggtgaacagtgacctcagattataaaataaagtatgtaaaaatgactataaacttctgtaatttcttttcaatcaattcactgatcattaaaaactggtaaaacagactgttgaattttaggattaagagatatcagctgtctaagaacacagaattttctcatttattatcttgttataactaagccttatttttctcattagagaaaaatgctggctggcagtgttttccagacttagcatattactgctatctaataagaatgccaaaccacagctttctcctagcacttatgtggcaagagtgctagtcttctcatctgtctctrccttttgttctccatattcctacctcagcagtatagatcaagagaagcacttgacaaagagtttgaatttaaatgattaattcctgacacactaggctaatgcccagctcatttgatcacatttgatagactgtgattgttttcctttttcctttacttttccatttattattttttctaagaaattttcttccccctgtctgccctgtaggtctgacaaaagaaacagaaagaggtggggtcaaaggtgaaaggcaggtcttcatcaaactcatgaactgattttgtgccttttgttcatgagacactatgataagcatactaaacggtgaaaagaagtccttactctaccatgaacttgctctgtgacatgagatayttcacttcctttctcttggctgcagttcttcatttttgaaatgagggtgctaaaggagttcaaggtttatttctcactctaaaaggatttaaagtctagttgggaaaataggtataaagacgtgaaacattaacaagtaagaataataaaacttcaactgtcacctgcaagggaatgaatctaagctttctacatagtatgaagattttcagtatttcatcagctgtaccaggtcttctaatgtccctccttagtaggaaattcctagcaaatcacctacaaatgtacattgtttagtcaggtaaagttttaaattttattttattttaagttctgggatacatgtgcaggacgtgcaggtttcttacttaggtaaatgtgtgccatggtagtttgctgcacctatcaacccatcatctaggtattaagccccgcatgcattagctgtttatcctgatgctctccctccgacctgtgctctcattgttcagctcccactcacaaatgagaacatgtggtgcttggttttctgttcctgtgttagttttagtcagctaaatttttacatttaaaagtacactttttaaaaaactcattactgagttcattaaattcaaagctgacatatagttctgaagcagtggatccataattttgagggagttaaaggtttttgttaacgtcttgattctagtcagaggataactgagatcaatcatttgtttaggtgggaacttaatagattagttctagcttaagaaaatgaggtgatgggggaaacaataacaaatgcttcctcctagggaggcagtctaacttagtagttcttgaagtgtggtttccagttatacagactgtaaatttctctggaatattctgtgaggtctagctcttagacacttgaatatagaaaatgggcacaaaatgataaactctaatggtaggcatgtctatacaactatataacataagagtattataaatattacatatagattgtatattataatacataaaaatgtatatacatctttatatacattgaaatgtgttcatattggctgggtgtggtggctcacatctgtaatcccagcactttgggaggcctaggcgggcggatcacttgaggtcaggagttcaagaccagcctggccaacatggtgaaaccccgtctctactaaaaatacaaaaattagccgggtgtggtgacccatgcctctaatcccagctacgagggaggctgaggcaggagaatggcttgaacccaggaggtggaggttgcagtgagctgagatcgtgccactacactctagcctgggcgatagagcgagaccccctcaaaaaaaaaaaaaaaaaagctgggcgcggtggctcacacctgtaatcccagcactttgcggggccgaggcgggtggattatctgaagtcaggagtttgagaccagcctggccaacatggtgaaaccctgtctctactaaaaatacaaaaaattagccgggtgtggtggtaggcacctgtaaccccagctacttgggaggctgaggcaggagaacttcttgaacctgggaggtggaggttgcagtgagccgagataacgccattacactccaccctgggcaacaagaacaaaactccacctcaaaaaaaataaaataaaataaaaataaataaataaataaaatgtgttcatattgatcttaatttttatgagtgaaaaatatataacaagttattattttcatttataaaagctttatcattatatttgttttcaaatcacttttatttgctgaacaaactttgattatcactaaccttatgaaaaaatcatactaggaattattatcctacttttttttttttttttggagacagagtcatgctgtgttgcccaggctggagtgcagtggcgctgtctcagctcactataacctctgcctccctggttaaagggattctagtgtctcagcctcccaagtagctgggttaacaagcacacaccaccacacttggataattttttgtatttttagtagagaaggggttttgctatgctgtccaggctggtctcaaactcctggcctcaagtgatctgcctgccttggcctcccaaagtgctgagattacaggcatgggccaccacacccagcctattatcctactttctatataagaaaattgaggcttaaatagctcccattcacaattactacaaagagaataaaatacctaggaatacaacttacaagggatgtgaaggatctcttcaaggagaattacaaaccactgctcagtgaaataaaagaggacacaaacaaatggaaaaacattccatgctcatggataggaagaatcaatatcgtgaaaatggccatactgctcaaggtaatttatagattcaatgccatccccatcaagctaccaatgactttcttcacagaactggaaaaaactactttaaagttcatatggaaccaaaaaagagcccacattgccaagacaatcctaagcaaaaagaacaaagctggaggcatcatgctacctgacttcaaactgtactacaaggctacagtaaccaaaacagcatggtactggtaccaaaacagagatatggaccaatggaacagaacagaggcctcagaaataacaccacacatctacaaccatctgatctttgacaaacctgacaaaaacaagcaatggagaaaggattccctatttaataaatggagccaggaaaactggctagccatatgtagaaagctgaaactggatcccttccttaaccttataaaaaaatcattcaagatggattaaagacttaaatgtaagacctaaaaccataaaaacgctagaagaaaacctaagcaataccaagactaggcatgggcaaagacttcatgactgaaacaccaaaagcaatgtcaacaaaagccaaaattgacaaatgggatctaattaaactaaagagcttctgcacagcaaaataaactgtcatcagagtgaacaggcaacctacaaaatgggagaaaatttttgcaatctacccatctgacaaagggctaatatccagaatctacaaataagttaaacaaatgtacaagaaaaaaataaccccatcaaaaagtgrgcaaaggatatgaacagacacttctcaaaagaagacatttacgcagccaacagacatatgaaaaaatgctcatcatcactggttatcagagaaatgcaaatcaaaaccacaatgagataccatctcacaccagtcagaatggcggtcattaaaaagtcagggaacaacagatactggagagaatgtggagaaayaggaacacttttacactgttggtaggagtgtaaattagttcaaccattgtggaagacagtgtggtgattcctcaaggatctagaacaagaaataccatttgacccagcaatcccattactgggtatatacccaaaggattataaatcatacgactacaaagacacatgcacacgtgtgtttattgcggcactattcacaatagcaaagacttggaaccaacccaaatgtccatcaatratagactggattaagaaaatgtggcacatatacaccatggaataccatgcagccataaaaaaaggatgagttcatgtcctttgcagggacatggatgaagctggaaaccatcattctcagcaaactatcacaaggacagaaaaccaaacaccacatgttctcactcacaagtgggagttgaacaatgagaacacacggacacagggtggggaacatcacacaccagggcctgttggtgggtgggggtgctgggggaaggatagcattaggagatatacctaatgtaaatgacgagttgatgggtgcagcaaaccaacacggcacacatatacccacgtaacaaacctgcacgttgcgcatatgtaccctagaacttaaagtataattaaaaaaaagaaaattgaggcttaaataaggtaagtgattttcttaaatatagatagctaatgagtaactgcagttcaaatacaaaatttcctatattttgtagtaccacattattgtcatgtatttttacaaaaccataaaaagagaagcattattatgagaatattcaaagatactttaaactaaaaaatcaagacacattcttttgttttgttttgtttttgttctttgaaacagagtcttgctctgttgccgacgctagggcatgatcttggctcactgcaacctccacctcccaggttcaagtgattctcctgcctcagcctctggagtagctcagattacaggcatgcaccactatgcccggctaatttttgtatttttagtagagacagggtttcaccatattggccaggctggtcttgaactcctgacttcaagtgatccgtccacctcagattcccaaaatgctgggattacaggagtgagccaccgtgcctggcctaaaacattcattttttcttagacaytttctgtcttttgatttcagcaggtagcctgcagctaactttttcagggtaagggtacaaatctctgtgctttttcatatttctcactgtataagtctctagaaaacatgcacttatatgacaaagtatgtaatttgaaaatgaatacaccaaagatcataacaagcaaaactgacagtgcaacaagaacaaggatagcataaataaatgctaagaaaatatgtaaaaagtcactgaaaagcagacataaatgtcaggctctttttgttttgttttgttttgtttttttttaaagacagagtcttgctctgtcaccyaggctggagtgcaatggtacaatctcrgcttaccacagcctccacctcccaggttccagcgattctcctgcctcagcctcctgagtagctgggactacaggcatgcgctaccacgcccagctaatttttgtatttttagtagagatggggtttcacaatgttggccagactggtcttgaactcctcacctcaagtgatccacccacccaggcctcatagagtgctgggatgataggcgtgagccaccgtgcctgaccaatgtcaggcaatttctataatacactagcctagacattctctccctctgtcatctcaatggttaaaggtactcttaaaaaatctattcctggcttctgaaataactctgacagaaagttctagcaggaaatggacttggcaactagctgactcaacagagagctaatctagctaatctycaaagactcagtaaacatgcacacattctttctcactagttcttaaatttcttcccagcaaaacaacctgcatggaggtctgagaacctcctatactgctctgaaggcattacagagattactaaaatgattattgagcccaatctagaagtgactttatattacggcccagtgtggattctacattagaaataatgtttaataaaagccattctgaatattttttgagcatttataatgggcataaattaccaatggagggaaacacatgccctctagaatctaacattttttaaaacacatttttaattttttaaatggatatataattgtacatgtataagatctaacattctcttgttcaaaatctgaaaatcgtatgtattaccaaaactcatctttagcactatggcttaccttcaatctcatcttactatcattacaatattctaacaactttttcctaaaaaaggcatgaggagtatgaaaataaatgtgacattatgtgtttctaaatgctcatcagtaagaggcatgttcttaaaaaaggtacattaattcaatagactactatgtcactcttcagtactaatatggaatgatttccaagattaagtacaaaatgaaacaaggtgcagaatattgtaagaaggcagcaactgccaaaatataatataattacttgtatgtatggagactctatctagaatgaaatataagaaactagtaacactggctgtatccagggaagggacatgggtagttggaagacaggtgaaacgaagcctttcactgtatattatatactataacatatatagtatactatatccattttgaattatatactacatccaagtattatttattcaagaaagaagccctccttcttttgatattccttatgttgtacagctcactgataattttctaagctcattacttctttcctagctttatattatcaatatataatgatatttcttcaaatcaaatcaatacccacttagcagcagacgcctaagctgcctggcttctaaatgcttttatttatcacagcctttaaaaagaacattacaacgaaattgctggcagattccaaaactgctaggtggaaaaagattcacatagcagatctctatagatctaaaggtgctttcaaaataggccacaagagaaacttggtgtttaatattttttcttgattaaaaaaagcctcaacttttagagctaaggttttatgtcatctttaaaactcacattcctaggtgactatcaagacccagtacttcactgtataaatattaagatgcacaaayatgttttattaactcaataaatgttacatgcatattcttctttatgaaaggaaaaagagaatgaaactgaaacacattcacattcctaccttcaaatatctctcattggkcaagagcgcaacttgcttttctgaagcttgcttttccacgtacctagaattttcaccattccatacataaaaagagaaaattaaacattcaacatatttaaatagcatattgggaaaaagaactacctagattggtagccacatttttttcatttcttcacaaaaataaattcagtatgacatttatggtttaatggtaattttaaactccttaaatcagctggacttcatagtctatagatataaacattaaaaaaggccataaaccccaggaataggaaatgttatttctaaaaagtaactctggagaacttgcaaattatgtccctttgtaaaaatacttttctttttgccaaattttcaaatccaacaaggaaatcccacaattaaaaacagaataggttactattyctttccctacttcagaaataactggatctgagatctcttatttagtaccaaattctagtatagtatgtgttaaacatgtacttctctttttacctcctaaaagatggtagacgtcggatgttttcacattgattatttgataaaaaatttattcttcttttggcttctggaagattacagcacaggacacttaagggctgggaatagaaatgctctaatagagaaagctgaaagacatgtraagattaaacatatttgttatattttggcagtaaatctattgcgctacaatctgctcaattttaaggatttttttaaagagccaaagtatttayggcactaatatatttaataatgtcacaataacactgcaaacaacataaaaatggctatataactccatattttaaggttccaattctgtgaagaaggtcagaaaatggtaatctttgaaatacaaactaagataaactaatgcaaatggatagaacagctatctgcaaaagcaacacataataattacaaatgtggtgtggaccaaactgaggtttaaagaaagggtctaatagataccccaaaactcataagaaaatgccaatctaaaatcagtgtaaaaactggtctgttacaaaaaataatgctgcaatggtaggagctgtgcctatggattaaagtgaatgatgaaaatttatctttwcaaattaatttttttcccatggaggaaaacatggtgtactatctggtagatataagcattttaataatagaatgctgtgggctctatggtagaagggaagacaattttccagattctaacattcagtttgcttagaatcaacataatgaacgtttggataatcttgtatacatttggatagtcttgagttttatacctagaaactggtataacttgcaagactatgcaaatgttcattatgttgattctaagcaaactttgcttgaccagtttggtattttcaggtaccctgatactggtcactcctcatcacaaattaataaattagcatgttaggttacatatccatcttaaggtatttgtttgggatgaatcaataatcttgggcttgatccttcctgggggaactgataatgaatttctgagttcataatgctgacaacaagatacccaaggctagaggaaatcttccaaaatagtccattctctaaggctgtaaggcaaagggcctgcctaacttagaaacaagtacaaaatagaaagcaactgtttatgccaggtgctaaattacttttgcacatattaacataattttgtttcttctcttttctaattatgtcaaagtgataatgcttatcccaatgttaacagtacttttcrgacatgagaaaaataaaaactaaacaggctaaggggcttgctgcggaagaggaatgggaggaagccacagaagttacagtagagctacaaataggatatgaacccattatcacttaactattttgttcaagtgtgttttcaatatctgggtcaatcaacaagttggttaacatatccacctaatgaagggaaggctaaaacacacagaatgataatatgtcctgctgtacatcctatggaaatcaggaattacatagtcctagttactcaggaaactaagatggaagatcgcttgagctcaggagtttgagaccagcctgggcaacagagtgagactctgtctcaagtagaaatcacgacttaccaatattttccactgaggactaggaaaactggggaaatgaggtctaaagatgctgtcacttgttagtggtgtgaccttggccaagccacttaacttaaatcttaatttcttcatgtgcaaaactgaggataatacacatgaataaaaccacgcaggccaggcaaggtggctcacgcctataatatcagtactttgggaggccaaggtgggtggatcaccggaggtcagaagttcgagaccagcctggccaacatggtgaaaccccatctctactaaaaatacaaaattagccaggcgtggtggcgcatgcctgtaatcccagctgctcaggaggctgaggcaggagaagcacttgaaatcgggagacggaggttgcagtgagctcagattatgccactgcactccagcctgggcgacagagcgaaaccctatctcaaaaagaaacaaaaacaaaaaaaccatgtaaatagtttagtaaagtgtcaagcataaaggaagtgcttaataaattatcaggaaaccataaaatcatctaatctgattgctttattttacaaatgagaaaactgagaccctgagagattaagtaacttggttaatgtcctttactttctgtctcaaggtatttagagtacagtttctatttcctgaatctctttttcccttggcttcagtggtactccactttctaccggttctccttgtttttagtctccttttctactgctcagttttacaggtcagtttgtcttaaggtgctgcccttagcctttccttactccctctagctgacatttcatcctcataacattattttaactgccaccttttaaggataagtcctaaatatctatttccagtccaaatctttctcctgagcacaaaatctttatgtctaacacacccctaaattaaccagatacaaaaagaaactcatccttttctcacaacaaccttgctctttgctatgtattaacatgtacagttaataaacggtactaacctccaatctgccaagctagagcctgtgtcatcttactcctctcttaacctttcagcttcaagtcaagtaagaaaaaaaaaaacaacagaacatcctatgacctacttagtcactaggtttttttattcgatctcatcctcaaatttgtttcctcctctccagttccactaccattaccttagtttatttaagtccttgtcatgtcctgtctagattactgcaatagcattctaacagatctctcttcccctactgttgcttttgcctgaaattctgacctggctcgctcctatttcttaggcatacacttctgttttcctatggaaccccagggcatgtttytttcatagcactgactactcagatttgtgggtttactgttttgcctccatcattaaacaaataacaatttgaaggcagagatttctttttttttttttttgagatggagcctcacactgttgcccaggctggagtgcagtggcatgatctccgctcactcgctcactacaacctccacctcccaggtttaggtgatctcctgcctcagccccccaagtagctgggattagaggcatgcgccaccatgcctggctaattttttgtatttttagtagagacagggtttcaccatgttggccaggctggcctcgaactcctgatatcatgatctgcctgcctcggcctccccaagtgctgggattataggcgtgagccaccgcgcccagcccagagatttcatttttatctgtatcttcagggttcagcatagtgcttggttgacaataggttcttgacaagtatttatgagtaaatgaatgaaatgaaattaaagaaataatttagaaagtttaatcttaatatcatttaattctacatattcctaaggtaaataatgctttattcttttaaaatactctttaaaaagtcaaagttgggaggaaaagatacatattagccaaagaaaccactgcaatctttttttgaaggaaggaaacatgagaaataatttataatcttcaaggcactacacaaaatgaagtattatcaaattgaatttttgcaccaaaggttactaatacatatataggtttttaaaatcagaattttgtttgttttttatagagacaggtctcttgctctgtcacccaggctagagtgcagtgacacaattatggctcactgcagccttgacttcccaggctcatgtgattctcccacctcaccctcccgaggacctgggactctataaataagccaccacgcctggcttattttttatttttaatagagatgaggctgcattatgttgttcaggctggtctcaaactactaagctcaagtgatcctcccaccttgacttcctaaaatgctgggattatacgcatgagccaccgtgcctggcataatacataggttttaatgaactagacaactggcatgtattcaaaatgactacacttatgtagcttccaagaaaaggaaataatactaacttttaaacaactggagaatggggatcttttttaggttacagcatatatcatgaagctaaattcctgaattagcttcaggcaattcatgaaactagtgaaaatgaattcccaatgtatcagaatacaaattacagagacacacacacacacacacatgcatggtccagaaactaaaaaccttttttatatctttaaaggattattaaagaagaagaaacagaaacagcaacagcagtgaccacatgtagcatgcaaagctaaaaatgggctgggcgtagtggctcaggcctgtaatcccagcactctgggaaccaaggtgggtggatcacctgaggtcaggagttcgagaccagcctggccaacatggtgaagccctgtttctactaaatatacaaaaattagccaggcgtggtggcacgcacctgtaatcccagctacatgggaggctgaggcagaattgcttgaacccgggaggcgaaggttgcagtgagctgagatcatgccactgcactccagcctgggcaacaaagtgaaactccatctcgaaaaaaaaaaaagctaaaaatgtttaatatctggccctttacagaagtttgctgaccccttatatatagcatttccttggtagaaaaagtccataagctctcatgagagtctcggaaacaaaccaaaaaagtccgcttgcccctacccccaaaatggttaagaattgctggaatagaagtcttttcccattattgatatcctaatgagtgcattctctacagtttgctgcaaggtaacaaaggaattgtagaacctagaataaaataactggaatttacttattctagattttgccatttaaaatgcctatcacactagacagcctgaaataatgtgcaaattatttagaatcagcttgagaattttcaaacccattactgtgttcttacytgaagtccttttataaagttttgaactgagaaatcatgatacaaaaagatgttggtcagaacctgtaatactttttcatttattttaaagggaaactgagttgtaagaagtagctgaaagagattaaaagggagggggacacactccttgttagtcttcactcttcataaatactaagtattaataatgaggcaaagaatgatattatgacacagttaactatgaaagctgcaataatagctagttttttaagctcaaatgtcaacaaaaattttaagttaatttatacaagagtaacaaaaagaagctacttatactgtatcttcagaaccaaagatctataccatcttccatcaaattcctaattaaaaaaaaataccacctattaactatatcatccttttttttttcctcaccagaaaccactgaagaagctgcaggctttggcaattcttattaccagatgagatttttttcattactactgattcaaattaatgaagagtaatatattatgtattgttgaatgagaaacacaaatgtctatttcacagatgtctatttcaaaagtatagaatagctgaatttgtattatttggctaattttcaattgtctatagtgatgttttacatctggaaatgaaaagtcacacaaggcttcttaaacagaagcatagttgtaaaaggccaattgaacttggctataaccaagttttttgttttctttttgtagaggaaagttcttgctcttttgcccaggctggagtgcagtggtggcatcatagctcactgtagccttgaacttctgggctcaagtgattctcccacctcagcctaccaagtaaaagggattataggtgcttgccaccctttccggcctagccaagcaaatttaaaaatagcagcttgaaaacattttccttaaagtgtctataaatcacctttatggaaaaaaagaaaaacactaaaacccatgtgtaagtggctagtgggcaggttgtttttagtttaccttaaataagcagcataaagcacatcttaaaggaggtgagtccagaagcaatttggggaaggtcaatgatatggtttggctgtgtccccacccaaatcccatcttgaattcccaagtgctgtgggagggacctggtgggaggtaactgaatcatggggaaaagtctttcccatgctgttctcatgacagtgaataagtcttatgaaacctgatggttttataaagaggagttcccctgcacaagctctctctctttgcctgctaccagccatgtaagatgtgatttgttcctccttgcsttccaccatgattgaggcctccccagccatgtggaactgagtccattaaacctctttcttttgtaaattgcccagtctcgcctatgtctttatcagcggtgtgagaacagactaatacagtaaattggtaccagtagagtggggcactgctgaaaagatacccaaaaatgtggaagtgactttggaactggatgacaggcagaggttggaacagtttggagggctcagaagacaggaaaatgtgggaaagtttggaactacctagagacttattgaatgtctttgaccaaaatgctgataatgatatggacaatgaaacaggctgagggggtctcagatggagatgacaaacttgttggaaactggagcaaaggtgactcttgttatgttttagcaaagagactggcggcattttgcccctgccccagagatttgtggaactttgaacttgagggagatgattttgggtatcctgaggaacaaatttctaagcagcaaagcattcaagaggtgacttgagttctgttaaaggcattccattttatgagggaagcagggcataaaagtttggaaaatttgcagcctgacaatgagatagaaaagaaaatcccatttctgaggagaaattcaagtcagctgcagaaatttccgtaagtaacaaagagccaaacgttaatccccaaaacaatggggaaaatatctccagggcatgtcagaggtcttcatggcagcccctcccatcacaagcctggagacctaggaggcaaaagcgatttcacgggctgggcccagagtccccgtgctgtgtgcagcttaggaaattggtgctgtgtcctagccactccagctgtggctgaaaagggccaacacaaagttcgggccacggcttcagagagtgcaagccccaagccctggcagcttccacatcgtgttgagcctgtgagtgcacagaactggggtgtgggaacctccgtctagatttcagaagatgtatggaaaagcctgggtgtccaggcagaagtttgctgtaggggcagggtcctcatggagaacctctgctagggcagtgtgaaagggaaatgtggggttggagtccccacacagagtccttactggggcactgcctagtggagctgtgagaaaagggctaccatcctctacaccccagaatggtagatccaccaacagcttgcaccgtgtgcctggaaaagctgcagacacttaacaccagcccatgaaggcagccaggagggaggctgtaacctgcaaagcaacaggggtgaagctgccaaagaccatgggaacccacctcttgcatcagcatgacctggatgtgagaaatggagtcaaaggagatcatctggagctgtaagacttgactacctcgctrgatttcagatttgcatggggcctgtaactcctttgttttggccaatttctcccatttggaatggctgtatttacccaatgcctgtacccccattgtatctaggaagtaactaacttgcttttgattctacaggctcataggcagaagggacttgccttgtctcggatgagactttggactgtggactattgagttaatgctgaaatgagttargactttgggggactgttgggaaggcatgattggttttgaaatgtgaggacatgtgatttgggaggggccaggggcagaatgatatggtttggytgtgtccccacccaaatctcatcttgaattcccaagtgctatgggagggacctggtgggcggtaattgaatcatgggagcaagtctttcctgtgctgttctcatgatagtgaataagtctcatgagatctgatggttttataaagaggagttcccctgtacaagctctctcactttgcctgctgccatctatgtaagatgtgacttgctcctccttgccttccaccatgattgtgaggcctccccagccaagtggaactatgagtccattaaacctctttcttttgtaaattgcccagtctcaggtgtgtctttatcagcagcgtgagaacagactaatacagtcaatattaaagaatcatacttgcatttatgtagaaacatagttaattaactttagttgctaaggtctaggaaaatgttagtatttgttgtcaagagcagcatgacaaatcagttaggaaacagtccactaaaaacttcaaatcattttatacaaaatgtaaggagtcaggctgggtgtggcggctcatgcctgtaatcccagcactttgggaggccaaggcaggtagatcacttgaggtcaggagttccagaccagcctggccaatatggtaccctgtgtctactaaaaatacaaattagccaggcgtggcggcacacctcatgaagtcccagctacttgagatgctgcggcaggagaatcacttgaacctgggaggcagaggttgcagtgagccaagatttcgtcactgcactccagcctggatgacagagctagactccttctcaaaaaaataaaaattagaaaaatcaaaatgtaagagtcaaaatacattgttactacaaagtctacaaattctgtaaaaatttacattataaacctataattttctattgagtaaagatataaagagattaagtacatagagagatatgatcactcttttcataaagcttatattttacctgaagaggtaatatacaaaatcactgtaaaactataaaacactacaaaaattattaagtaaaaatattaaagtatgtgaaggaatatgttcaatatagtactcagagagttgtagaggcttattgttaacagttatcttaacaatctattattggcagttttcttttcatcctatttcactggtaaaacttattctttttaccttatcgagtaccrtagtcaggtgctccttacaagacaaagattggaacagttctatgcacaatagagatgatactgcatgaggaagcaatcggtggatgataataggagatgtggctattccaaaaatgagtaytagtggaaattcatggagatgttgactagttttgaaagacagacacaaaagtgaaatttatttagcaaatatatttcaatacatcatatttcaacataagacaaactttattttaatgcttactttataagacactgttaaggattatcattgcaaacactaaaattttctaagtctttcactttcttctattaaacagagaaataattactttccagacagtctagctttgaaatcaatctcttaataaatcctctcattttataaataagaacagagaggtccagaaagttttcctgaagattataccatcttttttcttttttttttttcagatggagtcctgctctgtcacccagactggagtgcagtggtgcaatctcggctcactgcaacctccacctcctgggttcaagcgattctcctgcctcagcctcccgagtagctgggactacatgtgcgtgccaccatgcctaattttttaattttagtggagatggggtttcaccatattggtcaggctggtctcaaactcctgacttcatgtgatccacccacttcggcctcccaaagtgctgggattacaggcgtgagccaccatgcccgggccgaagattatacaatcttaagtgttagaagagatgttagataccattccatttaatatctcattcaaagtttgagccctttctatagtcttcctcacttttgatggctaaggtagtcattaagtctaagctccaaaaaaaagtacagcttttctgtcactattttgtactatgtactttccaagcatgctaagcagttcagtgtcagcattaagaaaagtcctaggatctgggctgggtgcaatggttcatgcaagtcctaggatctgggctgggtgcgatggttcatgtctgtaatcccagcacgttgggagactgaggagggcagatctcytgaggccaagagtttgagaccagcctgggcaacacggcaaaaccccatctctacaaaaaatacaaaaattagccgggcatggtggtgtgtgyctatagtcctagctacttggggacctgagaagggaggactgcttaagcccaggaggtggagggtgcagtgagccaagatcatgtcactgcgctctagcctgggtgacagagccagaccctgtctcaaaaaaaaaaaaaaaaaaaaagaaaagtcctagtatatagaactcttagaatcaatgaaggaaaaaagatcctatcaaagtagaaatttaaagtatattagtaaattagctgggtgtggtggctcatgtctgtaatcctagcactttgggaggccccaaagagcactaaggaaggcagatcacctgaggtcaggagtttgagaccagcctggctaatatggtgaaaccctgtctctactaaaaatacaaaaattagctaggcgtggcagcgggcacctgtaatcccagctacttgggaggctgaggcatgagaactgcttgaacccgggaggcggaggtggcagggagttgagaaggcgccactgcactccagcctgggggacagagcgagactctgtctccaaaaataaaaataaaaataaagtatactagtaaattatttaacacaatatatagctttaggcaaatgtagctataactattaaaacaagttgacatatagaagaggccaaaataaattccatcctaaaaaatacaccagggaaaatgcatgtcactggattttaaaataagagttcattatttcaattctgagtctcacatgattgctttgaagacgcaatgcaatcgtgaaaatagtttctcactagaagtattatataaatgcaaaataatgttatttagaagacacttttgcttagtaaaactatatgcaactcagagcatctaaggatggatgggtatcagaaaataagacctaataaaaatctcaacttagccaggtatggtggctcactcctgtaatcccagcactttgggaggccgaggcaggcagatcacctgaggtcaggagttcgagaacagcctggccaacatggtgaaactctgtttctactaaaaatacaaaaattagccaggtgtggtggtgggcacctgtaatcccagctactcaggaggctgaggcagaattgcttgaacccaggaggcggaggctgcagtgagccgagatcgtaccactgcactccagcctgggcaacagaacaaagctccatctcaaaaaaaaaaaagaaaaaaacaaaaacaacaaactcaacctggagtagtttatctatttaatgggtgagtaagagacagtcaatcttggtgagaaaaaccatatttaatactatcttaccatgtcaatttaaaactggctaaatgtgcctttgattctcattcttggctcaaaaagcaaatggaaaatctgataggaagtctttgaatattcaattataaagaatttgaatactttgatttttatccagttggtattaaaatgaagattatacttttcaagttaaaagtagtattttcttaaaaagggagtttttcataaaagccaggtaatacaccatctacctgctgataattatgaagtcttgtagtacttttgtggcaaagctttccatatccttcaagataaygacaacaggaggagactgccattggctagaagtagtcctttttttgcttagcatttttgggtccgtcttcttttaagccattgcagaaagaaagagttaaaggtaagccttaccactcaaacaatgttataatgccacatgttgacatatctctctttaaatttcacaataacactgtttattttttttctaccacacgataaatagaaactcaggttactagaatcttgctgtgtctgacatgggaataataaccaagaagaaaaaggttcagtaaaaatctataactcatatgaaatatttatattttctgctaaggaaatgacagaaaaaaacatggaagaggaaattttctacaaaattgatttttctgttggtagaaagttatattctgctttgctttatagtgagaactagtatttttaatgaaaaaaatataatgaatagtagtgcttgctactctgccactgtgaaatttcaagcctgaaatggatactaggtatcatctggtccaatctcaatttttaaaaagatatctgacataaaccaaaagtagcattttatctggaaagtctaaaattgtggagcaaatcaggtattatggtaagtattagacgtagtttagtccctatataaagcaaaatgaaacttcacttacgatgatttcagcaaaaatgttgattggaaaatgtaaccacagtattttttttcccatactgtctggctacacagcaccataacctaagactatggttttatgacgcaattacctagtgttaacctaggttattatttttcaccagactgtcatggtagaatggaacttctttttacttatctgtttgtctaacatactttacttaaagaacactgattccctaagaactctaaacataaaacaaattagactttagaaaatacatgattattcttcattgaactaagttgacagtggatactagcagcatggttctattggacaaagcaaacattgaggaacataagagataatatactaaagttatagttactgtcacagagatggaacatgcaacagaagcaattcctgatgctctgtttttgtcattagaggacattctccaacaaataatatgtccttgtaaaaacctaagcacttacctggaattaggctgcatactaataaaagaacattttaaaattcgagtagcattagaaaaaataaatasctacttttaaattaacacctagtgctgcagaaacatatccttgttasatcaaaacagtactgtctaatattattccaagccacatcaatcayacgtcaatttccygggagaaaatcatcagtttatayctacctgtgtgacagtcatataccaactggaaagtgaatccattgaataatgtgtctttctttgggtgacgtgaacactttcctcctctttggattttatatctacacagcagtccatcaactgtgagatcaacttttgcaaaaaatgtttcatatctgtggaatataaaaagtaagaaagcttatctctgcctcttctaaaaataaaaccaaagctcttgaaacttcttgctgagtgtattactttttttttggtaaaatgtgtttttttatacttaccatcaatacagctaatgtaacatttaacatattaactactgatgctcattagtaccttcattaattcagactaagactaaaccaaagcttatgtatattatctttattttttttttttgagatggagtctcgctctgttgcccaggctggagtacagtggcaggatctcggctcaatacaacctctgcctcccgggttcaagcaattctcctgcctcaagcctccccagtagctgggattacaggcgcgtgccaccatacccagctaatttttgtattttttagtagagacggggttttgccatgttggccaggctggtctcgaactcctcacctcatgatctgcctgcctcagcctcccaaagtgctgggattacaagcatcaaacactgctcccagccatttatgtatattatctataataaaaaggtcacagaagcaaatgtgtagatatgcaaactataaattttaggaatatgtatttaaattacataggaaaataaacagttttcaagttccctaagaaaaatcaagtgtcatatgaattattttactgattataaatctttcatatagccatttttaaagatgcctttaagggcttttacttaatttcaatcagtttatgaatatgaaagcaatataagcacataaatctcttttatcaatctaatccaaacaaattttaccacattagggccaggcatggtgactcaagatgtaatcccagcactttgggaagccaaggcaggaggattgtttgagcccaggagttcaagaccagtctggacaacacagcaagacccaatctctacaaacaacaacaacaacaaaaccccacaatgtagctgatgtagctgagcgtaatggcatgcacctgtagtcctaggtactggggaagctgaagtgggagaactgcttgaggccaggagttcaagctgcactgagctatgatcatgctactgtagtacagcctaggcaacagagtgagaccctgtctcaaaagaaaaaaaaaaaagctttttaatatattagtgtgaacactctttatgatttcatgggttcacatgctcaggattasctctgtcagtggactatttttcaccatggtggcttttcaaagtgggacaataagatgatttatggctgaaacatgagcccatgtggtctactctcttttgagctgacaagagctcctcattccccaattctcagctttctgtcctaagtctttctacttattaaacgtttcactgggttaaagaatgcatctcacaaaatgcctggactgctaccggcagttaagctgatagggcagaaatgggtcaagaacaaagacagcaaaagaaggcagagttctgtaatagtcacaattactctgagagcccccaaacctcaccctgcctaaaacatagcactgtgttctttccaccaaaaaaagggataaagaaagcctgaaawagagagaaaaggatgaaagaagtctgtaacatctcatcaaggttattatggcatttatattttacctggacaatctttagcttgcaatgagactacatatggtgtgacattattcygaagggcctmtgttagacttccgaatgtcaaatcatgatctgtgacattcacacctatgagataatacatcaatattacatcaccatttttattaataataatttaatgacaaaagctatttaacatatcaagcaaacaagtaaaaacatttaaaaaatgattaataacagaaaccaaggaaatatactatataaatgatatccattaacaatagctatccaaaggcataaactatatttgtcaggaaagatattttgcacaattcctctttcaaacaaattactgggatgtgcacttgaaagcttcttttttttttttttgagacagaatctcgctctgtcatccaggctggagtgcagcagctcaatctcagctcactgcatccttcacctcccaagttcaggtgattctcctgcctcagcctcctgagtagctggaattacaggcatgtgccaccacaccggctaatttttgtagttttaatagagacagggtttcaccacgttggccaggctggtctcaaactcccgacctcaagtgatccacccgcctcagcctcccaacgtgctgggattacaggcgtgagccactgtgcccagccgacccttgaaaacatcttagaagtaatttcattgctttgtcaaattcctaacaagctctttaaggaaattaaaactggccaggtgcagtatagctcatgcccataatcccagcactttgggaggatcacttgaagccaggagttcaagaacagcctggcaaacatggtgagaacctgtctctataaaaattttaaaaaagtaaaactatgggttcttttggtatttacggaatccctggttttcatttctgcaaatcagagtttcagggcaccgcatacagttatcaaatttttgagtgaaaaatttcccactactttggaaaaaaattctgttaactggtatcttccctaacataaccatctgtgatttctagaaagtcatttggtgcttaggcagataacagcagcagccactttcaaactgcttaagagttacagctgcaaaactttcattgcttggaagaaaaagaaaaatttcagaatcatccatgccagcaataataaaccattttttttttctaggagagccaaagaataaaaatattagcagactattttttaaatggatattgaaaatagaaaatatcaaaatgattcctagcatgcattatggtctatgattataataacacatccctgaacaaatttagaagttcagtaaaacactgggttatcttggctttcactgactggctataagctatttattaataacattatattcgttatatttgtattataaaacaatgaacttgtctatcacaaacaagataatcaacaatgtgtttaactagaaaaatgttctcctcagaccatgattttaaaacattctttccattagcttggtacaagtgggccatcactgggcctcagtttttcctcaaatgggagaatttttagatgttgcattgtaaagctggtccacagcataataaaaatcattcccttgagtcttattagtgtggtcctgggactatgggcatcagctggtaccctgttagaaatgtaaaatttcaggccccaccctagacccattaaccaaaatctacattttaatacgatccctggaggttatctgtgggtgcattgaggttgagaattaattccttatctcagagctaactagcataacaaatcttgaataaattgaaagagaaattaagagcatgtttggaaccsaaataaattcaactttgttttcaaagggaatgaagaaaatttgctaatattccaaagaaattttttccattgtgctggaatccaaatgtttggtaaagatgagatattaatgatggatgtttaagtacttaagaaatttacaacctgcaatttgaaagcaatttatgtgcaattcatccaaacacctccttgtaggtaattartatgaatataatgaaacaatctaagatggaaaaactatgcacaggaaaataaaattaaggtcatagagtaattccattgaagatacgactaaaaaaagtatgaaaaccaaatctactaacactggtagtttctttattaccaaatctcatatactcttgtaatgtatctacaaagaaagagtaaaacaaatatattttcccttccgaccaaaagttggggagaacattagctagataaattccttttaatttacaaacatatgatcgtctgtaaagataaggaatttttattggtttttgaaaatatgtaatataaactatagttggtttaattgtacaaataagagagacaaaataggctcatcaaaacaggtccttccactattctcaacaataaaaaaaaatttaaaaacgaaatacacagagatgcatgcatgaacaaacataygcatatataccaagaacaagagcagcagttggaatttctctgagttttatttkaccgcccaagtctcttgaattcttctggaatccagaatgtgatttttgcagaaattcaatcagattgtcaaacaagtttttatttaattcctcttgtagtcgctacaaagaacacacaaaaacttattattattagaaataataatctgatgtctttcctggttgtggaaagaaaattgtcatggattcaatgatgtaaaatgatcaaaagatgaacctaattaaaaaatgttttttccttaaatctctagtaattagtgctctgggttcccccattaaaaattccctctcaagcctggtcggcatagtgagacctcatctttttagataaaagacaaattagctgggtgtagtggtgcacatctgtggtcccagcttctagggaagctgaggtgagagggtcacttgagtctgggaggtcaaggctgcagtaagctatgatcatgccactacacgccagcctgggtgacagagcaagaccttgtctcaaaaaaaaaaattgtatatatatatatattatatatgtgtatatatatataaacgtgtatatatatawaatatatatatgatatatgacattaaagggtttggattttgtcctatggggagcaccactgaagggatgtgaagtaaagacataattggatcagggttaagaagggttaatctggcaacagggctggaggggttgcctggaattgggctgcatttgccttgaaaagggtcttttctaatttggccaatggtgtcagggatgccagtcaggaggatataacaatccagattcagaaatgaagacggcctaaactggaaaccacaaattcaaataccttgaaggatcacatggaatacgtgaatgagcctttgctcattaccactaggtgtaaatcagtaaggactggtaggcggcagtaataaactggaaagtatataaccttccgaaaggcaattaaaccaaaaactacaacactgtgttggccaaaaaaaaaaaaaaagttgtcagcctaaaatgctggccctagagctaccaatttgctatagtgaagaaatgtttcagagctggaatataaagatgagaaagtgaaggagtttagaaacagcttgatttcacagttgtatacctgaaaggataatttaagagcgtcaccatttgaaagctccttgccttaacagctatcataaacatctgttccactcacaagaaayatgagttttttttgtttttgtttttgagacaagatctctctctgctgcccaggctggagtgccgtggtactatctcggctcactgcaacctccacctcccaggctcaagttatcctcccaacttagcctcctgagtagctggaattacaagtgcacaccaccatgcccagctagtttttgtagcttttgtagagacagggtttcaccaagttgcccaggctggattatggttgtttttttaaggatatacaggctatgcttgaccaatacttcctatatttcatcaatactcttgtaaactggtggaaaggaagatgagatgcaacaaaaatgagacttagggtgttacagaaaattattaaaaaaagtattcacctcattttcagatttcatctgctgccatatcaactgataagtttcgaatcgaagcttactgtcctcaggctcatttttccctttgttaaaatagtcctctaaaaacagaaagaaataagtcagtttcttttttcatataatattataagttatagatcttacgtgcaaagttacacagtaagtgacagaagtggaattttttttttttttgatatggagtctcactctgtcacccaggctggagtgcagtggcatgatgttggctcagtgcgatctccgcctcccaggttcaagtgattctctcctgcctcagcctcccgagtggctgtgactacaggyrcgtgccaccacgcccgctcaattttgtatttttagtagagatggggtttcaccatgttggccaggctggtctcaaactcctgacctcaagtgatctgcccaccttggcctcccaaagtactgggattacaagtgtgagccaccttgcctggccttaattttttttacattcatcaaaaacatatatttggggacaggtaacattcaatatcctctgtatttcattttttataatcttttatttttaccatatttatggcatatttaagattaaaaatgtcaatctttctactgtatttctatcatttgctttttaatttctaacagtttttattaagtggcttttttgagttatatacatttaataatgttttcattatttgctgttattctacaaccttgtatactttgtttcatacatttgytttgaactctcctctattgaatgacttactactactattcttacatttttccactgacatagtttagtccagtctttcatttattctgtctgtatatttttgtatcctttttgaatgctttctccaaatggttagctatttgtgaaaataccatttattgcactggctttcaaacttttcaaactataatccacattaaggaatacactttacatcataacctaacacatatacacatgaacaaaaactaaagtcacaaaaaacaacactcacccttattatgtaatagcaaatgttttctttcctgttttataaatactcatagtccactaaattgatttcataactcacacataaattatgacatttggtttgaaaaaccctcctttattgtacaatccatccttctcccgctgatttgacatgcccttatagtctaaatacttatatatactttgaactatgtttgaactttttattttgttctactgaatccaaccctattctcctacyagtcttgaactgttttaattattatggctttgtatgttgtacattttatcaaatacatttaggtcttcctcccactgcccccaaacattgttattctctttcaaaaaaatttaagccacttcttcaaattaattttacagtaatcctgtcacttctcaaaactagttgtactggtatttgactagataaaatcaaatccatagactgatttggggaaaaatcccatctttaatatgttaaaaaatccccaaccccaatatcacaggtctctttttttaatcaaatattttagattccttatagttttctactttccctcatatttcttgttgtttactgctacgtattttattgtaacaactggagtgttcacgttaaatttctgctgctaataatctaccaccaagttttaatgttaactgatagtttggaatataaattcacttcatgttaaggaacttctctcctaatcatagttaactcagagtttttagcaactattgatttttaattttatcaaaagccttggaatacattgaagtcatcgtacggtaaagtggcagacaaggttatagaattaaaatgccaacaaaaaaagaaagcaaggagacactattattaytattactattatttgagacagggtctcgctctgttgcccaggctggagtgaagtggtgagatctcagcttactgcaacctccgcctcccaggtccaagtgattctcctgcctcagcctcccgagtagctgggactacaggcgcccgcgaccacatctggctaattatatttttagcagagacggggtttcaccacattggccaggctggtcttgaacacctgacctcaagtgatctgcccaccttggcctcccaaagtgctggtattacaggcgtacatcaccccacctagccagaggacactattattaagagacaaagcaggccagcgtggtggcacatgcctgtaatcccagcgctttgggaggccaaggtgggcggttcattagctcaggacttggagaccaccctggccaacatggtgaaaccccatctctgctaaaaatacaaaaattagccgggcgtggtggcatacacctgtagtcccaggtactcaggaggctgaggcaggagaatcacctgaacctgggaggcagaggttgcagtgagctgaaattgtgccactacactccagcctgggcgacagagcaaaaccttgcctcaaaataaataaataaataaataaataaataataaaaaaaagagacaaagcagaacaacaaggtagctttaaaaagaacaaaaatagtcactttacattaataggtaaaatcatagcataacatgaaagtggcaaatcaagacacaatttttatgtgcagaataatgccgcatcaaaatacacatgaaaaacctcttagaaactgggaaacacagcagtaggatactttaaactgttaccatgacttctctcagtctgttacagatcaggtaggtaaatttaaaaactacactgaagaatataagctctcactgttgccaggtttctacctgcctcggctcctattcacagtgctatacttcagtgtgggtatctcctacagtgccagtgctgctgccagtctctctctctccagttcctatccagttgttttgctggatatgcagtcatccacagaatactgaggagagggagagttaccagtcttaattatgtgcccaagtgtcttcagtcaggggacagatggtgggcaaaatgcagagcatcttcctacttcttcagtcaatctgtttcaacaactgaagccagtgaaggcaaatgttaaagtctgggtatgtttccctcattcctgctccatctgccttataatcagggtcaattcctcaaagattttcgtattataacactacccgttggtcttagagccacataatgaaaaaaaaaaaaaagcctagcaaacttctaaagcaaaattcaaatcatacaattatacacatcaggtttacyagtactaaaaactataaaccaatcctaataagttgtagcttaaattcaatacaaaaagttctaaatagaaacttggccttayataatgagaggcagtattaagctatggttaaatcatgagctctggaatcagacaggttgggttcaaatcctagctctatcatttactaacattataacattgagaaagttatatgtctaagtatccttatatatttcaatggcgataatacattccttgtagtttgctgaggggattaatcaaattaacacatataaaatgattgaaacagtctgggtctataatcccagcgctttgggaggccaaggcaggtggactgcttgagctcaggatttgagaccagcctggacaacaaagtgagatctcaccttaaaaaaaaaataaataaattagcaagcaaggtgacatgagcctgtagtcctagctgaggctaaggcaggaggattcccggagcccaggagctcaagtttgcagtggactatgattgtgccactgcactccagcctgggtgacagagtgagatcttgtcttgaaaaacaaaacagtctggcacactgtaaacatccaagaaatattaacaactgtattagttataattacattggtgatgatattagatgtcactgcatgctatgtgtccctaatgataatgggggaacaagtctttaattttctctgacctatttctagtaagttgagcaatctgcaacattaaagaaatgtgtggccaggcatggtgactcacgcctgtaatcccagcactttgggaggccaaggtgggaggatcacttgaactcaggagttcaggaccagcctgggcaacatagtaagatcccatctctatttwaaaaaaaaattatatatatatgtgtgtgtgtgtgtgtgtgtgtgtgtgtgtatatatatatatcattacttaaaaaaaatcctattctatatattcaagttatccatttatttccttagtcaaacagtggcatagttcattttttcaattcaaaactagtacatgggtatgcttaattccatatcataatttttccactggaattaattttcacagtgctgaatatggaatgtatatactcaataaccctgtggggagcttttgaaaaattctaacacttaggccccactcttgagattctaattcaattgatccgggttagggtcttagcattggcacaggttgagcatctctaatccaaaaatctgaaatcctccagaatctgaaactttttgagtaccaacatgatgccacaagtggaaaattccatatctcacctcaagtgacaggtcgcagtcaaaacacagccaaaactttgtttcatgcacaatattatttaaaatattatgtaaaattcgtttcaggctatgtggttaaggtgtatatgaaacatgaatgaattttatttttagacttgggtctcattcccaagattatctcattatatacaggtatatatttcaaaatctgaaaaaattccaataaccaaaacacttctggtcccaagatttgggataaggaactctcaccctgcattttttcaaagtcccacaagttggaattgaataaggtcactagattgtattaatatcagtttcttaattgtgacactgtactatagttatgtaagatactgccactggggataactggtcgtagggtacttactggtggaagagtattacctgtaattatatgtgcatctacaattatattaaaataagacttttcaaagttccccaaatgattctaatgtgaagctatgattgagaaccggtgcaataaatacattctgatagtaatactggatttgattgaagaagtcaagtcttcttaatttgatcactaaacaggtatcaggatataaatgaaaaaagtgaagacagtatctttttttattaattgaattttattgaggtataatttacaaataattaaacacaaccattttaacagtttgacccaggtatatacttacataaccactctgtcaacagagaacatttccatcactccagaaagttccctcttgcctttttgcagttaattccccctacttcatcccaggaaaccactgggactttaacacaacctgtgttgtttttgccttaaaaaaaaaaaaaacaacaaaaaaacaaacagccgagcacagtgactcacacctgtaatcctagcactttggaaggctgaggtgggcagatcacaaggccgggagttcgagatcagcctggccaacatagtgaaacccgatctctactaaaaaatacaaaaattagccaggcattgtggcgcatgcctgtagtcccagctactcgggagactgaggcaggagaatcgcttgaacctgggaggcggaggttgcagtgagctgagatcatgctgagagctagactccttctcaaaaaaaaaaaacaaaaacaaacaaacaaattaggctgggcacagtggctcacacctgtaatcccagcactttgaggtctgaggtgggaggatcacttgagccctggaattcaggaccaacctgggcaacaaagtgagaccctgtctctacaaaaaattttaaaaaataattagccaggcgtcgtagcgcatgcctgtagtcccaggtacttgggaggctgaggtgggaggatcatttaagcccaggagttttcaaggctgaagtgagctatgatcaggccgccgaactgaagcctgggtgacagactgagaccctgtctctaaaataaatcaacaaacaaaaccaaaagaaatgtctttcctctcttacacacatgggtatatgagtgtgtgagtatgcgtatgtctgagtgagtgataaaaatccactcccttaatatcatgagtatgtgtgtctatgagtgattaaaactcaataatttaacaaatttgttttatgaaatgaagagtgaytgagaactgtgtgggaccctggtgcttccgagagatgatggagggtgcaaactggtagaaaggatgtgaagactaagagaggaaatctgggccacttggaaatatgtagccattgtgagagtagaaagtcttctgctactcattctcagctttttcccttccctcaggctagtgagagataggagtcttggaacacaaactataaggccaaggtggtaacaatccataataacacaaatttattcacatggtatttatgatagtcttacaaagcactacatgttagctcttagagagatagaatgagaatagggagaaatcttagtgataagtgagtatagttgctcattttacagatgaagagacttagggaaaggttaaacagcagggccaaagccatagagctggtcaggctcaggatcacactccaattcctttacttatagtccaggtgattccataactttgtgctctagcaggtagaattactgtaagagatccaagaccttgggcttttttctcagcatgtattgatgtgcacagcatttatccctaagttagaacatgcagtattctaacacacatgtagttactaagccctaagttctaaaatgcyccatacagatagatgattgctttaatttattttgccaagtttattcataaaatggaatatcacatcaaaatttttaagcatatttaagtctccccatgaatattgtattttaactcaaaaataatttttatacaattttcattagaaaatatatacaaatttataatcattctttcttaggttttccttatgttaccaattatcattttattttctaaataacatttcccccatcattagaaatctgggttgccagtcagcctttattgttttgattacttcatcaaggatcaaaatgtttctctagcagaaactcactttcatttctaaagttgtagataaaaaaacaatggcagagaagtaatcaaaaagacaatctcttttaaagaatagcagcatatcctttgaaggaaatttgcttccaacttacctttggaaggtgtaattggattctcttttcaattagagccctggggtgtcctcttatctctttgaccaatgccttggaacataaatgctacatcaacatggcaagtaagccaaggttagacaagagaattactaaattcaattagggttagttcctaatagtttaagaaggtagggaataaaaaatttaatattcagacaccttacctattggcagagagatctttctctttttggagtttggcttaaaaacaaagcaaccctataaaaagaaagacgaaaagyataaagtcaaagtagccaaggagcagagaaatctgattaaccaaatattttatgggtaagcacttttttaaaaaaagatgktaggggagagaacacatttctttcaggttctaagaaatcacatcacttctctctgacctatagaaggaaaattctaaaacaacaagggggactatctactctctcccctccctcccatgagatgcccatttttgattttgctctttgacacctgatctaagaggtagacaaagaaaataaaagctgattaaatttaagcccagaaaggttccattttcataaacttaaaggaattaatactacacattaaaatgggctgggcacggtggctcatgcctgtaatcccagcactctgggaggccaaggcgggtggatcacaaggtcaggagtttgagaccagcctggccaacatggtgaaatcctgtctctactaaaaatgcaaaaattagccaggcgtgttggtgtgagcctgtaatcccagctactcgggaggctcagacagaagaatcacttgaaccctggagatggaggctgcagtgggctgagatcgtgccattgcactccagcctgggcaacaaagagcgaagctctgtctcaaaaaataaataaataaaaatgaagattaaaaaggttgaaaatagtgatgttctcccaacccgaaacttatttaaactcgaagtatctataaccttagtagtaaatagataattgcagctgtttcactctacatacttctcttcatctgataaatgcctactcatttatccattaaagtttgactcaacactcatctccttcaggaaacctttcacaattctctagccagaaattctcctttcctcgagatctctcagtacttgaacatctttattttgcattgttttaagtcactttaattgtatatcgtagttgtttatgggtgtgtctccctgagtagactgtgagtgccttcaagcacaaactgtattttatttataattgtttctccaatgtttggaatagtgctaacatacatattaggcaatcagaatatggaatgaataaatgcttgccaaataactgtcctggtaatttcccagctatgtttagtttcatattattgtttgaccagtggtagatcacccccaagttagtggtcctagtctattctaccaattctaaagtcatacatgatggatagcttatagtttttttttgtttgtttgtttgtttttttgagacagagtctcgctctgtcgtccaggctggagtgcaatggtgcgatcctggctcactgcaacctttgcctcccgggttcaagccattctcctgcctcagcctcctgagtagctgggatgacaggtgcccaccaccatgcctggctaatttattgtatttttagtagagacggggtttcactatgttggccaggctggtctcgcactcctgatctcgtgatccatccgcctcggcctcccaaagtgctgggattagaggcatgagccactgcacccggcctgatggataacttcttaaatatttcgatttctatggaaaataaaagacagaatgaaagaacgatacctaggaaaagttgtctcaggatagtgttaaagaccgctgtgcaactataaagtagccatttggattacatgttcccatttaagaactgtgccttagattcttttttctgctattgttgagacagagtctccctctgttgcccaggctagagtgcaatggcacaatcttggctcactgtaacctctacctcccgggttcaggcgattctcctgcctcagcctcctgagaggctgggattacaggcgcccaccaacatgccaggctaattttgtattttagtacagatgtggtttcaccatgttggtcaggttggtctcgaactcctgacctcagatgatccacccacctcggcctcccaaagtgttgggattacaggcatgagccactgcacacagccctgtgccttatattcttatatctgcaactagcagaagtgtgcgaaatcacatacatatttagaaaaatcatgtgataccatgacaaacctgtcattacctcctttccaaatccacctgcaattcagtaaaggaaaaaggagcttcaaaggagcaagacatgaggagtgatcagaaaggatcttaatatagggcagtggtagtaacatggttaaccatttggaactgctggtcaagtgatggtgtttgagatagaggaaggccaacagccagaaaatttcacgatgaaagagacactaaaatgttttgatatgtttaaggaccgggcgtggtggctcacgcctgtaatcctagcactttgggaggccgaggctggcggatcactcgaggtcaggagttcgagacccgcctggccaacatggtgaaaccctgtctcttctaaaaatacaaaattagctgggtgtagtggggcatgtctgtaatcccaactgcccgggaggctgaggtgggagaatagcttgaatcggggaggtggaggttgcagtgagccgagatcgcgccactgcactccagcctggtaacagagcaagactctgtctcaagaaaaaaaagaaaagaaaaagaaaaaaagcttgcagttccataaattcatgaaatagttcttaaagcttcttattcatgtaaggtctcatcccaatacagacatttgttataataccaaaaatgctttcctgaaaaatcttactttctgcaagatacataaaaataagaggtgcttatgcaatcaacaggattaagggatagaccattcaaaacctacagaacattataaccaggacaaaataaaaccagtaccatttctaataaaaatactacctttgaatctctactagcataaccttaaaccccagggcttgtcctttttccttgagatgtagtctttaaaagcactgcttctcataaaccgttttaatcaaaataaaaaatcagatccatgacatagccttcttcatcaatccattgttttaacatagggagaatgtagcttcttcatgtgcatttttcagctttctcagacagcttaacttcaggggcttcccgctgcacttacaatagaactcaaggtcttactttttgtggtccagaacagcgctgtccaacagaactttctgtaatgatagaaatgtcctatatctgcactatctaaaatggtagctgcagccacatgtgatgattgagcacttgaaatgtggttagtgcaacggagaaactgaatttttatttaatcttactttattttaactcaaatttaaatagccacatgtggtgagtgactaacacattggacaatacagctctagggcttatcttcttaccaactacactatgtcttgcaatttcttgccatctaggtagccaacatgaggaggtctataagatatyccaccacacacacccgcatccacattactttttcattctcatttttcatgacgctcccactctttgtctactttctgattatgatttttaaattcctctaatatgccattttatttctatcttctgggccgaagaaacatgctgttctctctgccctcctcgccctaatccttaacctaacttctactcatttttcaggtctcagcgaaagggtcactttctccaaaaagcctccgctaacccccgacaacctatattaggttcttcccactcttctgttgtctgcctagaactcttttccttgctaacacttaaaatttgtgatcgtcagtttatctatgtttaccgactttcttgactgcagaaactgaatctgttttgtttaccactgcatcttggtacctaacggagtgcttggcgcacagtatttgtgagatggaaaaatgagagactgggccacatcatcaggacatccgacctccaccaaccagwacttaaaaatcctcctagccataccacaaggcagatccgcgtcctcgctccccaagcaaagttggcctcaactgatctggagcaaggacgcctcagctcagtacgccgctccctccctccyctccagccagggaagggatgcctacgtaacctcggcttcatcccttcttcaaaggggaatgaggcagcggtagagccacagtgcgcatcggccaccacataccttagacatcgaggacgtagccatgstcttactgactctgcgtattccagatgcactcgggatttcccgcgcgccctcgcggctgcagggcagaggttagtggcgagccacacggctccttgattggctggcatcaccctccggggcgggtttccggcgcggggaggcgggtcgtataaggaggtggggcgaggccggaactggcggactgcggcgcacttccgtagaggtggacatggcgtgcggctttcgccgcgctattgcttgccaggtatggatcccggagcgcgcagaggagtccctgaggagctagggaccccaaaggcctttcaccgctgcgggccagtcctcagtcagctggagggtgggtcccacggaatcctgttagtttctaccacctcctcccccttctctggagctggtggagcttcagaagtcctgtggagcgtcggctgggatcagtttgtctcggtgaaaagtaaactttgaaaggtacctggtgctttcttctctccttcccaccccacagctatgaatgctttacctgggtggcggcaagtcattagaccatgattagaccccatagaagttagtgttcttgacactttagtgacattgatgatggatctggattgttcttcagaaggacctcattttaaagctgcttatttctcttgcagtcacttaggcagcctaccctagaattgtttttggtaacgcccaaagatataagagctatctgagactcagtttttcttggttcagggtcgtatttgaacagctctgttgtgaggaagggcttacaaaattgcaatataattgctttgttttgtttttcctttttgtggagaacggggtctcgccgtattgcccaggcaggcctcaaactcctgggctcaagctgtcctccctcctctgcttccctaagagccgggattacaggcctgagccaccgcgctgggcaaaattgcagtataaatgtggaattaatcaaaaagaatttttaagactcattggccacccttgcaaggaaactttctattgtggtcttggctaacccatttccttctgattaatggatgtactagtggacgtaattagcctggtgtataatttatcttggctcatttttacagtatttctagacatttgtggggaaatccctctgccttgtctttatgtttatagatgtactgccctgtccggtgataattcgccaaatatcaccaacatgacattttgttaagacagctgaatttattgctcactgggataaggaagaacaccactgagagctttggtagtgtattaaactgggaaagcaaggtcagattttactgatgggtatggcttaaggctggtctttcagagggagagggtaggagggtgttggaggaagatggcttgattagggttggactctgatctgatacagcggtttaagattgataggaaaagcaaagagtgcaagaagccttaaggcataaactattgagtttttctattggaagaactaataggcctggcatgtggttcatgcctataatcccagcactttgggaggccaaggtgggaggatggcttgagcccaggagttcgagaccagcgtggacaacataggtagaccccgtctcaacaaaattttttttaaaaagtagccaggcatgatggtgcacctctgtagtcctagctgcttgaaaggctgagtctggaggatcacttggacggacccacgagtttgaagctacagtgagctatgattgtgccactgcactccagggtgggtgacagagcgagaccctgtaaacaaaaaataaaaataaaaaacgtgaaaagctaatagatttctcatgaagttcttataatgaatgattaagttatttgggcagaagtcttctagaacagtaaagttatgctaatgaagacaaaaaataataaattcatgttaatgtagacagtaaaccatatcagggaaggtagttttggaccttagtatctaagctgtgtgtaagggtggacgttttccattcttagcccttaagtaaagatagtgccatgatgagaaacaaattgtgtttagttttgcaaaggctgtgttctttgtaaagactgtaaattggaccaggcatggtggctcacacttgtaatcccagaactttgagaggccgaggtgggaggatcccttgaactgagacgttcaagaccagcctgggcaacatagggagacccccatctctataaagaaataaaaaacaaaacttaggtgtagtggcacacacctgtggtcccagctgcttgggaagctgaggtgggaggatcgtttgggcccaggtggctgaaactagcaagctttgattgcaccgctgcacttcagcctgggggacaaagtgagtccctgtctcaaaaaaaagaaaaagataagttggagaaacaagaactaatatattgagtatatatttgtgctagttactacacattcacatttaagctcatggcaaccctgtgatatagaagtattaaccttattatataattgagtcagttgagatccacagagattaaataacttacccaaagccacatcatcaatacattgtagagttggtttatgaacagaactctaactttaaaattagatctttcctatatactgtgctctttgtgaaagcaagaagcacagtccaatcattgaacagaatctaatggatttatacagcagtgtaaattatgcagatatatatgtatttctctgaatatagagtcattggggaatgatctgaaacttgaggataaataataatattttcaatacgttaggacatggggaaaaaagagcaaagaaaaaacatgttcagtacagtttgagcatccctaagctggaaatctgaaatgctccaaaatttgaaactttttgagtgctgacatgagactcaatgttcattgagttcattggagctcaattggaaattggaaatgttcattggagaattccagattttcagattaggagctgggtatggtggctcatgcctataaccccagcacttggagagactgagacaggcagatcacttgagcccaagagttcaagaccagcctgggaaactaattagaaaattagttgggcatggtggcaccctcctgtaatcccagatacttgggaggctgaggtggaaggatcacttgaacctgagaggtggaggttgcaatgagccaagattgtgccactgaactccagcgtgggtggtaaagcaagaccctgtctcaaaaaataaataaataaataaataaataaataaataaccaaccccacagattttcagtttagggatgctcaacaggtaagtataaagccaatattccaaaatctgaaaaaattcaaaagttgaaacacttgtggtcccaaggatacccagcctgtatttaatacctttgcgaatgagcatcgttttgctataatagtttaggaatgaaggaatgtgtaacgtgcaatggcaaatgcatttagctaactttgattaattagtcgacagttttctaagcactgtcatcagtcccaaggctaaaagtgaacggaaaatagtttctgccctgaaatggcctcagacatgcttggaaaacgatgtaaaccggtaattgcattgcagcctgtaatcactgtattagaagcatgtgcaaagtgccaagggaacttgaaagctcctaagggtcagacaaagttttgtagaaaggtgatgttaggtctcagttttgaaagggatatgggtaggagtgtgccaagtaaatagagtgagagcttggggagaggtcaggtattgcaagaggaggatgtgcatagacacagacatctggaaagcatgatatgtacatagaatcacaatatttggattcctttcttcagcaagtcctgttgattttatctttatatcttgaatccatctacactattgctgctgcctccccctctcctttctctattccacaccaagcccccattatcacctatattgactgcttacaacagccttctgatggggtgtttgtttccattcttgccctccctccagttcattctccatgtatcaagaaaggtgacatctaaattgtgaatcaaatcatatcacttatctttctttgttgcacgagtctctaccagaaccttaacttcttcaacttccattcttgccccattctatcatttttgtaggaacctagctacaatgttaatttgtttttctaacatagcagggtctttccattcccattgcgtagattattccttgtgcctaaaagaaatgcattttatactatcactctttatgcacgatgaaagtttcatgaaacaatacttatttatactgtattctgtcctgttttatacgtattttttaagactggtggttgggactcaacagaatttatttttatttttatttatttatttatttattttgagatggagtcttgctcagtcgtccgggctagagtgcaatggcgtgatctctgctcactgcaagctccgcctcctgggttcacgccattctcccacctcagcctcccgagtagctgggactacaggtgcccgccaccacacccggctaaatttttttgtatttttagtagagacggggtttcaccgtgttagccaggatggtctcgatctcctgacctcatgatccacccatctcagcctcccaaagtgccgggattacaggcgtgagccaccgcgccaggcaaaggaatttatttctaactggcaacctataatttgaaaagtgtgtcctctagttctcttagtcccttgtttgcttctatgatgacaataataagagtaattgttttgttttacttgttttagtgtctgtttcctctataagcttcatgaagacagaacatgtcttattcactcttatttcctcagcaccagcaaagtgcccgaaacataagtgtttaatgtgtatttgaagaatgaatacctgagtatctctgttgtgatctcatataaaatatgcagcttcactgaatgagttcataattttaaatctatggagatgacgtggtgtggtggctaaaggaactccatcttggatgctaatctgccatgttgacttttgattatccccagttccaggaatacctgtaagatttctattttatctactgtttatagtacttaagggcaggatttctattttatttactgtttatagtacttaaggacaggatttataattcttgcccttaagcaaatgataggctatgacatagcattcttgattttttctaaggggttgacttcggttgtcttagacatcccttctgaagcatggttaccccttctctatggtatataccatagagaagccctgggtcttggggtagataactgcacaaggattcatcatcttgtctcttagcttcctgagatatgacttctgttcataaatccatattaaatgtttctttctgagaagctgggtttgtcagctgctttcttcagtctctcagcatcctcagtcttttgagggtagatttgtatagacctgcttaccatggagcacttaataatggtgggaaggattagaattctagcttcactatttgtgtaactaactcttggcaagtcagctgtaagatgatggttttgattccaagtttacaggattgctgcaaggattaataatgatgttgaagattataataactactatttatgggatacctcacttgtacggtgccgtattttgctttgctttatagggctattaataaaatgtaatgagataaagataacagtgcttaatgtcaggagttgcaaagggtctgtgattttaccctcttaagtttctaccactgttccatggatggtagcagaaaacatcagacccctgaatgagggaaaaggattttactattcatagcaatagcagtagccacagtatcaacatattttgtgtgtcaatttcccaagttctttttcttcccatgccgcaatgtgaagataatacctctatataagctgtgtactgtgttacaggagagaaaccttgagtcttttataatgggcagta

SEQ ID NO: 96721 - DNA, 40225 bp, Homo sapiens
  misc_feature (1)...(40225): n = A,T,C or G
tactttgcaaaattacaatgtgtgttctgacccatgaaattccagcctaaatgtctgatatatctctcaaattattttaaaagatgtcttgaaattaaaaaataggccaggcgccgtggctcacgcctgtaatcccagcactttgggaagccaaggcgggtggatcacgcggtcaggagatcaagaccatcctggctaacacagtgaaaccccatgtctactaaatatacaaaaaatttgccaggcgtggtggcaggcgcctgtagtcccagctactcgggaggctgaggcaggagaatggtgtgaacctgggaggcggagcttgcagtgagcagagattgtgccactgcactccaacctgggcgacagagcgagactccctctcaaaaaaataaaaaaagaaagaaattaaaaaataaaatcaattagctaactttaatttctaaaagtaaacaccacagaacgttttatagtaagaaagagatttatcggaaaaagaaatagcaaatctctttaaacatcactatggccagacattcttcattgagaacatataaatatattttccttgagaaaaagaatgaaattttagttggcctggcgcagtggctcacgcctgcaatcccagcactttgggaggccaaggcaggtggatcacttgaggtcaggagttcgagaccagcctggccaatatggtgaaaccccttctctactaaaaatacaaaaaattagcctcgagtggtggcgggtgcctgtaatcctggctacccaggaggctgaggcaggagaattgcttgagtatgggaggcagaggttgcagtgagccaagatcacgccactgtattccagcctgggcaacaaagtaagactctgtctcaacaaaaaaaaaaaaaaacaaagaaaagaaaaaaaaaacttaaacttttttaaaaaaagaaattttagctaataattgtattagatggtattttttttttgtcatccattatttcctttaaacactctgctacattctatactgttgacttttccggccagcttaaaacatctcttccttggattcttgggcataattatcccaattctcatttgctatctagggtcagcttcttgtctccaacattagaggaaaaccctaacactcttacttctgctatcctaaatatgtattctttcattctgcaggaacactaaatgattagccttagctcctctatgccagtaactcttaaaatatacctctaaccatgtatctcttcttcctgcaaggtagatctagcttgatagctcaccaaatcgtttctcttggaatctgcttttcctctaaattaccctacatttgttaataataaaatatttcccttggtatgtcaggctctataccttggaagttatccttgactccttcacttgcctgacatctggacttactgccatccgttctgctccctcacataactattcttccttttgtatttctaattctactacattaaccaatgctcttatgaccttataccatctctacacagaataatctaactctatattcttcacactgagaatccaagacttaataaagtctgtaaaatttgtctcaaattttgttttaatgctaatttaaaatgttaatataagtatattctgtatcatgaaactaccacagcttcttttgcatttgccatcatagactgatgcccctacaaattacattaaatatagaagtcaaggaaaaaagaacagattgggcacagcgactcactcctgtaatcctgaggcagcccaggagttcaagaccagtcgggccaacatggtaaaaccccatgtctaccaaaaaatacacacacacacacacacacaaaattatctgggcatagtggcaggtgccatgccttcagtcccaactacttggctggtggagggtcgctgaggcaggacgattgcttgagcatgggaggtgggtgaaggttgcagtgagtcataatcatgccactgcacttcagcatgggcaacagagtgagaccctctctcaaaaaacaaaacaaaaaagaaaaagaaaaagaaaaaagaacagagacaatcttcatatataaatgatgtgcggccgggcacggtggctcacgtaatcccagaagtttgggatgccgaggtgggcagatcacctgaggtcaagagttcgagaccagactgcccaacatggcgaaaccccatctctagtaaaaatacaaaaaattagctgggcatggtggcgggtgcctgtaatcccagttactcgggaggctgaggcaggagactcccttgaacccagggggcggaggttgcagtgagctgaggttgcgccaccacactccagcctgggcgacaagagcgaaactccgtctcaaaaaaaaaaaaaaaaaaagccataaatataaatgagcttctgacaagtgaacaccaaatgtcacagcaaactatgaaggaaaatttcaaggtatttccgatagagcaaagtggtaagagaaccaagtcatcattaaaggctggatatgcagaactcaaaaaagaacctgcagttgtcagagtggctagtagggagttcgtgtttaataggtatggtgtttcagtttaggggtgatgaaaaagttctgaagatggacagtggtgatggctgtacaacaatgtgcatgtgtttaatgccattgagctgaacgctcaaaaatggttaaaatagtaaatcttatgtatattttgccacaaaaagaaaatctgcatattcttattcatagcagttatttagtttgagcaaaatatttgtgtatttcaactaatgatgttagtttgagctattttggatttgtttgaattttattcactttgtggttttattatttgtaagtttgtcctcataacataaaaattttttgtcagaattaggagcttgcaagaattttttttcctttaaaatcaatctgtacacgagtttaaaggtcaatggtctactaatgagtgttagttactattatgaggcaagtactcttctaaatgaactacatatattaactcaattagtcctcacagcaacccaaaaacttgggtataattttaccacggaggaaactgaagcacagaaagggggagctcacttaaccaagatcactcagccaatagcagagacaggatttgaaagcaggcaatttggctccacagtgtggacatatggatatagctgaataatttagctccaattttcctacctccaatccatccaaccacttataatcacttaaaaaaatagcttggtacataggttccaatcctcctcctccactatagtgaaaagaaacctcacggttaaatccaaacaccctggactgacatttaatgtctcccacaatctggactcttctgactttccaatttaaccactgagaagtcccagattatataaataatctactaagaactaaaaataaaatcctaccccacccccacaatcacctgaaccgactccctcttggtcaaggggaccccaaagaaaccttaaaaactcagttcttaaccatgacaggatgggaggtcagacacacctcgttataccccttcctatttgggatgtagacacaacaactgaccagcattaatgttaaaatagagatcgtaagagttgcagaacggactctgtggcaataagataccaaattataaacaagacctaaggccatgccaggcaagggttaagtcacataccccctacctttaaaagaatgaactatgttctaactgccacaatatttttttcactagcactggcctccagataagcaatattgaaataattgcagttcatccaccaccagatgctaactgattcccctgttccacaggctttgataggacaagagaatgatttcaaaaattttcttttgataagatcaccaaccatggacttgttctaacaggtttacaaggcctgtgtacttaagtacctttgcttccctccttcaacttttgacgtacagggcctaattgtaatgcatttaaatattaagtcagcttcccaaaatgaatatggagtgcatgtaatatgcatttttattcagtacaggtgagcacatctcccttcgtgaatattcatagcccctcctataacctgttgaatatgtatacctagcccactcatacagcataaatccctgccccaacccctcctcctccaaagtgtgggcctttctgctttgcctgagactatgcttcctagcctgtcaggatggccactttgcagactgtaaccctttttaagaaatagtctctctaaatttgcagatctcatgatttttcagttgacactactatggggactaatgaaatcttgtggccagtaaagaaactatttttccctggttcttaaacttccaagtgtgcacacaaatcctctgttagggcagtgtatttttttaaaatgcagattctgattcagtaggtcaggatgtcgctctaacaaaccgccaggtaatgctaaagcgtcccatctgtggagcacacctcaaatagcaagggtctttaatacatttactctcatttgtggaggagcacacctttttcctctccctttaaccagtcacagcttcctctactttcatgaccgcacgcagacattttctgtagatctcctccttcccattttctaccaattcttctccagttagctcaggaaaaatcccattctttctgcacctatgtcaaattactcttgactcaaaaattgaagacagtttatgttttcgagaggcttctatgtttgagatgataatacataattacggttgcagagcttttctctccctctccttcaataaaccaaaagtgcccagactttggagtaaaatttttgggtcccaatccatctctgacaattcctttctctggaaccttggacaagctacctaacttctctgagcctcagtttcttcaactataaaacagggctaacagtagcacctacctcagaggaatgtcaaattctcctgcagtctatattaactacttttcttttatcaacttagttttttaccgaagttatttttcaaaggaatttttatgtcatcgtaaacacaaagtcattatcagttgagatggttagctgacctaccaaaacaaatgccatgaaaccaaacggagttattaaatcccaactagagatacttctgcatactggaggcggaattatctagctagggatatagtcaagacttcctccttgtcagtcatccacacagacgactgcgattaaacgagttaataccctgcaatgcgtttacagctgggcgccgtacgcgctgctcccaactctaggccatcgtcatgacaggatcaatgccagttcatgcccactttctagggctgggagtaggagaccgaggatgtctgtggagattcacccgcctggcccgggaaccctggccagcgggccctgggggacttggggtggtcacgtactggactcgggacttctcttcccagggcgccggtgggtcctcacacgctcgccgcagggccgcgatctcagcttgcaaggcgcgcacctctgccagctctgcgtccatggcgcgttgctgaccgcagccgggccggcagcgcagctgtcactccgacctgcgcgcttcacccgcgcttcaagcctcgcgcgcgctcccggcgcggaccatcccagagctcacgcggaggggaggcgggagagctccgcgtgaccccagcggccctgcacgtccaactccgctctcgcacgagagcctgagtcctccacttccccgcacacgtttccctggctgtctaagcagtggctatactttctctggagagcgcgttctttgctactccaagcccaagcgctccgctgctcaccctagccggcagccttggagccgcccggccgcgtgcctcactaaagaggcagggctgggatcacgtggaggggagcgcctctttatttttttcacctacttcctctcttacgccgacctagtccaggaattggtacacacagcgatagtgttcaatagmaactaggggattttggtttaggctcttttgcagtcgttgagggggaggtgacggaggcgtcagggaaggtgggaggacggaaaaggaaattaaaagctcttgggaactgaattgtggtaacggaaccttaggaggctgggttggaaatcgagtaggaaggaagagaggatgctccgttgggacacgtgaccagaagttaggggctgcagcggcgctggctttaggtgaacgacgtggtgaggagtgggtttcgggcatgagaagtcacagggccgtttcctagtctctcttcacttctttgggtcttctcagagaaagaaggctgccgtgggtaggctgggggcggagactatcgggaagaggtaggccgaagttctgcccagaatacacgccatgtggtggacgctggttgggagtctcttctggaaagagtctgtcagctcttggggaagggaagggcgagagctgagcgcctgccgggtgctaaacgaaatgagagatactatgatgggccctagtacctctggaaaagttttcctgagtcccctgtgatacagcaaccttcatagtatagtgttaagaattccaagttctgaaggtagacctgcattataatcctggattcactaattttcggtatggcattgaggaagtgacttaacctcttctgctctcctgaaaaatgggaaacatgcaaactactttgtacaatgcaggcacatagcaaaaacacaagtctgtattcgctatatcccttgatctttgtgtctgaaccccactttgcagcacttttattgtgacataatattgtgccatttgttttattcttttgtgactataaggagctcctagcctctctattcacttctttgggtcttctaggaggaagaaggctggggtgggtaggttgggggtggagacaattaggaagaggtaggctagctctttttatcttttagtgcgttacatcctgtttctgtcagactttgttaaagacagtaaatgaatgtatgagtgagtcaaggaaaaacatctaaaaacatgaatacataaaattaagagggatagagtgtaatattatggccatttggaggaaaaaaactctgtctgtacctgtgtctatatgggtatggggttgctgttccaaagtgcattcatgaaagatgtggatgtagggcttgggcaaaacctcgaagactaaaatttggaagtaatacaataggaagtgaaatacagatccaggagacggatttgatacagaaggttcagaggaagtagttgttttgttagattttagaagaactaagggaaagaactcttctctgtatacagaaaattacttttcccactgaaacacacccaagtatatgcccagccttcatgaaagtgaacagagaaacgaagcgcctttatgtgggtggccttagccaggacatttctgaggcagacctacaaaatcagttcagcagatttggagaagtttcggatgtggagatcatcacacggaaagatgaccaaggtaatttatggtccttcactgggcagttataggcagacataactcaggttaagtgctagaaaataaaacaaccccaagataaatgttagctctgaacaccaaaagttttaagtgatgttgtggaggtataatgtgtgatgtggaacttgaccagaatttgtttctgaaataagaaaaaattccaaattctaaaacatctgatttcagaaacatattaacttccagttttgagaactagaattttctaacatggattaagtgtcccgttaagtagactatcactagcatacaatcaaaatgtttccttatctgactactggacattttcttctttttttttttggaatattttgataattatgcttatttttatagccaataaaaaacaaggtttatctttgaaataataagttttcaagagctatttttttttttaatttagaaacaaccgtttttacattgctctctggataagaatttaaataaattgttttgtttgtttgtttgtttgttttttaggaaacccacagaaagtttttgcatatatcaacatcagtgtagcagaagcggacctgaaaaaatgtaagatcatcatatattttctatactgtttgccagtttgtatgactctgtaacttggaataactggttctaaatctaaacctccacagccatttttcacgttatccagagggacagcagtgatgaagagaattccagtatcgtataactcagcaggtttaggtccattccatttggcatcagcagacatggtagcactttactggtgggtttacttaaaactgctattctcaaatattttggacaagggaccaaactttcatagaaactgcctgttacatatatcccactgaatatcatgccacattccccctcagtctgatcatttctttgacagctaatccttgtcactaaacaytcttgagggggctttaaaatacacccttgtaagaccgtatccttgaaattgtgaaatctcttgttgataagtttagtaaagtcaagggcaaacagtggccttcaatgaagaatgggagataatccatactgccgctgacacagtaacatattctagttatttggaggccaaaaagtgaaaaaagacacggaaaataagtaaagggaacacgctaatagaggaagagggcaatcagtcttttgtaatttcatttgcgaaaagattgctttattctattttacattgaggaatatatgtgataaatgtgaagttgtggttaagaatacatcaactaggctttgtgacctgtggcaagttacttaaacttctcagcccaagtttgcttatgtgatgaatgacaaaagatagtgcttgcctcataatatttctgtgagaattaaattaaatgatacatttgcaatactttgggaggctaaggcaggtggatcacttgaggtcaggagtttgagaccagcctggccaacatggtgaaaccccatctttactaaaaataccacaattagctgggtgtggtggcagacacctgtaatcccagctacttgggaggctgagacaggagaatcaccagggaggcagaggttgcagtgagccaagatagtgccactgcactccagcctgggcgacagaaggacactctgtctcaaaaagaaaagataaatttgtacttagtacagtatctaccacctacaaaattctgttaatggtattattaaggaagctgacggcagatgctcagagaaatcaattactacggcatagtaattcaaacagttcagtcactcatagttaattcatctgcaagttctayagtgataattagtatgaggtgataaataaaattaaggtgctgtaggattccagagtgtcctctgattcacctgaaaagatgattgttttatagttacaggaaatatatgttttatagttacaggaaataacaataaaatatacattaaatatcagttattcagaggttcctgacatttgtttacaaacaaattgcaaataaattttgctttactttttacacattttgcctcattccaatctagtaacactgtgagatagggagtgtaaagactcttttggtaagttgtcaagatgaaacaagagcctaggctccctctctccaggtctcatttcttttcttccacttcccctggatctctttgtgataaacaagcctgcttttcttgatactaaataattagaaaaagcacaagctgaaatatatttttrcattgccatgtacttgtaataattctttactttataggtatgtctgttttaaataaaacaaaatggaaaggtggaacattacaaattcaactagcaaaagaaagctttctgcacaggtaagttttgctccacatggatttaagccctattttttttatattgtaagtggttttatatattatttcaaattatcaagtaatrtagtattatattcttaacaaattcaaacatataagtagagctgaaatccctttcaactctgaatccccttcaccccagacgaacaaaaaggataatttcatgcatttacgtatgtatgtaataagctataaaagtatatatgtacttattttctctgttaatgagctataaaagcatatatgtacttattttctctttgttaacacacccttttgtggcaatgtagatcttctccctttataacaattgttagtagtatttcagaaaatggttataccacaatgtagtggtcccttcccactgatgactgtttctactttttcatggtcatagatgatcctggagcacatatcctatgtatatgcaggtgtttctctcagtttatatcagaaaatggagttgctgaatcttagcattgtctgcatttaaattttagtagactactaaattgcatatgttgattttgactgttaatgctagtgtcataccaaaatataaaggaaataggagatcactgtatgacaggcataagagtgattatgcaagtgatttaagagcaagacaatgtattataaaaaccattagagcttttaaaatcctaaaggtattttcaggaagaaaaggtattgttggggagttttcaaaataggaaacaatttaagaatatacagatagaggccgggcacggtggctcacgcctgtaatcccagcactttgggaggccgaggcgggtggatcacctgaggtcaggagttcaagaccagcctggctaaagtggtgaaaccccgtctctactaaaaatacaaaaattagctggttgtggtcatgggctcctgtaatcccagctacttgggaggctgaggcaggagaatcacttgaacctgggaggcggaggttgcagtgagcctacattgtgccattgcactccagcctgggcaacaggagtgaaactcttgtctcaaacaaaaaaaaaggaaaaaaaaaaaagaatatacaggtagaatgaccaggagagttgataagcttgttccagaccaatgaaatgtaacaagaacagatatattctaaaacgagtggcaagcaacctactttgaggcatgttttgggggactggccttatgaaaaaggtgagaatttgattttgttcttcagctgaagcctaggactgtgaacagggtggttatatacctttcattccagcagcagttgccagcctactgtgtacaggcactagagccccatgctgagcaggttgagcacacagtgctgctgcttggagtatctgcgtggatatgcctgagaagcatgggtctgatggttattctgggacataaaggagacagaccagaggcaaagaggccagtgaggactgctctgtgcagttgtccaggcctgaagaaggtggcggtgatttgaatcagaagaggtggcattctcttcattaggaggatatggataatcaagacctaacaaattgggctccgaaagataccttcgtcatggggaagagtgaatggagagaagataatataaaatgccaaacgtatataaattgaaaggggaaaattgagagaacttgcgatccatggtcttggtcttccataaaggggaactgggacatccactggagcagagcacaggtataagcgtgcatgtcagggatttgggagactgactgtagtgtagtggatgggctaagaaaagaaccctcatgctctggtgggacagccctgacagcacagcttgtcactgctgtccaaccgtatagctcagttgctggtggtaagggactggtcaataaactacagtagattgatggaaaggcatgttgtacagcaatcatagtgatgttttcaaagaacgtataagttgataaatgaagtgtacccaactgtgcttatgatatttggattacattataaaatatgtatatttacatacagaacaaagatgaagttaagtaaacaaaatattaacaagatgagggataaggaatatgttttgttttcttaacggttctgtcttccagtattctataataaaaacattgtatgttcagataagtaggtaagctattatgctactaagaaagcatttttgttttattttggtttttaatactacaaagctgtttatagtgctcatttaggcacacctaaagtgaaataaccattttacgtggctgattattttgactcttttatttgtattttctttttgattcagattggcccaagagagagaagcagcaaaagctaagaaagaagaatcaacaacaggtaacgccaacttgttrgaaaagacaggaggagtggatttccatatgaaagctgtgccagggacagaagtgccagggcataaggtgagtctcctctgtagcctgagccaattacatggtcttggaaactgatgcctgagatcacgtgattgtgggtgtcatgtctaaaaccagttactcttttcccctttcttggaggcaattaacatagataggactttatgattttcaaggtgcatttacaactcttaggtaagcatagttctccatcattttacagagaaagaaatcaaaactcaagcagaggtggactttcaagggacataggtagcaaggaatacaggcaggtcccaagtttgcctgttcaaattagcagccagtgttttttgtaaaccatcttacacggtttacttgggattgatagctgctccaaatcttcctttttttttctttcctctcacaatttttctctttggtaactcttatttcattgtcagaaaactaaacccaacagtaatcatagcccactgatttttttgttgtatttacctaatattgttattaaatcttttccatttgtgtcacatatagtaaataaattctttttttttcttttagaattgggttgtgagcaaatttggaagagtcttacctgttcttcaccttaaaaatcaacataaacgtaaaatatcctttggcctctcaacrtaattatttaccacagtgacggatacttgtaaaatacctttagcatttcactgtctcttatcagtgaatctttaggtgtttgtttgcgtgttcccagtttcttggtactcacctacatgtatgaaacaattagagcatgagaaaatggattgaggttttatacaataagtaattcaaatgatgagtgccaaagaagcaggttggtttattaatttattcatattgtcatacatggattcaaagccattgctgaaggagctaaagaggggtgagagacccagagaccatcattaaagaaggctttagaattgaggtaggttttgaattaataagaagtgatgggaagtagtcttgggagtaggaatagtagataaaaatatgtgggcaagcacgaggatggtgggttgagaaatagtttggagcagagtgtgagcaaattctaatgcctattcagtgaggtcacattgtctaagaccttgaagacctggtatcatggaattctgagcagtgtgtcttaatgtattctttttttttaatctttttttttttttttttttttttttgagatggagtcttgctctgtccccaggctggagtgcagtggcacaatcttggctcactgcagcctctgcctcctgggttcaagcaattcccctgcctcagcctcccaagtagctgggactacaggtgtgtgccaccacacctggctaatttttttgtatttttactagagacggggtttcaccatgttggccaggatggtcttgatctcctaaccttgtgatctgcccaccttggcctcccaaagagctgggattacaggcatgagccaccgcacctgaccgtcttgatgtattctttagcttgtaaccctggtgtcagtcagtaaggggaacagtagcaggtatttgaaacagagggattataatatatgcagttagttaaacaagtgctggaggagcaaaagccaaaggtcagattccccactgattgacaactgcagtaaaccactaccccactgggactagagaagcaaaaacgtgtgtcctctgagctcacagctactgtgccactgaaaccactactacctgaatccaggccctagttgcaccggacatagctgtgacctctgccctccctacaagtggctcaaagtcaggaaagtactgatttcttcttttccactttccagctttccaccaatggcagctgctgatggcaaagaggaagatattgaaggacagtagagacaatagacactttttggcacacctcacatataactggcacatataagtagttattgaaaaaagggactttcaagagtaatcgcttaaggtggggtgcagtggctcacacctgtaatcccagcactttgggaggccactgggggatcacttgagcccaggtgtttgcgaccagtctaggcaacatagtgagactgtaactctacaaaaaatattaataaaagaaaaatcaggctgggcccggtggcacatgcctgtggtccctgccactggggaggctgagttgggaggatcacttgagcctggaaggttgaagctgtattgagccacgatcatgccgtggcactccagcctgggtagcagtgaaaccctgtctcaaaacaaaaaagagtgatagcttaaagcaccttaatacttgcctattcatatgctttagggaatcagcaaatgacagccatcattacaacacatcgatgttaactagaatctttcccggatagtgtcgacataggcctggtaaagatttattagattttttttaatttttaatttttatttttaagacaggttctcaccatgttgcccaggctggtctcgaactcctgggctcatgtaatcggcccacctcggcctcccaaagtgctgggattacaggcatgagccaccgtgcccaggccagctttctaataaagacctaaaaatgttgcagagagtgagttcatgtgaagtggatgttattcagctaggagaatcagagttaggatgagtaagaactgagakaacagaaatagccaaaagaatttgagagtaaaggacacacatgtggccatgtcctctgggttctcctgaacccagaactttgctttactgtatcagttcgatggttggatttctgtgatttacagaaaatagccctgagacctgtgtacctataatataatctgaataggtttgctataatatccacatacactccaagtaatttctgccaactaatagtggtggtactagactttaactcagcaaatgtcatagaaagctcagtttcttagaccctgaaaggtaacctagttaagtcctcattttcttttacaggaaactgaaaggggggggaaatgacttatttgagattaagcaatattttttgtatcaaagattgatgagttttcctaaaaccaagtgctttagttttgtttcttgacttgcgtaacatcatcaaatatgatccctcaaaatactgccacaacctgaagaagataggggaggatttctcaaacaccattcctatatccagcctgacttgggaattagaaggagggaatgaccctatgagtaagaaacggcgaggagagttctctgactttcatggccctcccaagaagataataaaagtgcagaaggatgagagttccactgggtctctggccatgagtacaaggcccaggagggtaatagagagaccacccttaacacagcaacaggctgcacaaaaaagaacttgtgattccattactccttctaaatcatctcctgtacctgtttctgatactcagaaacttaaaaatctaccttttaagacttctggcttggaaactgccaagaagagaaacagcatttctgatgatgatactgattctgaagatgaattgagaatgatgattgcgaaagaggaaaacttacagagaactacacaaccctcaataaatgaatctgaaagtgatccttttgaagttgtaagggatgatttcaaatcaggcgttcacaaactgcattctttaataggtttaggtatcaaaaatcgtgtctcttgccatgatagtgatgatgatattatgagaaatgatcgtgagtatgactcaggagatacagatgaaattattgcgatgaaaaaaaatgttgctaaggtcaaaaacagtacagaattttcacaaatggaaaaatctacgaagaaaacttctttcaaaaatagagaaaactgtgagctttctgatcactgtattaaactacaaaaaagaaaaagcaatgtagagtcagccctcagtcatggattaaagtctcttaatcgtaaatctccctctcactccagtagcagtgaagatgctgattctgcatcagaattagctgactctgaagraggtgaggagtataatgccatgatgaawaactgccttcgtgtgaatctcactttagctgatttggaacaattggctggcagtgatctgaaggttccaaatgaagatactaagagtgatggaccagaaaccaccacccaatgcaagtttgacagaggctccaagagccccaagactcccactggcctccgcagaggccgacagtgtattcgtcctgcggagattgtggcttccctgttagaaggagaggagaacacctgtggcaaacagaaaccaaaggaaaacaatttaaagccaaaatttcaggctttcaagggagtaggctgtctatatgaaaaggagtcaatgaaaaaatccttgaaagacagtgttgcctctaacaataaagatcagaattccatgaaacatgaggatcccagtatcatatccatggaagatgggtccccatatgttaatggctcattaggtgaagtgactccatgccaacatgcaaagaaggcgaatggcccaaactatattcagcctcaaaaaagacagaccacttttgaaagccaggatcgcaaggcagtgtcccctagcagttctgaaaagagaagtaagaatcctatttctaggccattagaaggtaagaagtccttaagtcttagtgcaaagactcacaacataggctttgacaaagacagctgccatagtaccacaaagacagaagcttcacaggaagagcggtctgattcaagcggcctcacatctctcaagaaatcaccaaaggtctcatccaaggacactcgggaaatcaaaactgatttctcactttctattagtaattcgtcagatstgagtgctaaagataagcatgctgaagacaatgagaagcgtttggcagccttggaagcgaggcaaaaagcaaaagaagtgcagaagaagctggtgcataatgctctggcaaatttggtgagtatattttcaatgtatggatttaacaagaactcagaaagttcagcttttctttcccatgaagttaggtgtgcccccatagagctgattgtcttggtgttcaccagtttcatgttttggttcttgagttagctttttcatctggtttatctgaaaatttctttataattttctttcatttagaagctatacctggtatagttaagtaatgtattcaaatgtgtctgaatttacataaaaatcacttgtcaagtgatttataccttgccaagtcttgccaagatttactgtaatgggcttttgttcattcttctaacaattgttaagtacacctttatagtaagtgccagatttatagtatgaggatggtgatcttgcctttcatacagtttttggctcatggtgtggcatgctgacagtcacagttcagttacacagggccaggagggggttgtgcccctgtgccttggcagcacgcaggagacacactaagtcagttgggagcttctgtagtctgagctgagtggtaggaaaagatttgtgggaattggtcaggcccaggtgaaagggtggaaagggagtggaaaggctttcattctaggaaaaaggaaccgtttatacaagggtgaatgttttcaatcagtgtaattaaaacttatacagcatgagatggcaagaaatgaggctagtggtttcattttgttcataaaatgaaaagagagtgaagaattttaagcaaaggagagaagattaattgtgtctattttggaacaggagttgacaaactacacctcaaaggccatccagcccatgacctatttatgtacagccttcaagctaaaaatagtttttgagtacagaacaaagacgatatgtggcctgcaaagcctaacatatttactctggccttttacagaaaaagtttgtcaacctctgtttgggagagatccttcagaccatgatgaaaacaaatcgaacggctccgtctgtaaccaaggagagcctttggggaggtggaaagtcaaaaccgtaacaacagcaatgggaatagattgactgaattgataccaaaaagtttaattgataggacttggtgataactggatagggatagaaagaggaattgtaagtttctgtcttaggcaaataaacagatggtgatggcattcactagataaggaaaaagggcaggaagtagacttggcaggggaagggagtgataggtttagacatgttcagtttgagattgggttgttttaagacaatgcttttttttttcttcctttattttaggttctgggggtatatgtgcaggtttgttacatgggtaagctgtgtgtcttggaggttcggtgtacagattattttgtcacccagataatcagcatagtacccaataggtggtttttcttttctttttttttttttttttttttgagatggagttttgctcttgttgcccaggctggagtacaatggtgtgatctcggctcactgcaatctccgcctcctgggttcaagcaattctcctgcctcagcctcctgagtagctgggattacaggcacctgccaccacgcccagctaatttttatatttgtggtagagatggggtttcaccatgttggccaggctggtctcaaattcctgacctcacgtgatccgcctgtcttggcctcccaaagtgttgggattacaggcgtgagctactgtgcccggcccaataggtggcttttcaatccttactctctttccaccctccaccctcaagtagaccccagtgttgattgttctttttttttttttttyttttttttttacagggtctcactctgtcaccctggggtgcagtggtatgatctcrgctcactgcarcctccatctcccaggctcaagcrattctcccacctcagcctgctgagtagctgggactacagtcacgtgccaccatgcccagctaatttttgtgtttttgtagagatggggtttcaccatgtcacctaggctggtcttgaactcctaagctcaagcaatcagcctgccttggcctcccaaagtgctgggatttcaggtgtcaaccactgtacctggcctattgctcccccatgtgtactcaacatttagctcccacttataagtgagagcatgcagtatttggttttctgttcctgtattaatttgtttaggatagtagcctccagcaccatcaatgtggctgtaagggacatgattgcattctttttttatgactgcataatatttcatggggcatgtgtaccacattttctttatccagtccaccattgatgggcatctaggttgatttcgtgtctttgctattatgaatagtactccaataaacatatgtgtgcatgtgtctttatggtagaatgatttatattcctttgggcaaatatccactaatggggttgtaggtcaaatgatagttttgttttaagttctttgagaaatcgccaaactgctttccactgtgggtgaatgcatttacattcccaccagcagtatataagcatttccctttctctgcaaccttgccagcatctgttatattttgactttttagtaatagccattttgactggtgtgagatggtatctcattgtggttttgatttgcattcctctaatgatcagtgatgttgagcattttttttgtatgcttgttggccatgtgtttgtcttttgagaagtgtctgctgtgtcctttgcccatttttcactagggttgtttgttttttgcttgttgatttgtttaagttccttatagattctgggtattagacctttgtcagatgcatagtttgcaaatattttctccgattctgtacgttgtctgtttactttgttgataagtttttcttttgctgtgcagaagctctttagtttaattagatcccacttgtcaattttggattttgttgcaattgcttttggagtcttcatcataaatctttttaagatgcaatgctttcgatggcctccctaggatggtcatccagaggataagccaacgcacatcatcttcggttctgacagtgaatgtgaaacagaggagacatcgactcaggagcagagccatccaggagaggaatgggtgaaagtaagaagttcaggatgtctctgtggacattcatctacttctgcagatccacaccacaaacaactggcaatctcaacataaaaccctcctgagagccccaatgagacccagggcttgccaggtcacctcatattgagactacaggggtcttggagatttttatatatgaacctatattctccacaacatctgcagcatgacatcaatattagtgaaacgctacaaaaactgttcttgcatgtaataactacctccccaaatccaggcttcactggrgagcctctggattagtgatcccagaggccagttagatttcactgagtcaggaatttccacctgacctgccatttactcattcctggtagatgagtctgggttactggctttcaatgtgagggagaagattacgttatgaagggaaatactgcttgtttgcctctgctattaataaatgttgtgtttcttcacaggagtctatgggtaaaacatcagggaagctgtttgatagcagtgatgatgasgaatctgattctgaagatgacagtaataggttcaaaattaaacctcagtttgagggcagagctggacagaaggttagtgaagactgaaaataattagacttgcagcatgtccttattttttgacatagtccttaaatctgggtaaatgcaggcagaccttaacctacattatagcatcggggtgtttatttggagagtgagtcttctgtgatcctctctgattggttcataagtagatggaggtaggcaaacatcttaatgtagtgaatttcagtgtgtggggaggtgtacattgacagtcttcgtcagaagcaatttcttgggaatgtggctatcaattatgtatgttttctgtctgtgtagctcatggatttacagtcgcactttggcaccgatgacagattccgcatggactctcgatttctagaaactgacagtgaagaggaacaggaaggtaaatgcttcattgtccagagtcctgatgtcatatctggggacactgagaaatcacctagtatacctcctttgtttaacacatgaagaaactctccatcccaagacattggattgaggagtttataatcaaatgtacagttaatactaagtttgtttgtacatagtaatttaggaaaatttaattacttagagctgccagaaaggaaaggaaaaaataacatccaccaaaggtaccattttcctctatcccatccttggcatgagaagaagttgagtttcctacctggcagtggatcagcaggttctgggtgaagccatggaagacagttaagtcactcttggctttctaaaaggaacagtgttcatcgtcctccagtgtgcatacctggtgcagattattttttaaagctgtgtatcactgaatgccattctacttgaatttatccctgtttgaatgtatctaagagtaatgatgctatcagaagcatcctaattctacttcttttcacttactatagcatttttcacagcagtacttccaatctttttctacaggaccttctcctcttacccttttaaaaacaccttacctcttacgtcgctggcttgaatgagctccctaattccctctcctaatctcagaacttctctgcccttctttttttttctccttcctgaattaatctaatctgcattttaatcctcaccattcctacttcctattactcctttcatcacttgcattttcattcttctccttctagcttcttcctttttctacagacatagttaggtcttgtggtcccaaaaaagccattcctctaaccatgccagttttcaagtttgtactccatctctctttcagttctaaatttgaagtgaaaaagtaaattacatctaattcagtagcagttggctttttactgaaaacaatctgtgatttgatcttctcaattctttgaggtgattattaacagtgttggactgtttcaggaaaccaaggttcagagagttttaaaatgaattctctagggtcctcccaaattctgtttcagtgctgagattacaggcatgagccactgtagctggcccttttccaacttttgaaagcacaatgtttgtctatcctgcaagcagcagcacagccagcctccatcaccttgagccctttccagcattgtattctacttgactttctcactcaaaactccatgttgaaaacacaagaatgaacagaacctggagactaaccttcatttagaaggtacataggttattttcttaacttctgccaattttgtctgtttctttacaactctttgggtgtgtgttccctcaaagccgtaaacaacttgtcctccaagtgcagtggcattgtctccaatgacatcctcttcagctaacctagagcatatgtcactgttgatcatcccttcttgaaatgttcactttgcttccaattgcatcataacttcctggttttcttaactctttattcctaatttttcttttgcctccaaatatgggttcttcccagggttctgtaagtccctatagctttagccttcacttgcacatgagtatttttcaaatttggatcttctttcttccttgctgttctgctgagctcccaactggtcttaaacgcctgttggatattttccacaggctttcctgagtttgtgttaaaactcagcaagtccaaaccagctcttcttaacctttctgcgttgatggcgtgtccattcttagaatctctgttgttgtttttttctttccttctcaacattttatttttatttttttggagacaggatctcactgtgttcctcaggctggagtgcagtggcacagtcatagcttactgtaacctcaaactcagtctctctagtagctaggactacaggcatgtgccaccatgtccagctaatttttgtattttcatagagacagggtctcgctgtgttgcctaggcgggtctcaaactcctggcctcaagtgatcctcctgcctcagcttcccaaagtgctgagattataggcatggaaccactgcaccagaccccttcccaaattttgaggcacaacgttttgtctcaagtaagcagcacagccagcctatatcaccttgagcctttttcagcattataatctacttccctaatgcttattagattaaaatttaaattgatgtttttgatagtcaaaagttgttgaaattagcagtttcaacctaatgcagtgtaaactttttgtactttattatttcaatatatgtgttcgttttgtttccaacacctagcatgctttcctaccacctctagggattcaactctatctttcctacctcataactytacctagtttataaagcatcttttgattcagttaaacactatctcaacttcctttgaacccttagaaactttgggggcatccctgtagagtacttaaattagcattttattctagtttctgttagttggttatttatatcctgcagtaagttgaaagagtcatacaggcttagactacttttgtatttctgtaatccaaactagctgtttaactttattctgtgatattttgtctgtttgtagtagttgaggatagtagcttgtaaaagtccatgatgccttantatgtgtagggcatatggtttttttcccataatacttgttattgaatcaaagactgaaacaactatccactaatatcttatattgtcagatataccattaccatttttcactctttatcatttttagatttacgtaatttagattatgtttagaatgttaaaaaaatcaaagagtctataatcactgtagttattagtatcttgctctattacatttgtcgatctttaccttaaaagttttagacttgctactgaaagccattaaattcagactttcataattaggaacagaagtaggacttttcattgtctggtcacgcagactttctgagtttgctatgactgagggtctttggttatggaggttagtgaaatgaggttaaagtttcttcttcctgtcttaatggattttgaacatgtttaggtacttggtaaatatttgatgattgagacttctcaggctgtgttttccaagagagtattaattatcccttttcctcaaagaggtaaatgaaaagaaaactgctgaggaagaagagcttgctgaagaaaaaaagaaagccctgaatgttgtacaaagtgttttgcaaatcaacttaagcaattctacaaacagaggatcagtagctgctaagaaatttaagtatgttttatgttccatcccattctaccatatcatcctttgccataaatgtcttcttgaactcaatttaaaactaggtctcttttaatggcctggggaggcagctggcaatatgtatcagacccttaaaaatatacttgcctttgacccagtgattcacttcaaggaactaatcttaaattatttctgtatttatacacttagatgtcatagcagcatcgctttcattagtgaaacaaatgggaaacagtttaaatagtaactgtaaaagtatttatataaacgtaactgttatggaaattttcaggcatgaaatttagagagactaatgaaagccctgtataccatcattacctgtacaccaggtaatgaaagccctgtacaccatcacctagcttttacagtcaccaacatgtgaccagtgttctcttctatacctttatccaacccctactttacacaatgaaatgttttatgcaaatcccagatagtatatcattttatctgtatgtattttagtatgtttaaaatcattttaaaagctaaaaaaatccaggaaatctcaaaagtaggtagtttaaaatattttttcggctgggcatggtggctcacacctgtgatcctagcactttgggaggctaaggtgggcggatcacctgagatcaggagttggagagcagcctggccaacatggtgaaaccccgtctctactaaaaatataaaaattagccgggcatggtggcacatgcctgtaatcccagctacttgggaggctgaggcaggagaatcgcttgaacttgggaggcggaggttgcagtgagccaagatcacgccattgcactccagcctgggcaacacagcgagactctgtctccaagaaaaatctatgtatatgttatttctagtaagatcctagttatcttatctgatgttatatggcttcttcttgctgcaaaattagaatcttcctagtgctgaattataatttgctacttactttttgtattagtgttctgtttttatctcttccaacctcccttcctttttttacatagggacatcatacattatgatccaacgaagcaagaccatgccacttacgaaagaaaaagagatgataarccaaaagaaaggtaagtagagctacttcttttagcaataggatcatgtaaattaatctcatttcagacaattaaaaatgtaggtaggaaccaatatcctactcattrgtcccactgtattaagattggtggggtaggggtagtgcaggtagagttagaaaggaattattgatgtggtggaggaggtcttaccttttaacagaggaatctataaatgatatgtactcctatcatttataccttttatttgtataaatgatgccttttatttgtactagtttcttgtgtcttctgtagctaccacaaacttagttacttaaaatcacaaaaattatttctttacagttctggaacctagaagtcccaaattaagatagtgaacaggttatgttccttctagaggttcagggaaacaaagctgttttatgcctctcctagtttctagtgactgccaccaatcctttggtgttccttggcttgagactacattactcccatttctgcctctatcttcacatggcctcttcttttctgtctctcctctttgtgcctcttataaggacacttgtgatagcattcagggcccacttggataatcctggatgggctcctcatcctaggacccttaacttaatatctctgcaagaccccttatctaaataatgttaacattcacaggtttcaggaattaggacatggacatagcttttggggggcaaccattcaaccatctagtgtggtaggagcttctgtttcctatagatgtgcagtcagttggataaacatggcaaatatatggagcaaccagtagcagcttggtttaaatccttcattttccaactgctaatagccacgaaaatcacaaaaggcagtgtggtatcctgaattgaatcttgaaacaacaggacaatttgtggagaaactagtgaaatcaaaacaatgtctgagtttagttagtggtaatctaccaatgttaatcttctaattttgacaattatatcctagttacatacacacataattacattagggaaaacaaagtgaaggctatttaggaactctactattttcgttactttctgtaaacctaaaattgttccaaaattattcttttaaaaagaatcacattttagactaaagtagaatattaatattccctccaatgtaggatatatgtgtgttatttcagataatccgtattgaacaaataggatatgtttaccccctccctatacccctaagaagtctcatccctttacatcagctcaaaatccaggatgtcatcattcagatcagatctaagtacagatgaggcttctctgttattccttgagtacagtaccttgagtgcagttctgtttgataagacctatgaactaaaaaagcaagttatctacccttcctccaatatagagcggtggaacaggcattggataaccactataggtactgttcaatgaaagaaaacaggcacaaaggagtcacatgtccatagtaactctgaaatctagacagacaaatgttggaaggtctttgattaggactgagggcctaggaataattcttcctgaccgttgacttggctttctggatcatccttctcttttcataagtgctggcacaggtttacagctgagtagttttttcaacctgctttttgcttatagaaatttgggagtccaaaagcctgttcattttgaaatgttcctgtacctaccagtccagtctagtggtatttctgataatataattctcttaaaatcttcataagttatctgtgaatcttcttggaattcactctgttagatgaaagtcacacaaatcattttgagataagccttttttgttgtttttttaaccctgggcttctactgaaactgctgagagataatgcctctaacctccatagaagccctattgtttgaacaattgaagtttattttcttttttgtataatcttagagacagggtcttgctctgtcacctggctggactgcagtggcacaatcatagctcactgtagccttgaactcctgggctcaagtggtcctcccacctcagcctcccacatagctggaaatacaggtgtgcaccactgttcctgggtaacagttggaagcttcttatctctttttagggtcttaacaaagaattttgttttatttttagaccgaggtctataactttttctgtgacaggcaagatagtaaatagataagactttgcaggccagaccatctctgctgtgatgactccactctacctttgtaaaagaaaagcagccatagacaatatgtaaacaaatgagyaaggctgtgtgccgataaaactattaaaggacactgaaattttcatttcatataattttttcatgaaatgatgtttgtttttccccctatcatttcaaatgataaaaaaaattccttaacttgcagttcagacataagtaggcagtagcctggacttggcccatggactatagtttgccaaccccttctttagaccatgtttttctgaggctgtcatagagttgatctttgcttanaagccctttcttaaatttcatgtcatttgccttctggagattaggagtcttcaaaaccatgaattcctggctccctttaaaaaaaaaaattcctccctttagtttcattctctcctctcttatttcactgtaatcagtaggatgaaaccagaatatacctttaacacttcgctggacatctccttagctagatcacccagctaattaggtacattttccattttccacagtacacacaatgcagttgacagtgttgctaaactttctaccaccatgtaacaaggattccctcttctccagtttccaataggatttaccttatttttctcttaagcccttacctgcaaccttctcaaagaccatatggtttctactaacagttttttcaaggtccttctagcttttgctgtgatcttagtctcagaagttatatgtcatcccatttggcttactctgtccattaaaagagtcactaagtccagctcacactcaagggatgagggaattaacttccaccccttgaaggaagaagtaacaaagagtttttggacaaattttaaagccaccacatggtggttaaatgataatcacttggaactgcctaccattttttatagagcttggtttcctaagaggcatatctgtcttaaaacctaacsaggttggtttatttaccgaaatactaaaagtttctctctttgatatggtctctaccactaagaatggttatttaggatatyctgttcacttattattttacgtagtacattacaaactttggcctggtcttcgaggaaaaaggattttaatattttcttagctcaaaattcagtattggaaactgccaagtaactttttgtcccagatcaaagagaaaagcatattcattcctaaatacagagcagatttatggtaatataaaaatttcatttcaaaagasactatacatatttataattaatttctacaactgatttacaattttaccagttactggtaaaattcccagtatcttagaagtcatgtggcttacagttttcattttgcctatgagaaaactgaggcctagtgaagctaagtgatttccttacttatacctaggtgtatagtttaggcataatttctgaaatgtagttcagagaatgatagaatatgattcatgcagctgtttgagatttgtgtaaaaaaagcttattgatcaagattttgcttctattagtagagttctatatgtagagttttacttattttatttctctatttataagtagagttttatattctggttgttgataggatagaattaaagttgtccaagattttttcttttcttgatttctggaaatttcccaaaacttgtttctttgtgatgcacatgtctacatatgtcatttcagtaaagcaaaacgaaaaaagaaaagggaggaagctgagaaactacctgaggtgtctaaagamatgtattataatattgctatggatctgaaagaaatattccaaactacaaaatataccagtgaaaaggaagagggcacaccctggaatgaggactgtrgtaaagagaaacctgaggaaatccaggaccctgcagctctgaccagtgacgctgagcagcccagcgggttcacgttctctttttttgattcagacactaaagacataaaggaaggtacttttcttttttcccatacttttttattttattcagtttgaacttaattgattgaatctgcattaagtgtaacagatttcrtgttagctgaagaaaggactctttcttctacctagaagatttgagatttagtgtcacaggagcataaacacgatgttcctgaagctgtgaaagaaactatttttgcatttaaggaagcaaatctctactagctgccatatgaagggaagccagagaataatgtacagcatcttttctgttaagtaaaacgtcatgaagaagtatagtaaatcacataaagagctttgtatcttaaatgaagctgaagatgctatgacttatggaaaactagtgctatatataagataaaagaagatataggtaaccttggttttacacaaatatgccatgtcatcaatatgccagttattgcacagtttatccttgaagatttgccagaacctagagagaagtataaacactagtacatacagttttgcatttcatttcaagaggcttacctctaaaggccaacatgggccacaggttaaaaaacacctgacctgttcctcacccagggttccagctttctggaagttcccactgtaaaagcaggtaatacctatacagaagaatacacacatacctaactacaatgattctactttaaagatcagcagttaaaatagcatacatgtgtttggtagattaaaataattttttttttttttttggagacagagtctctgtcacccaggctggagtgcagtggtgcaatctcggttcactagcagataataccaactccgtggtactttaaaaggaagtataacaatctagtagttgttcaaaaagtattgcaaataagacttcattttcttgtctatataaactgttgagtagagttggcatgatgtaaatagtaacgatagtttttctaactttgagagcaaaacgtgagaaattgaccttgaaacgagtcctaaagacatcagcaacttgaaagatgttttttaagtacttgggaaattttgaagacttgtgaggtgattgtcctgatcttatagcagtagtttttccagcagttctagcaaaaagttttgggtattgaaaatgtaaagatatattccttttctcatttataaatagacaagagggaaacctgatttccctgtatcctattatattttaggcttctcatgcaagcacagatgccatggttattttaggtgtcatttttaaaaattatatagctcatttataaacctttattttttaaaccttktttatattactgctgtccttatcagatcattctagcaatgccaaaattatgatagtggcttctgaaaatatttgaaaaatctaaaaagatgatactacctatttttttgatactattttaaattaatgattaacatattggaactttagatatgtctacgtggtaaaagtaatcaaatgaatgtgttcagaaatacttggctgtggagttacaatcccatcatcttttgttgtcataacgatatagagacctacagagttgaaacartgaaacctggaaagattgtctggcaggaagaccctcgtttacaagacagcagttcagaagaggaagatgttactgaagaaacagatcacagaaactccagtcctgggtaaacaatttgtttctttgcaggcatagttcataatttgtaaaatctgaattagacatactttagaaatattttagcttctcttcacatgacaactaaattgtcttagcttctttttttattttattttttttttttgagacggagtgttgctctgtcgcccaggctgtagtgcaatggcatgatctcagctcactgcaacctccgcctcccagattcaagcaattctcctgtcccagcctcccaagtagctgggattacaggcacgtgccaaccacacctggctaatttttgtatttttagtagaggcgaggtttcaccatgttggccaggctggtttcgaactcctgacctcaagtaatctgcccaccttggcctcccaaagtgctaggattacaggcgccctgccactgagcctggacatctcagtttctttagagtgttctctagcctttttataatggagagtgtgtttccttttccatgagatttggatagcactaaggggaagatagtttgtgcatagaaaagggaaggtggcctgacagtgaagtcactggtctggaaacaggatgttgcagttgactgggtgcctacccatgggaggcactggcaaatggggtagcaatggtgggagtgagagtatcagcaaccaacacaggaaagatagaggttctacttaaacaagtcttcattatcaaagcttcagatagaagaatgttagagggagggttgttttaactcagggcaaaatgcacaaaatacaaagcagatatatttaagagtctcgctcacctggattctagggggaaatgaaaaaagatatatttaagaaatagtgtatttatgttttgaatgtaaatatttcttcttaaatattgaaattaaaccaaccaatacctatttttctctctcctttgtccctttcttttcagagaagcatcattacttgagaaagagaccactagatttttctttttctctaagaatgatgaacgacttcaaggtcagtccatttttttcatcaaattacatacatagaacaggtaataatacagctacagtaattcacatccaggaattttgaccgttggtaatgtcatgtggtttaaccccatttgttcacactgatgaatgttaacttgtaaagctgtcaaggtctgagagctccccactcaccactttctttgcccgctcattctcatcaacaaagggttgttttgttccaagggcttccttagatgttagacatataaaacccctaagttttagtgccataaattccatgtgaaaactcaggctgttggggagctcatttcttaaagcctagcataaacaaagttacataatagtaaatgatatatataaacagtaaaagcaatattatatttttcatttggaaagaaaaaatactaatttttgaaaataggtagaaactgagggaaaagaatgatcttaactggtattcgagaccttgataatgccaacacttagaatattaccaattttagtagtagtttgctgcctcatctttcttctttytcccctaataggttctgacttattctggagaggagtaggaagtaatatgagcaggaactcttgggaggccagaacaaccaacctgcgtatggtgagtaattgtttctccatattatttcctaaaatagacatgttacctatctagaattacagtcctggaagggaactcatgaatggtataggtgaggagactgcagactggctcaattgagtgactggtctcagaatccagccaagcctattaagtaacacgaaagcatcagatttttaaagactgaattatagttcccattataaacagttaatgccaaaaatgccaatatcccctcttcatttcaaaagagcactttcaaaataggtttccacagccctgacagtgagaataacctgktttacttctatctactgaayatcttaaaaacaatttgtttattgctaaccaagtcttttttttttcctaggattgtcgaaagaaacataaagacgcaaaaaggaaaatgaaaccaaaataataaatgtcagctggttttgatactgaatgtgaacaaggctcacctaaggaaactgacccagaaaacagttttagctgacaaagaagaaatttcagagtgaaggaattttwaaaatctggctgacggaatatcattctggttgccatctttttctgtggaactcctctgcatttcttcctaagtaattacttcaaaaattaaattcaacttcttataaaggaagaacaagatagtccttgaaaatactttttgtatataatctctttgccctctatcctgagtaastaatggacatcttctcatgcaaggtttayatgaagcctttttwaataaatgagtcaaagcacttgtattttccagcctaggctttgtgtgaattataggctatttgaaattttatttctgattatgtcaaatacaccttccattttgtcatttttgtttaaactgataaattacaagtcaacattgagttttatacttgtgttttggtgaatggttaactgaaatataggacatttcagaccaacatcatataagagttctgtgaggaccaggagaggaagccaaatacagttatcttgtcattgcctctaggaattaaggaacaacatctagatgtacaccaatcccaaaattctagttagactaaaagcttatgaaaaataccaagtgcctgaaagataggtagtcacaattaggagtcaggaccctgagcccaaatagggaaacagatttaacattacattaaataaaccaacctgcctagatttcaagacatacgtctcctatcaaaatgggctctgtatgaaatagtattacataggccgggcgtgatggcgcacacctgtaatctcagtactttgggaggccaaggcgggcggatcatgaggaggtcaggatttcaagaccagcctggccaacatggtgaaaccccgtctctactaaaaatgcaaaaattagctgggtgtggtggctcacacctgtaatcccagctgctagggaggctgatacaggagaatcacttgaacccaggaggcagaggttgcagtgctgagatcatgttgctgcactccagcctgggtaacagagtgagactccatcttaaaaaaaaaaaaaaaaagaaatagtattatatagttccaagggactatcattaagccatgatgtgtgtacctaaaattagtatttattgatttacctatgctgaatataaactcttaactgttgggatttcatctggtgtgttaaccattatgaccctagggcttatgctctatgtttttttagtaagggtccaaggaactaaataacttgaagagtaattctggattcctaggtttccaaaacttcagacttcaaggagagtgtggacaactaagcagcaggataaataattcacactttctaccttctcttgatgtagatcacatttgtaccttattttctattgctgcatagcaaatcatctcagtaacaatcatttattttatgcacaaatactgcaatttggtcaacactcactagggactgctgatctgtgctgtgtgctttcactggggtggttcagctagggctacgggatctgtttctaagatggcccactcagtgcctgttcatgggcttccttacagcatagcaaaaaagctctaggagcaagtgttctcagaggcaggaagcagatgctgcctgtctcttaaggcctggcccagaaaccggctcagtcacttcactgtattctacaggtttaaactgacacacagcccaaccagactgaaagggaggggacacagatcctcacttcttagtgggaggagtgtcagaatgtgtggccgtaatttaaatccggcacatgtttcacaagcagacaaataagtaacatcaagtagccttgcccaccccccagttcctgctccccagatgaaaccaccttcagcaatttaatttctctagtatttacctccatgtttctacctaacatgcttatgctctgatttcttggtttttcacttccagacactacatattctgaaaaggtgaaaaaattattcacctcttcagtccaagtaatatattttgactacagttaacttttttgctggaattttttcatttgcttaactttttctagacttagtcttcccataccttccaactgtgggacatgatgaggtttctcttcaaatagcctgatcaatcctttattctttaattcacagtgcccccctcttccctttttctcctctttcctttctgcctttgttacatgcctagacaggccacagtaccaggcgttatcagtaccagctcgtattccttatccgaagagaagactagctctctagctcattacagacagcccttccccctttcccctctctcttacgtgcccaccttatctaaagaaagttaaaatgtttagccaactgtggttattttagattgtgaggcccaactccggccaatggagaaagggtacaggggcagggtttgtgtcagggataaaggttctcgtgcccctttgttctggtgtgctctcatggtgactggccaaggagaagcacccctctgcgcagaagtaaaattgctttgctgaaaatcctttgtttgaatgttcaatttccttaggattttgagcattatttccaacacaacagtactattaatataaatgtttctcaatcaaatttttaaataattagacttggcctacctcacctttgtccaggagccctctgtctggctctatctgggctctctggataggtgacaaaaatgaactgaacaaggtggcaacgtgaggaatgtgaaaacttcaaacacattccaaatactttcagttaattaacaagatttgcagctattaaattatgtacgttatgtgagtatagtcagaacactgagttacccatgatggaggacatgaaaccactttaatccttcacacagggccaagacggtaagtaaagttaaatatatgctgaacagactatcaaaatgttcctaaacttaataagaaactgcattctacctattctaggccagataaattttttatatccctctaacggatacaataggcagctacggaactactcccaatttggcaagatccagaatttcctttagaggctctggggccaaagcccgaggcctactgccctttgcaaggctccagattttaaccagcagatcagtaaggtaccaagccgactcatagcaatgataataagtatgcaggccgggtgcagtggctcatgcctgtaatcccaacagttaaggaggctaaggcaagcagatcgcttgagcccacgagtttgacagcagcctaggcaacatagcaagaccccgttgctacagaaaatacaaaaattagccgggcgtggtggcgctagcctgtagtcccagctacttggccagggatgaggtgcgaggatcatctgatccggggaggttgaggctgcagtgagccatgaccgtgccactgcactccagcctgggcgacagaatgagaccgcttctcaaaaaaagaaaaaaaaatcgtttgtgcaatgttttcattaccggaaacattttaagtaaaatacaataaaacttttaaatctggttgtcagacccttccttcccttttgttattatcgtttcacgtagccatttatgataggagaagcggctttggggtcggcggctcagggcccaaaagtataattattaaagccacctctccggaagttgctgtttgtcgttatcaatttaggtacgaagtgtccagtcagataaatactgacaaaagcaaacaagatgaagaacatgagccccgacctcggcgccccttcccagtgggccgtcacctacccggaggtgcccacaacccgagtgagacctcggtctacactactgcaacggatacaagcagcacgcacagcgccgccctcagcgctggttcgttttccacgtggaggcgcaaaaccagcaagcaccactgtcgcaccatccgagccagtgggcgcaatcatgtccggcgcgaccaatcggcgcctggcttgttggcaggtgtcaggcagcgcgcactgattggccggtgcggagcctgtctccttcactggatcccgcattttcagcgcgttgcatcacctccgtgcgcccggttgcagcgtggacgccggatgagttgcttttaggcttgctggcccgcggggctgtccaggcacgcgaggcccctcaggtacgccctctcttccctgcaggatccggccctcaaagacgagggtcacgcacgcgttacaaccccgaaacagtagcacaagatttaatttttaaaagagcgtgtttcttcggggcttgccgttcgttcgtttccagcctcaggaatttatggtcgcctttttgaatgaggtagtgtttgaaatgagtaaaatctttttaaaatgatatacatagtataaattgatatagctgtgactttatgtataggcaatacgtatttttatatgtcttaatttattaccttcaatggctgcgagatacttattttattgatgtaccgtaatttacttcagtcaccatgaatatttagattgttttcagttatttgcctggagaaacaattattcggtgaatgtcattgtatacacattttgtacatttgcatgagtatacctgtggagtctatgttaataggatataactaaattgaggaaacgtttgagacggtcccactttcaggttacatttgacttaatagattatgaagacctgagaataaaaggagaaacagaaatggatttagaggagaatgaaaagggggaacagaaataggcttataggtaggatccacatgacttgatgattaattggttgtgtgtatcttctgagtagtgtcaggggtgactcaaaaatgtcatgcctaagtaatgggaagaatattggaaccactaatacagtagtttaaaagggaagcaattctggaaggaattatgaaattttaaacaaaacatggttttagtgtgcgtttctaaaatatattgaggcaaaataatatgaagtaatgtgaataatatgtagttaatatcagggagggtggtctcgaaattgctgaacgggaagttgaggttaaggtgacctgaaggagttgtggagcagcgaagagtcaagggcctggattataataagagggaagcaaaggggatggcatccctctgcacaacaaggttgttgtgcaaggttaacctgctctgtccctgccctgtggttgctggatgctgttgtgcatggacagctctccagtggattcgatgggccatagcaatcctgtgatttatgcatggaggctgcttctcctcagcagctgccatagcccggtcgctggtacatgattcttcctgaatagtcaatgctgttatactgagtgtttatgcttgacgtaataatgcagtgattcttaatctttggggaaagtagagactccctaaaaaacacagtaaaagctgaatgagctggccaggcatagtggctcatgcctgtaatcccagccctttgggagcccagggcaagaggatcgctttagcctaggagttgaagaccagccagggcaacatggcaaaaccctgtctctacaaaccaccccctccccaccaaaaaaaaaaaaaaaaaaagctgagtgtggtggtgcacacctgtagtcctagctacttggcgggctaaactgggaggaacacctgaacccagggaggtcaaggctgcagtgagccatgattgtgccactgcactccagcctaggtgacagagtgagccactgtctcaaaaaaaaaaaaaaaaaaggaatgatcctcttctcagaaagcttaaatcttattttctcaaaaataaaaattcagatagatattcctgaataattgttagaacagtgcaagagtggtgatgttcagactttgatgtgaatgctcatcccctagggatcttgttaaaatgcaggttctgactcgtaggtgcgaggtgaggctggtaagtctgcatctctaataagctcccatagatgtgggccatagtaggaccagccttgaagagattagaatgtgttggtatctaaaggtctgttagtcttcagataacaatcccataagtttcagttggcctctgataaggtacacaatgaacctaaataaatcagtaaatgcacaaacacttattttggtccttgaaaggctagaggttataataagagttgaagatctaaaatgccttaaaccttctgtttaataccttttaatggcatactgtgatcagaaatagctatttcagttagttaaacagcccaactgttcttgtcctgttttttcttaaattaaactcagaggcactcacacatctgaaaaattaatgagggtaaaagaaaatgaaagatactacttgtcacagacttttttttaaatgataacttgaatcaataacttgattagactatgatgcttttgatgc

SEQ ID NO: 96722 - DNA, 12531 bp, Homo sapiens
aataaagataaaattccattgagaaatactccaatcaattttcacttatatttaactagaaacataaaatgatgcttagaagagtaagtttaggtaataaaattgaagaataaaaaagcatgaattactgatatataactgagacatttgtgaaggttgcagggcatgtaaataaaatgtgtcaccaatattgagtgaaagtttgttgtatgacaaaaacaaaacagaagccaaaaacaaacaaacaaaataacattattgcttaactggtcaaaacaatgctgaaatctaccttacccgtcagaagtctcccttagaatatttatgttaatacttgcatttcacctgctcaatataaaattcaataaactcatgtgatttttgtggtttttgtagaaagacacagtgacagacacatgccacaaaatcaaaatttatattctgactgagcattttacattccctcacttgtaccaactgcattgttttataactctttctctattatctttaatatttcattttttaatctaaatttcagtatcccacttgtttaaattaatcaaattgacccaaaaggccatccaatagaatgcttggctgtgttctaaaaagagctagaaatagaagataagttaaatatatagcattatgtcatataataattttataaatatgtttttcattaactattcctccattcatttagcacaattttatttaaaacatttccacattaatcttattaagttctcattctgttcaaactcatataagcataatgttctgcttttagttagcatgatttattattttcttattttttgctttataaatttaatttctaatataggacagacctattaaaaacttgtgtttcagctatctgaagtctcctacattaaatgaataataaatatgatgagtgaatttaatagtacaaaagaacaaacattctatgaatgcctactatgtttcagacttctttcccaaactcaggatgtggggatcaatatgatgattaggatgaaaacagagaagtacactgttgcaatggagacacaaataagggagtcgttaattttgccatgagaatatttagatagttcataagaccttgttatagattaggcttgtactcatcaacaaagctttcattagcaagtgaagacttagctgaggcttgaaggatgagtagaaagtaaccagtaaataaggcattagaaatgttttctcagcagagcatggctcatgcaacaaagcaagagaaaacagggtgaattgtagctgactagcagtttgaaggaagaggtgagtggtgaaatatgaggcttgaaagggaatcagagccagataagaattaatactttgtccccaaatttctagacatagtgacattttttaaaagggatcaatcagaacatatttgccttttagaagatactattgcctgcaatgtggagaactcaaaggttatgacccaagacagagaaatatatgaggtgcatttttattaatccaaagtaaaaaaaaagatagtgactgaactatgatcctaacaatgggaataagaaaaatgaacaaattctaaaggtggtaggaagtagtcaacaaaatttggcgattgattagatacaggagattgagggaaggggaagtctataaatgaccatctagcttgagcaaatgaatggatggtaaggtattaaatgagatagtgggtgaaagggagcaaaaacaaggctcatttggggcagttaggaagacaatgagttcaattttaactgcattgtgaatgagccgtaaagtttcactctagacctgtttaagaaggatgggaatggcatcactggaaaattctgaggatccactgggtgacagatgcttggagtacaaaaggtgtatacaaaatgtaggtggagtaagagggcattgagatcaatttggcacattttacattttctcaagtggctgatccagtaggatggtattatatttaaatcaactcagttgaggaatacaagtactctgtgaaagtgttctaataagaatgctcagcatttaggtaggaaataatttcaacacttagcagtattcagtgctcacttcatgatcaagacacaggctctttgtttatgagtaaaatcagatgccctccatagtctggccctgacccttccttgatctttatcctttgacaagtcccttgacttcttcagtgtgacaataacaataataaattgtggccatacagcctatctctgtgggtattgaaaggcttgaataaatagtgtgtaaatacttagagtattgcagaactaatgcctggagtatagaactgaaaaatgcctcatatagtgcagaactgaaaagtgtaagttttttaagggtttatgttctttccccacaaaatatctcttctgcttgaagtactaaataacataaacctatgtcctttttttaaaaaaaaaaaaacgtttgcctaattcattcagcaactacttccttggcatctaccctgtgtatcctgtgtactgaatgatgttgcatgttatcaaggagccccaaacaatgtgaaacatattctctgtctgggaactacttcctatatagttagtaatatatgtcttgcaaagataaaacaaacaaacaaaagaataaaaggccatttatggaggttaaagaaaagtatggtgaaagaaatagtggatcacttctgtgacaagactgggttgctaccgtttagactgatcattgaacacatttctggttgcctacagcacctagcatataggactccttttctatagccactgctcatataaaagagccatgcttgtagttcctgagatctggtttaaattctgtttccattaatattagcatcacaactatgggcatatcccttaacccctgaaaagaagttctagttctgaagtaaaggttacaattaggttggtgcaaaagtaatggtgaaaccacaattacttttgcaccaacctaatattatttatgacatggcattgctagataatgtgaagtccctattgtagtggctggcctataataaaaacccaataaggggtggttactagttgtaattttaaaaacccagcaatactcattttattacaaataaattttagaaatactacctaattaagtactgtgagttgtccagacttgtgagttggacaatattcttactttgtagtgaggaaaatacagcttgttgacattattttcagacaaagaagcaagaagttcaagagcttagagaaagaacaatgtccacagaatgactttggtaattgtgactcactaatcatacagattcaagagagatatatggatttcattggatatcattttcatatctgctaaacttatatgaaactaagataaagtgaaaatcctttgagctcatgggcctttagatctagaataagagctatttctatagaaaaaatacagaattgaatgaaatgtaattctgtggtaggttaatacagactcttggttaatgtgaagatttggtaatgatatgactcaagtataaggatatcatccaaatgtctgcccattttaagttagaagggttttcttagatcctataataaacatgggaagtttcatcggaatcccagataaggatccattgcttgttggccaatcaatacattctggtctttaagaaccagaaaagtaggctgggcatggtgactcacccctgtaatctcatcactttgggaagcagaggtgggtagatcacttgaagtcaggtgttggagaccaagctggccaacatggtgaaaccccgtctctactaaaaatacaaaaattagccagatgtgatggtgggtgcctgtaatcccagctactcgggaggctgaggcaggagaatcacttgaacctgggaggctgaggttgcagtgacctgagatagcaccactgcactccagcctggttagcagagcaagaatccatctcaaaaaaaaaaaaaaaaaaaaaaaaaaaaagaaccagaaaagggaaaggcaaaccccaaaaattcatgggaaagtaaccaaaactgtgctggtgtcataattgtttcattttgtacaattgtttgttttttttgttttgtttttctgtttgtttttttgccttgagatgaagtagaattaagcaacaaaatgcttaagagaatcacattcatgatattattattattttgccattgttgttaagccagctgtgcatatttaatatttcaaatatttgaaatgttttggagaatttgacatattaaaataacaggtcaggcttgctactccagtttaaaacatgcaattgtgtaatcttacatttaaggtttttatttaaaatctcagtaagtttatgtagagtattagaacatcattggtgtaggtttattctattttttaaattaattgagaaaacttcataagaattgtttaagtactcaaagaacttttcagccaatgtaagtatttaatgagtgaaattgaggacactgaaattacactgtagcttaaaatgtttaaaggatgttatgtttctaaatggtaccaaatattagtgaaatacttcccatataaaaaggatattttcccccaagaaattyagttatgtgcactgatcaaattttatttctacattgttgaaaaagaaaagatcttaaattagacaatttgaagctttcatcttgatggttagatatcttttttagcaaaaaggaaacataaaaatatgtctgcagaaagatcattgaactcttgactatcactcagctgagtgaaatgacaactggtttcccagaagaggtcttaatatcattaaaagtttatctgaaaattgcttaatcagtttatcaggaatgctaatttcttcccagaaggaggttatgatttaaaaggtctgtcccaggccaggtcggggacaattttctctttacaatttttttaaattattaactttattaacgtcttctagatttatacatgagaaataaattttgtgatctacttctaattctagtagttactaaaaatcttgattttttgttttccttttttttcttaaaagaaaaccatcttcagattagacttttagttacacaaaaatcaactgcaaatacacttccagcccaaaataaccacaaaaatttatcaagcaggatttcctgcttatacagatttttgtatatgtatgtttacacatatatgtacatatatacacatatataatgtttccatattaagtgtgattttgttatggcttgctgtaaaatacacacatatgcacaggtacccaggctcattggactaaagataaaagatcagatcctatacaaggaaagagggaagaagcaggaatcaggttattacctctgttcctttcctaataattaaacctgacatgtcacataggttcaaacctacaaacaataacaagcaaaatgattagtataggaaatattaggctatcccatccccatttgctcccaaatcttccatcttgttttcctagtccatcatttatctttgttccctaactttgatgtcaacccctcacccttcaggaccaaaacattcattctccaaaacattcatcgccgagaatgctggggactagcctctctcagtaaatatctgtccctagtctgaggtagatttatgctcccctccccaggaacagcttgtgtctatggagatgtgcccagtgcaaagaactgcaattggaaggcaattctgaaggaccaccctgctgggagctctctgcagttgactgagaagtctttgaaagctcatcttttcttgtcagcccagtcctgcttccttctcctcccgccacacagactgtgttgatttcaagagcatttcccaatacctcctgcacacaaacctccacctgagtctgcttcctgcagctatgaacttcaaagaacgcatgggtgaatgatttggaagcctgccttctaggagaaaatcggtctttggttactgaccaaagccggggatgaaggtaaagcatttcatggtaaagggatcaggaattctaaggcagctacgaagtagctggaccatttcctttatctcttccccagcaccatagatgcccaagaaattgaaactgtctgaactatcttacctgctattatcttaattttaattgccctcccatccctatgtattctgtatttaacagatgaagttaataatccttctaataccatcaaaacaattggccatcaatgatattgaagctatgaatgtacagactataaagaactaggctttgattcttatataatcccaatagcagacttaaaatcaggagaacttccactcctcaaagttgataaccaaacaatcctcccaatagaaattcctatccaaatattaatttcatctgaagatgtcctgcactcatgaactctcccttcactgggcctcaaaacagacgcaatctgtggacgcctaaatcaatccaccttaactgctacacgaccaggcctttaccacagataatgctcagaaatttgttttatactatcatccaagaattaattcccttacaaaatttcaaaacctgatctacatccatactataacatcactgtaaagttatccagcattaaccttttaagttaaagactgagatgatctacacctctctacagtgaatgcctcaactagatacttccacatgattcattgttacccagtcaataatcataacttattctcgatcattcagttaaaattatcaagtttcatttaccatgtatctcctacaccaaaaataatcaaaacacaaaaacataaaaactcctgagaattaaaatgaatgaaaatctattcacctcttttattaccccaacaattctaggcctacccgtagtaatattaatcattttattccccaccatgcatttccaacctccaatcacctaatcagtaattgattgatctctatccaacaatgattagttcaacttgcactaaaacaaataataactacccataatattaaaggacaaacctgatcccttatgctgatatccctaattctcgtcattgcctcaaccaatctcctcgggcttctaccctattcatttacaccaactacccaattatcaataaatctaggtatagcagtccctttgtgagcaggcacagtaatcacaggcttccgctttaaaatcaaaacctccttagctcagtttttatcgcaaggcacacctatgccacttatccctatactggtggtcattgaaactattcacctatttattcaaccagtagcattagctatgcgattaacagccaacattacagccggtcacctattgatacatttaactagaggaggcacactagtattatcaactattagtatcaccacagcttcaatctctctcattattctaatcttactgaccattctcaaatttgctgtagctcttattcaggcttatgtcttcacactactagtaagcctttatctacatgataatacacaatgacccaccaaacacaagcctaccatgtagtcaaacccagcccctgactactaacaagagctctctcggctctcctaataacatctggcctggccatatgatttcactttaactccattactcttttaacgttagatctactgaccaatacactaactatgtatcaatgatgacatgatgttatctgaggaagtacatttcaaagccacgatacaacaattgtccaaaaaggtgtccgatatggaacaattctatttattatctcagaggtacttttatttgctggtttcttctgggcattctaccactctagtctagctccaactccagagttagggggatattgacctccaacaggcattcttcccctcattcttttagaagtacccctcctgaatacatctgtgttacttacttcaggagtttcaattacttgagctcatcacagcctgatggaaggtagtcaaaagcaaataattcaaaaactagctgtcacaattaccttaggcatatacttcaccctgctacaagtttcagaatacttcgaggccccttttactacctctgattatggctcaacgctcttttttttttttttttttttttttttttttttttttttgagacagagtttcgctcttgttgcccaggctggagtgcaatggcatgatcttgggtcactgaaatgtctgcctcccacattcaagcaattctcctgcctcagcatcctgagtagttaggattacaggtatgcaccactacgcccggataattttgtatttttagtagagatggggttgctccattttggtcaggctggtcttgaactctcgacctcaggtgatctgccaacctcggcctcccaaagtgctgcgattacaggtgtcaacgtttctcactatctgcctcctccgtcaattaaaattccattttacatctaactaccactttggctttgaagccaccgcctgatattgacacttcgtagatgtagtgtgactattgttatacgtctctatctactgatgaggatcctactcttttagtataagcagtaccattgatttccaatcaataagtttctataatatccaaaaaagagtaattaacctgacactagccctagtaactgacaccttactggccccaataccaacagttatcacattttgactcccacaacttaatatttatatagaaaaatccagccctcatgaaggtggatttgatccattaacctccgcccacctcctcttctctataaaattcttcctagtggccaccacatttctcctgttcgacttagaaatcgctctactcctacccctgccatgagcccttcaaacaaacaacctgacactaataatcagcacagcccttatactagttaccattttaatcctaggcttgacttaggaatgaactcaaaaaggattagattgagttgaattggtaaatagtttaaattaaaatgaatgattttgactcattagattatgatagaccatatttaccaaatgccctttatttatatcaatattatattagcatacaccatagcacttctgggaatattagtctatcgatcccacctaaaatcatccctattatgcctagaaggcataatattatcaatattcattataattactcttataactttaaatatacatttcgctctagcatccacaatacccattattctcctagtatttgctgcctgtgaagctgcagtgggccttgccttactagtttcagtctccaacatatacagcctagattatgtacaaaatctaagtttacttcaatgctagaagttattattccaaaaattatactgttaccaataacatgactctctaaaaactctatatgccgaattaacatgactactcacagcccattcatcagccttattacgctactatttttaaccaattaaatgataactcatctaacttctcattaatcttctcctctgaccctctaacttcgccccttgtaatctttacaacctgactactacctcttataattctagcaagccaatatcacctttccaatgagtcacccccatggaacaaactctatatttccatattaatttccctacaaatttttttaatcatagcattcacagccacagaactaattatattttatattctctttgaagccacacttattcctaccctaattatcattaccygctgaggtaaccaatcagaacgactcaatgcaagctcatatttcttattttacacactagtagggtcccttcccctacttgttacacttgtccatactcaaaatacctcgggttctctaaatataactgtaataatatttaccacccaagaactattaaactcctgttctaataatcttatatgattagcatgtattttagcttttatggtaaaaatgcctccatatggacttcacctgtgactccccaaagcccacgtggaagcccctattgctggctcaatagtacttgcagcagtactcctaaagctaggtggccacagtattatacggcttacccttaccctcaaccccctaacaaatatatagcctaccccttcctcatactatccttatgagggatcttatgacaagctctatttgtctatgacaaactgatttaaaatcacttatcgcatattcctccgtaagccacatagcacttgttattatagctattctcattcaaaccccttgaagctttacaggtgcagtcacccttataattgcccgtggactcacttcatccttactattctgcctagcaaatttgaattatgagcgagtccatagccaaattatattacttgaggccttcaaacactgcttccactgatagcctcttgatgacttttagcaagtcttactaaccttgccttacccactgctattaatctagtaggagaactcttcctcgctatggcttcattctcctgatcaaacatcaccattatgcttataggacttaatatactaattacagccctttactcctcacatatgctaaccacaacacaacgagggacacttgtgtattacattaacagtattaaaccatcctttacatgagaaaatacattaatacttatacactttgcacctatcttcctattatccttaatccttattattatggggtttgcattctgtaaatatagtttaaccaaaacattagattgtgaatctaataatagaagcctgtaacttcttatctaccgagaaagtatgcaagaactgctaactcatgcccccatgcctaataacatggctttccagactttcaaaggataagagctatccattggtcacaggaacgaaaaatattggtgcaactccaagtaaaagtaataaacatgtattttaccactactataacaaccctaatccccttaaacttaccaatcattactaccttagccaacccctgcaaaaagattcatacccatactatgtaaaaatatctattgcatgcacctttattatcagcctcatctctaccacaatatatatatttatagaccaagaataatctcaaagtgacattgaataacaatccaaactcttaaactctcactaagcttcaaactatactatttctccacagtatttatcccagtagcgctatttgttacctgatctattgtagagttctcaatatgatatataaactcagaccctaatattaatcaatttttcaaatatttactcattttcctcaccaaaatattaattctaattactgccaataacttctttcaactttttatcggatgagaagatgtgggaattatgtcttttttactaaatggctgatgatacggccgaacagacgctaatctagcagccctctaagcggtcctgtacaaccgcagaggcgatattggctttattttagctatatagcatgattcctcttattctccaacacatgagagcttcaaaaagtatttattctaaatcctacctccaatccctttccattaattagtcttctcctagcagcagcaggaaagtcagctcaatttggctttcatccctgacttccttccaccacagaaggcccaactccagactcagccctactccactctagcactatagttgtagcaggggtttttctacttatctgcttctacccttgaatagaaaataacctattattccaaaactttacattatatttaggggctatgaccaacgtatttacagcaatctgtgatctaacacaaaataactcaaaaaaatcataggattctctacctcaagccaactaggctttataatagtcacaattggcattaatcaatcacacctagcatttcttcatatctgcacccacagctttttttaaagctatgttatttgtatgtttaggacccatcatccataatctcaatgataaacaagacatctgaaaaataggaggactattcaagactttacccttcacttcctccgcccttattattggcagcctcacacttacaggtgtgcctttcctcacaggcttttattctaaagacctcattatcgaaatcgcaaacatgtcatattccaacacctgagccctttctattactcttattgtaacctccctaacagctgtctgtagtacctgaattattttctttgctctgataggacaacctcacttcacaactctgattcatattaacgaaaataaccccttcctaattaactcaattaagcatctaataattggcagcatcttagctggattcctcattaccaatagtattactcctacttcatccccccaaaaaactatgccacttcacctaaaactcacagccctaggtgtgactgccttaggcctcttactagcaatggagctaaattttataactaacaaccttaagctaaattatccattacagacatttaacttctccaatatattaggtttttactagccacaatccaccatacaaccccccacctcaagtctattt

SEQ ID NO: 96723 - DNA, 67674 bp, Homo sapiens
tgtgaataaattttagcacttatattattgctctataataggtcatgtgaaagggttaacagacagtaaaagacaaagtttttttttttttttttcgggagcttcattttattaatagtatatcttattaagattcttgctttttacagaaaagttgtaaagattaagaaaaaaaattctggccgggagcggtggctcatgcctgtaatcccagcactttgggaggccaaggcgggtggatcacctgaggtcaggagtttgagaccagcctggccaacatggagaaaccccgtctctactaaaaatacaaaattagctgggggtggtggcgcatgcctgtaatcccagctactcaggaggctgaggcaggagaatggcgtgaacccgggaggtggagcttgcagtgagccgagattgcgccactgcactctagcctgggcgacagagtgagactccgtctcaaaaaaaagaaaaaaaaaattcttgctttaatacatatctttttcagcaagtctcctgatttaaagtttttcatccaagtataaattagaaaatctaaactgaaataaacatagtctttgaaatagtaaaatcaattattaatagagaattatccgatttaagattataatggtcatatttcacatacaaatattagtttctggagtagggggtgcttaaccaacagaagtggtaatagtgagttttgctaagttaaaggtacttctatatggctggtggtagttgtatgggatgataccaatgatatactagattgtcagggccatttccaagatataattaatttcaaaatcatatttgcctttaatgtatttcacaagaatataataaatatgagcatcttgaaatcctttgaaaacttgtatagaaaggtaacaaattgcttttactgccataaacactaaaaaaacctatgtagtatatatcagtacataagtatgatgataatgatgaaagactatgtcttctataaagggtcatagatacattaaaaaatcttttttttgagacgtagtcttgctctgtcacccaggctggagtgcagtagcacgatcttggctcactgcaacctctgcctcccaggttcaagtgattctcgtgcctcagcctcccgagtagctgggattataggcacttgcaccaggcacttgcaccaccacgtctggctaacttttgtatttttagtagagatggggtttcaccatgttggcctggctgttctggaaccctggcctcaagtgattcgcctaccttggactcccaaaatgctgggattacaggcgtgggtcactgcgcctggccaaaaaatctgtcatgtatcagttatttatcactgccacaaataggaaggtttttgcttctagtgcacccaaaatttgtcaacaagattaaattaagcagttgctagtaactttgtataaaattatagagcttagtgcataaggaacatactttacaaatatgtaagaaatgtatttatacatatgcagcaaatttcatttctaggactcaaaaacagtcaactctcatttatccacatgcagtttccactctatcttaagggataatttttatttttttttgagacagggtcacctttttttcaccaggtgacaccagggttgctgtcacctaggctgtcactgcagcctcgacctcctggcccaagcaatcctcccacctaagcctcccaagtagctgtgaccacagaatgccaccatgcccagctaaatttttttgtagagacagtgtttccctatgttgcctaggctggtctcagaacttctgagccaagtgattctcctgccttgacctcctaaagtgttaggattataagtgtgagccacatgcttgtccttaagggagaatttttaagactcaggctgctatcactaatataataattaaccattcagaaaatgtgacgttttcctctcaatctttattattattaattttgagatgaagtctcgctctgttgcccaggctggaatgcaatggcgcaatctcggctcactgtaacctccgcctcccaggttcaagcaattctcctgcctcagcctcccgagaagctgggattacaggtgcctgccaccatgcctagctaattttctgtatttttggtagagacggggtttcaccacgttggtcaggctggtctcaaactccttacctcaagtgatccacccacttccgcctcccaaagtgctaggattacaggtgtgagccaatgcgcttggcctcaattattagcatttaatagaaattaacattaccctttagcaatgtagtctctgttgctggggaaatgctgttggaggtcaagtatacattttatgaataatttatggattatttgcagttttggatgtaatcttcattaacatgaaaataacttagagttgactacatatttatttttagtaaaggaatactcaacaatgaaccctgcttaaaaagacaaccctactataggaataagtagttgtctcctaaaaaagtgtggagatatgaaatgtgtggcaaataagtttattttttatttattgaccgagagggtctcactgctgtgcaggttggcataaaatggcgccttcaaagctcactgcatcctggaactcctgagcccaaatgatcctctgcctcagcctccccagtagctaggactataggcaagtgcctctacacctggctaatttttaaattgttttgtatagacagggtcttgctagttttcccaagagggtcttgaactcccggcctcaagtgatcctcttgccttggcttccttccaaagcagtgaggttagaggtgtgagccactgtgccctgccatgttgacttttaaaaaccctgtaataacttccaattgtcctcaagaaaaagttcaattcttttttttttttttgagatggagccttgctctgtcgcccaggctagagtgcagtggtgcgatctcactgcaacctctgcctcccgggttcaagcaattcttctgtctcagcctcccgagtaggtgagattacaggtgcctgctaccacacccagctaatttttgtatttttagcagagacgggggtttcaccatgttggccaggctggtcttgaactcctgacctcgtgatctgctcgcctcagcctcccaaagtgctgggattacaggcgtgagccactgcgcctggccaaaagttcaattctttaacatggccctacaaggacttttgtggactctgctccattttccactatcactgtattctaacaataaaagctgtttgcctagaatgctctttgactatacactgactaccactagcagcaatactacttttttttcgagatggagtctcgctctgtcgcccaggctggcgtgcaatgacgagatctcggctcactgcaacctctgcttcccaggttcaagtgattcttatgtctcagcctccccagtagctgggatcacaggcgctcgccaccacgcccagtaatttttttgtatttttgtagagacggtgttttaccaggttggccagactggtctcgaactcctgatctcaggtgatccacccgccttggcctcccaaagtgctgggattacaggcgtgagccactgcgcctggccaatactattaataatagttacaacctaccgaattcttattaggcatgggacagtttatatacattattagttatactttatgaagtaggtactattcttaatccaggtgtacagacaaggcacagagaaatgaagcaattaactgagaggaacacagctattaaagtgtaggcactttaatctgtttcaatccagatctgtctgaattcaatgatgttcccaaacttggaacatgaaaatatcaactttctccaagaagtctgacatgtttaatatcctctaatagcaaatgtgataaggttagcacttaagacactggtttacaacggacctgtgtacttgatgcctccccaaccggaagataagccatctgaactcacttaaggcggcatgttcacttttgcttccccagctccacagttaagtgtaccacagtttctggtacacgtaatgcgtgttaataaagatttgttgaataatcaaataagcgaaactgcttttaaacagaaagccataatacaatgttattaccttcgaatttggctagagaacatcaccaagcttaccagtttgtgatctagactccacttttccccatttttttcagtgtgctacttttgcttatatccattcttctgtgactttgtttgccacaattccttaaatacttccacccctccttttcataacagcgatctgccgtttgtgaacctcttttacagagaaaaactagaatgttacttttcctttcatagcaattctttaaaatttctgaaagcctttaaaagggtattagcgcaaacatcagagatcgctgaggttaaaactatcttttaaaaatgaatttcaccgtctcaaaaaaaataaaaatgaatttcaaatcaaggctaggctgattggagaaaagcaacctagtatatttataaaggtcttccagtgctgtctaagcagtgttgtcccaggtggcatcctatttttcataatttaccgaaggcccttggtaatataaatacagagaataacaggtgctgcactgagcagggggtctgtctaaatcaacctttttggctccattttttgacaaagggccaagaggttagcgtaatcggtccagtagttctcattaccttcgaggggaaggggaaagaggagaggggcgaagaaaggaaacggggagaggaagtgtggcaaatagaagatattcttcaggtagagccagggctcgggccgcgtccccaggtggcccctccaaacgaccgtttaccttgtcaattttctcttttcaatgaaaaaaaaaaaaaagacatctggctttttaagtaagagaatatacaaataaggaaggtatcaggtctcgtgagaattcggcgccagatccgcgtccggaaccccaccgagagccgccggtccaaccgccgatagctcgcggatgcccccgggggcccgacgccggccaggcttcccctagcgctcccgctacccataagccctcgcgtctcagcgcgcacgcgcagcggcgacggccgtctcaggaagaggaaaatggaataaacaactcggaggaaccagagcgcgagagagcgagtggaggcagaatttaaaaataaaccggcccctccgccttccccacccgcttgccgctgccgctccctcttcccctgcccgcgccctcgaagtccccgtctgggcccgcgcgctcaccccgtcgtcccgcgcggcccctttaagaaaagagaacgagagagtgagtgagagaatcccaactctccccctaccctccctccttctaccccctcctccctcccctctcccctcccccttctccccgggcggctccggctcccgcagcgggacagacccacccgcccaggcttttatccggcaccggcagcgtcttcctttcctcccccgtctatggtggtggcggcggcggctcctcgggcggcggcggaagacgaggctgcggcgttgccatgaacagtggcggcggcctcccgcccccctcggccgccgcctccccttcctcctcctcgctggcggcggcggtggcggtggtggccccgccgggggtcgggggtgtccccggcggggcggcggtaggagtgaagctgaagtactgccgctactacgctaaggataagacttgcttctacggggaggagtgtcagttcctgcatgaggaccctgccgccggggctgccccgggcctcggcctccatagcaacagcgtccccctggctctggctggtgcacccgtggccggctttccgccgggagccgtcgcgggcgggggagctgggccgccccccgggcccaagaagccggacctgggggacccggggaccggagccgcagccggcggaggaggcagtagcgggggactcgatggaccgcggctggcaagtgagtgtttttcgggcggggcgggccgcggcggcggagggcaggcctgggccggatgaggccctgctgccgacgggagctgagcacggcccgcgggctccccccctcacctcccaaggcggtctgagaggcctaggccgggcctgagccctccttccttcttcctgcttcccctccccactgccttcggcaagtcggagagcgcggggaggttgggttcccgggaacgtgggtgggaggactggggtgatgtgaagggggggcggggaggaagggggatgggctgtggcgtgcggagtgtgagaaagggggtgtcgtttccggggggtgtggaaaggggctgggtttgcaggcacatgtgttttgcgtgtccttgtggagtggcgtctgcagagtgttgaggttccctagtggggaggggtgtgtttgtgtgtgtgtgtgtgtgtgtgtgtgtgtgtgtgtgtagggggcgggaggtgaggggcgggcttaaggcttcgtggagtaggttgaaagaacggaaaaagtttgtagaaggcttgcgggagaaaggttttgcaggcaggaaatgctttctaaggattaggagggagcggactgtcgcgttcaaagtgtgctcaggtttaatcgagagtttagagtagggatttcacaaagacgcatttcatctgagtttccctgaaagctagaataagtttgctggtgtcagctgggatcctgtcttctatagctttgtatcaagcaaactcagcattgtgtcttgaatgcatgtcatgtgcagcctgcgtttatgtgcgactgagcacttgggtggggacatcttaaggctgtttatatttctttttcatgtgttgttgttgttgttgttgttgttgttttggagagagtctcgccctgtcgctcaggctggagtgcagttgcgcgatctcagctcactgcaacctccgcctcccgagttcaagcgattctgttgcctctgcctacggagtagctgggactacaggcgcgcgccaccacggccagataattttttgtagttttagttgagatagtagtctcgttgtgttggccaggctggtctcaaactgctggcctcaagtgatctgtcctcctcagcctctcagtgtgttgttatctattgacctgaagcttgttagttgttagtggagtttacaattgaatgtgagcgtaatctgttagagaatgttgcctttacgaatagagccggtgccagatgtccctgttttgtttcttagtatattgagcgtttctaaaccaaataggagtcctactttcttgggaattctggagaactagatcttaaaataatctgataggcagttcaatttgtacatgagaacattttgtctttttcttaaacactgttaatgaacctgataggaagttttagcatttaattggtctatgaggattatttaatatcttccccggggttttgctttcttgctttttctttcgagacgggatcttcctatgttgcccaagctggcctggaactcctgggctcaagcgatcttcctgcctgggcctcccaaagtgctgggattacaggagtgaggcaccatgctgggccaagtgttgttctgttctgttcttttctcctttctctcttctttctttttcttttatagaagtgtttcatttgttgtgatgggcttgactttaatgaagatatatttgctaaggctgataatgctaagaaaattaattttgtaaattcagatgttttgtaaaacaaatggttacttatgggtggaattttatcactttcgagcatcaactttgcattttcaggttaaasttttgctggatgtgtgagtcgtgactcagtagtaatgtttgattagtaaccaatgacactgaacaatagttttcttactgacagaaagagacactttttttttttttttttttgagacggaggcttgcttgtcgtccaggctgaagtgcagtggtgcgatctcggctcacagcaacctccacctcccaggttcaagcaattctcctgcctcagcctcccaagtagctgggttttacaggcatgcgccaccacgaccggcttatttttgtatttttagtagagacggggtttcgccatgttggccaggtgggtctcgaactcctgacctcaggtgatcgtcccgcctcggcctcccaaagtgctgggattacaggtgtgagccactgtgctggccagaaagaggcactttttaaaatgctggtgttagacttcataggtgatctttctaggattctctttttaaaaaaaayttttaaagttttatttatctattaatcttattcctgacagacagctctgacgatcattctaggattttctttttctttttttcttttttttttttttttttttttgagacggagtttcactcttgtttacgaggctggagtgcaatctagtgatctcggctcaccgcaacctctgcctcccgggttcaagagattctcctgcctcagactccctagtagctgggattacaggcaggcaccaccacgctcagctaatattgtagttttagtagacacggggtttctccatgttggtcaggctggtctcaaactcctgatctcaggtgatccgcctgcctcggcctcctagggattactggcgggagccaccgcacctggccgaggattttctaattaacacacaataggtagaagggctgagacttgaaagaggacaggatgtaagcagatgaagatgggaggggaaggtaagtacccttaaggtggaggaaaaaatattagcagtggctcaaaggtgggacatcttaggaaaataactgagatatagggactcgagaggacaggcagttaatgctgaaaaggtattttaaaattaatactttgtcacttgttagtaaaagttgtctgattaaatagttgatttatgtatttagattctgtggtgtttgctttagcttgtctggctgaagcctaaggctcctcttttctgtgataggcttcttggtatctctcagtaattccttatggatggagatttcttcataaggaatcacaacctaggtattactgagagataccaaggagtgggaaataatgttgctcaggaatcaggaaaaaaggttgtgttggtaattgtatggcttttttgagtttttacacttattgttcattttttagactgctttctaccttttactgtattctcattcagtgtgttttgagacagtattgatccgtttattttattttgaagagatgatgtcttgctgtgttgtccaggctggtttcgaactcctgggctctagcaatctcctgccttgacttctcaaagtactgggattataggtgtgagctaccacatctggccttcattggttaattatgtgtgtgaggcagttaaaatagatggcaatttttttttttttttttttgagacagggaccacaggcactggctaccaagcacctctaattattttgtatttttggtagagatgaggtttccccatgttgcccaggccggtctcaaacttctgggctcaaagcgatctgcctaccctgtgagccaccatatataccataatttagtgtttttaatttctatgtttgtgggttttgattgaatcatttgacaacaaaagaaacaaaagatttaatatagaagtacaaatttctggtttccctttaaggatgtctcttacctgtgttggaattagagctgttgatagagcataattctctccattttgactcattccctaactggatgacttttatatctaggcatttgaggttttgactctaactttagcacttcacatttgcagaattgtttttgttttgttggtgtttcagatagtgttaaaaccttggaggtgggtgcatgagaaaactttatctttattttgcagccattggaaaactgaagcacaaaggctttttcttaatacacttagttgcaatgatgtttcaaccttataaggaaactgcaatttgattttttgtttttgtttttgtttttgttttttttgaggagggggttgggagttcttgctgtgttgtctaggttggactccaactcctgggctcaagtgatcctagcacctcagcctcctgagtagctgggactacaggtatgccgtaccatgtagcttacktaacatttcgtatttctgttagtcttgggatttttctaaggcttaagagtgatttgatttgtattcaactgcattatcgattcttgacatttaatgatgtaattctaatattttcaactggctagattttcaaaatggctttaatcttcaaagtgtacaatttttaacaggtaaaatatgccaatatttgtattttatgtacattatttgaaacccagtagttttaatttaccaaaatacacttttcaattctcctaatgtagttactagtgaataagacatgtttcagatagaatcctggctctttgactagctttgtgactgaacgaatttttaacctttaagcctcagtttttctcatctggaaaatggagatgttatgaaaattgcatggcattgcctgcacatattgaggtttcagtcttagttattgctattattaaatattaataatctatagttaacctctgtatttccttcttcaaatttttgagggcatacattgaagactagtaaaatagctacagattattgaattgtgattgtccaaatggaggagagcagtgccatggataacttgaagttcaaatgttagctttggaatatgtaatgtgtagcgtgtggcaaagctgtttttgtttaagccaagactagccttttcatcccacaaacctatactaagtgacagagaagtgagtactggcgatttgctgttaggatagctggcataagtttaaacatttttattggaataatatacttagtatatcacgaaggctttataatactgttcatttcactcatttaatatcctgcttccaaggtggtaagctctgattaaggtgataggaacaacaacagcaacaaaaaaacataattcagccctaatggagtttacattctagtggggctataaatatctataaggtaatacttggtttcgataagtttttttgtttttttttttttttttttttttgatatggagtctcgctctgtctcccaggctggagtgcagtggcgcagtctcggctcactgcgagctccgcctcctgggttcacgccattcctgcctcagcctcctgagtagctgggactacaggcgcccgccaccacgcccagataatttttttgtatttttagtagagacggggtttcaccgtgttagccaggatggtctcaatctcctgacctcatgatccacctgcctcggcctcccaaagtgctgggattacaggcgtgagccactgggcccggccggtttcgataagttttatgaggaaaactcgagggataacgtaactccaggtgagattgagttaacaaataaagcactttttcctgtaaaagtgcatttgatgagatcgggcgtgttcagagtggtatgatcatagactgaaagtgcatttgaaatgaccctttaagaagataaatgattatcaaaagcaaaccaaaacatcatcctttttttttttttttttttttcctcagagcctcactctgtagcccaggatggagtgcactggcgccatcttggctcactgcaacctctgctgcccaggttcaagcggttctcctgcctcagctcccaagtagctgggattacaggagcctgccaccgcgactggctaattctcgtatttttagtagagatggggtttcaccatcttggccaggctggtcttgaactcctgacctcgtgatccacctgcctcagcctccgaaagcgctgggactacaggcgtgagccaccgcgcctggcccaatatcatccttttatatgccattttgaggaatttttcccccaattttaaatgaactttttattttgagataattatagaatcacccgaaattgtaagatacaatacggatatctcatgtactcttcttttataaaggatagtaacatcttttgtagctgtagtacagtatcatggccagtattgattgctgtagtctacttgtttacatttccacggtcttatttgcacttgcgtgtgtgtgtgtatgtgtgtacatattacagatcgtgcctaacttaatggtttggctttcaattttttgacttttttttgacaattttttgagacagagtctcactctatcacccatgctggagtgcagtggtgtgatctctgctaactgcaacctccgcctcctgggttcaagcrattctcatgccatagactcatgagtagctggacttacaggcacatgccaccgtgcctggctaatttctttgcctttttagtagagacagggtttcaccatgttggccaggcgggtctcaaactcttgacctcaagcaatctgctcaccttgacctcccaaagtgctaggattataggcgtgacccactgtgcctagcctaatttgtttttaacttttaatttttttttaaggagacgagctggccttgaacttctggcctcaagcaatactcctgccttggtctctgaagtagctggggtgacaggtggaagccaccgtgccaagctaattttttttttttttttttttttgagacagtttccctctgtcacccaggctggagtgcagtggcgcaattttggcacactgcagcctccacctcccaggttcaagtgattctcaattctcatgtctcggcctcctgagtagctaggattacaggcttgcgccaccacgcccagctaatttttatatttttagtagagatgagggtttcaccatgttggccaggctggtctcgaacccctaacttcaaggctgcctcagcctcccaaagtgctgggattgcaggtgtgagtcaccatgcttggccctcagtttttacatgatgaaaggtacacttttttggtaaaaatttacattggaatagaagtgtataaagtcaaaataaatcagtctcctcatcttattgtccagggttaatcattattaatagtctgtgtgtttagatcttttctacacattgtatggtatagacatatatctagtatatatattaaaatatatgtataccatatatacctaaatatatatattttttcctctttctctgtctctctctctctctctctctctctcatattagcttgggttgccaaaagaaaatattataggctgggtagttaacttccccctgcccctcctccccccatagatccaggaacttgagtggctaggtggtttaaataacagaaaagtattttctcagactttcagaggttggaagtcccagatgaggagttgggttcctggtgagggctctctcctggctatattatctaggtatgtgagcacccaaacctagatggtatagcctactgcatgctaggtgatatggtctataacctgttgcttctaggccacaaatttgtacagcctgttactgtactgaatactttaggcagtggtatacaaaggtaagtatttgtgtattaaaacatttaaacaggccaggcgcagtggctcacacctgtaatcctgatactttgggaggccaaggcaggcggatcatgaggtcaagagatacagaccatcctggccaacatggagaaagcctgtctcctaaaaatacaaaaacttagctgggcgtggtggagcacacctgtagtcccagttactagggaggctgaggcaggagaattgcttgaacccgggaggcagaggttgcagggttgcagcgacctgagatcgtgccactgcattccagcctggtgacaaagcaagactccgtctcaaaaaaaaaaggaaaagaaaaaaatagaaaaggtacagtaaaaatatagtgttacagttttatgtgatcaccgtcatacatttggtttgttatcgaccaaaacattgttaccaacaaatcaatatatgtttgtgtctcatttcagtacttagtaattagtactggaccgaaattttaattttattgcggtttcttacaaaataaaactagcctttggctagtcattcggtctgtgtgaaaatacatttctttgcagatggtccccacattttgaatttacaattcatttatcggaatgtagccccatccataagtctaaggaatatctagatttacgatgattcgacttccagtttttgactttaggatgagtttattcaggcattaaacgcatttttgacataacagtactgacttaaaatagttacatcccaataaaacccttgttaagtagaaactattgttaagttgaaaatgcgtttaattcacctaacccatcaaacatcatagcttagcctagcctaccttaaataggcccagaatgcttacattagctacagttgggcaaaattacctgacagcacagtatactgtatcagttgtttaccctcctaattgagtggttcactgggagctgtagcctgctgccattgtgcaactttgtgacatagtatgataccacgaatcactaacctgggaaaagattaaacctcaaaatctgaaatatggtttctactgaactcatatcatttttcacatcatcataaagtcaaaccatcatagtcagttgggaattgtctaagtaagggtatgcagatctcactaatcctggctgagtcagttggcatgtaggtaatagccctcttccctgaaaaaagctttgtcttttctgatacctcttttggcattctctctcttgctttttctgtaaaaaataaagatactgttcctatttttctaaagctagtttgatttttttttcttttctttttgagacaaagtcttgctctgtttcccatgctggagtgcagtggtgtgatcacagctctttgcagtctcgacttgctgggctcaagcgattcttctgcctcagcctcccaagtagctgagactacaggcataagccaccatgtccagctcctttttgaattttttgtggagatggggtctccctgtgtttcccaggctgttctctaactcctgggctcaagtgatcctcctgtcttggcctccgagaatgttggaattaaagaccaccacaccctgcctaaagctagttttaaattatagcgtgtgtgtttgtatatatatattttttagagatggggtcttgctcatttgcccaggctggagtactgtggtacaatcatagctcgctgcagcgttgaactcctgggctctagcaaatctctctcctcagtccactgagtagctgggactacaggcatgtaccaccatgcctggttatatatttttaatatttaaaaaaatgccagtgtcagaaaaataagaacaatatcttgtttttggaattagaaatgtaatacatgcacaggttaaaaatttaaatagtgcaaaagagtacatagtgaaaaatagcctccttccctccctagttacctgatccctgtctcccagagacactctttctagcttatttggggtagccactgacaaatattctttgcctatactattattcatatgtttatatttctctatgtctaacacattaacacacatatatacacatatgcatgagtgcacacatggaagcctaatgtactctgaattttcttacctaatggcttatcttgtagtttgttccacattcgcacatagaaatctactttattctttctcgtggctgtgtaaatattccattatatgtttatattattagattctttataatggatattttagtggtttatagtcttgctattacaaatgttggcacaaagttatgttttaatgtactatgtatatttatttacatatatatttacacaattatgtgatatatacttaaggagcatatagagtcttcagtaatctggttcacagttgatacattaaaaaaaaacactgtgtggggtgtggcgactcatacctgtaatcctagtactttggaaggccgagacaggaagattacttgagctcagaagtttgagtccagcctgggcaatgtagtgagactctgtttctactaaaaataaaaaaaattagctaggcttggtggtgcacctgtagtcccagctactcaggaggctgatgtgagaggattgcttgaacccaggagacctaggaggtagaggatgcagtgagccgtgatcatgccactgccctccagcaagaccctgtctccacaaaaaagaaaaaagaaactcactgtatttatataccattggttgaaaataagatacttgaaatattcattcatatctgccccggtaaaatttttctccccaatggctcacatatctagaaatagttacataaatcgcgtctttggtaacttaataagttcatatttgtaagtagcctagtagtcgctagaaagtttcatttgggtatgtaataaaattatattgttattgattatttactagtcgatctacattcatgttttgtttgttttgctttgtttttagaggtcttgctctgtcacccaggctatagtgcagtggcacacttgtagctcactgcatgcacccttgaactcctgggctcaagttaccctcttgcctcagcctccttagtagttaggtctacagggacaggcaaccacacctgactaattttttaaattttttgtagagatagggtcttgctgtgttgcccaggatggtcttgaactcctggcctcaagtgaacctctcaccttagttggccaaagtgttgtgctgggattacaggcataagccaccatgccaagcctacattctttatatagatatcttacgctgcttttagagatatcaaatacagcagttatatagttggaaaaagctggaaaggactttatatatctttattttaactttcttattttgctcctctaagtttactctgctgtaatactgatgttcctgaatttgatggtatacttgattgagagatgagatcacggtgaagaaggacaaaatggaatgagggcttttaaattccataagtcagtttttatggttcatagatgctgtgacaatatgtcagctatctctgaagcctccttgatacatgatgggacagggaatcttctgcctactcccaaaactttggaaaattagtaaggcagcatttaaagaaaatttttagcgaggtcctcagatatgatatatattataaaaagatttaatgtgggccaggcactgtggctcatgcctgtaatcccagcactttgggaggccgaggcgggcagatcatgaggtcaggagatcgagaccatcctggctaacatggtgaaaccccgtctctactaaaaatacaaaaaattagccaggcgtggtggcgggcgcggtgacgggcacctgtagtaccagctactcgggaggctgaggcaggagaatggcatgaacccgggaggcagaacttgcagtgagccgagatcacgccactgccctccagcctaggcgacagagcgagactctgtctccaaaaaaaaaaaaaaaaagatttaatgtatatataggtaatatctttgaaaaacttagattatgacaagcattcagcttagtgtaatttgggctaataataaatggagattaattcatttaattggttaataaacatttattgagtgtttactctgttaggtactgttttaggttcttaggatatcttagtgaaccaaatagattaaagaaaaatcccttcttttgtggaccttacctcttaatgggtaaagcagacagtatttataaatataaccccagtaattgtatagtatgttaaaagatggcaagtcctactaaaaacaaaaaggtaatagagtaagaggcaatgggagtgtaggaatagggttgttatagaatgaaatagggatatcaaggtaaacctcactggggttgaaatttgagtgtagactggagaatgatagccaagccagtcatcaggagaaagagtatctcaggcagagggatagaaggctaataggttggtgtggagtgaggaacagggaagaattaggatttttgcttttattttgtgtcaaaaggagtgatagaatctaaggttttaaaagagttctgtgggccaggtgttgtggctcatgcctgtaatcccagcactttgggaggccgaggtgggcagatcaccaggtcaggagatcaagaccatcctggctaacacggtgaaaccccatctctactaaaaatacaaaaaattagccgggcatggtggtgggcacctgtagtcccagctactcggcaggctgaggcaggagaatcacatgaacctgggagtcggagcttgcagtgagccaggattgtgccactgcactccagcctaggtgacagagccagactctgtctcaaaaaaaaaaaagttctgtggcaagagggcaagagagaatttaggagattatttgcagtaatccagcaagagatgatgagatgatggtggtttaggcaggttacagcattgaaaatggcaagaactagtcagatttcagacatgttttccaggtagagccaatataatttcacttggaatgtagggcattggagagaggagtcaagggtttgtttcaagagtgtggaaggttatggatggacttgatgccagctgagatgaggaaggctgcagacagagcaaatatgggagagcagatcaggagtttggttttgaacatgttactttgagagatatattagccattcaagtggagattttgaggagttaggtagatacaagtctggagttcttgagagagattaggactggagatgataaacttcaagtcttcagtgtatacttggcatttaaaatcatggaactgtatgagttcaccaaggaatatggcttctataagaacttgggaaacacaaatctattgataaatcagtaggctattttctttttcttaggagaaagaaagaataggtaagtaacatttgggttctacatatgtgccagtcatgccatatatatatttgcatacactatcccatcacatttaataactatttcatgagatagatactgttttcatttgacaggttaaaactagcccttaaaaaaaaggctagttttaataagcaaacaattacaaatcctctctctatcccctgctatatgaccttaagaaattgaagtcagaggctgggccctgtggctcatgcctgtaatcccactactttgggaaggtgaggggggtggatcgccttaggtcaggagtttgagaccagcctggccaacctggtgaaaccgtgtctctactaaaaacacaaaaattagctgggcgtgatggtgggcgcctgtaatcccagctactcaggaggctgaggcaagagaatcgcttgaacccaggaggcggaggttggagtgagccgagatggcgctattgcactccagcttgggcaacaagagtgaaactccatgaaaaaaaaaccaaaaaacaaaaaaaaatgtgtatcttattacagttgagtccttttgtgagacgaacattcagtgtttgctagattattctaattagctacctttgtatggttaggttagcatggagctgaagataaatgtcccgtttgaaaaaatgacagcccttcagaaaactctggcagtttacagaagaaatacaaatggccaataggtatataaaagttcctaacaagtgaataaaagcaaattaaaacaggcattcacttatttatgttttacctttcaagttgataagagcacaaagattgttgatacctagtgtttgtgtgggtatgggggggaaaagacactctggtatgacgcttttcgaggtcagtattcattaaaatttaagatgtccacatcctttggcacaatagtttattgttagactcattctatggaaacacaggatatatgtacagagttattcaacgcagctgatctgacgtagggaaaagttgaaaatagtgaaattcccgttagtaagggtgttatccatatagcaggatatcatacagcagtaaaaacaagagttttatatacagacaagatgcttaaaatatattactaaataggaagaagaagttacaaaactatgtataatacgcttttttttttttttttttttttgagaccgagtctcgctctgttgccagcctggagtgcaatggcgcgatctcggctcactgtaacctcagcatcctgggttcaagcgattctcctgcctcagcctcccgagtagctgggattataggcacccaccaccatgcctggctaatttttgtattttttttagtagagatgggatttcaccatgttggccaggatggtctcaatctcttgaccttgttgtcctcctgccttggcctccagaagtgctgaaattacaggtgtgagccaccatccccagtcgtaatacacttttaaaagatatgtaagaagaaaagatctagagacagcactgagttgttaatgttagtatttctgtggtggcatgatgggaaacttcgatttctgtatttctgaatattttttcctcaagtctcttataatcagaaaaagaatcagtaaagataactaacatacacacgtacaaaagacgaacccaaacccaaccctccagatgctagcttactacaagatttagcaaaataattggaaatgcatgtggtttgctagtttctccaaaattcagcattagccttctgagctcatccatgggtttggatgatcttaagctgatactttatgtgacaagtaagctggttttagaaataaaattttctctctgttattaaatttctagccgcattactagaaaacaataatggaaaactttttaggccatttattgctttattggcagctttcsattatgtagaaaatagtaattatcttggcatagatctcaaactaaaactgctttattggaggatatttttcggtgagtattcagattgatgatactaaatagcttcacccaagaacccaatttatttagttgttgatattcaagtttgtagtaagttcatcttggaatgtgtatggtattgcagcactccccagaatcagctgtttttaccagagtcttactgcactgcagttcttttctgattgaagaggctaggtaataatgcatatcataaacatgttcaggtcaaaatagtgtactgtatacactccagtgaaacagtgggatctcagctgggtacctgtcgttaagccacttgattcatctaaaatttctgtttcgggattttttggttttttttttcttactataggccttgctgtggctatcttggtgcatagatatgacaacttccttaagagccagtttgccagatagaccttgcagtttgkattttttatatatttatttattttgagacagagtttcactcttgtcgcccagggtggagtacaatggcacgattttggctcactgcaacctctgcctctagggttcaagtgagtctcccgcctcagcctcccaagtagctgggattacaggtgccctccactacgcccagctaattttttgtatttttagtagagacagggtttcgtcatgttagccaggctggtctcgaactcctgacctcaggcaatccacccactttagcctcccaaagtgctaggattacaggtgtgagccaccacactcggcctgactttgcaggtttttttttttttttcttttcttttttttttgagacggagtctcgctctgtcatccaggctgtagtgcagtggcgcgatctcggctcactgcaagctccacctcccgggttcacgccattctcctgcctcagcctcccgagtagctgggagtacagtcgcccaccaccatgcccggctaattttttgtatttttttttttttagtagagacggggtttcaccgtggtctcgatctcctgacctcgtgatccacccgcctyggcctcccaaagtgctgggactacaggcgtgagccaccgcgcacggcgactttgcggtttttaaaacaatgttaactttcctccctggaggtctgatacctctgcaggtaactcactgtttactaaatgacgtagtatatgtgttctctaggcactgactagagaatgtaatttaattattaaacatatatttaacatttttgtgctaggtatcatatagatgttggggaatacaaagacatatcaggccggacacagtggcctgtaatcccagcacttcgggaggccgaggcgggtgaatcacttgaggtcaggagtttgagaccagcctggccaacatggtgaaacccgtctctaccaaaaatacaaaaatttagccaggtgtggttgcatgtgtctgtattctcagccactgggaggctgaggaaggagatttgcatgaccccgggaggtggaggctgcaatgagctgagatggcaccagtgcgctccagcctgggcaacagagtgagactccatctcgaaaaaaaataaaaattaaaaaacaaagatgtatcggacatggccctggtcatttgtgagtgcatagattaataaaggagtttgacattataaattatgacatagtatgatatatatatatacacatctcatatatacacacacatatacataaaatgtataacaaactctattcagggatattttgagaggtgatatttgaaatatttttcgaaagatgtatgaggcatacatacctggtagaaaagggcattctaggtagatgagaaaagacacagattttgagaggaagctctaktcatagttttgtagtcatctgatgtggttagagaataggccaattatggagagtggtaccagataataagctgtggccacgttgtgaaggcccttctaggatatgctagtaagtgatatgataagatctgtgttttaccacccccaaagctggcagaagacaagaaataaccaaaatcagagctgaactgaataaagttgaggtgcaagaaaccatacaaaagatcagtgaaaagagaagttggttatttaatataataaataagattkctagactgctaactagactaatacagaaaaaagaagatccaaataaacacagtcagaaatgacaaaggggacattaccacctaccccacagaaatacaaaaaaccctcagagactattatgaacacctctatgcatgtagggtagaaaacctacaataaatggatatattcctggaaatatacctcctaagattgaactagagaaaaattgaaaccctgaacagagcaataatgaattctgaaattgaatcagtaataaaaaacctaccaaccagaaaaagcccaggaccaaatggattcaaagctgaattctaccagacatattaatataaagagctggtacaattgctactgaaactattcaaaaaaatggaagaggaggggattcctccytatctcattcaatgaccagcatcatcctgataccaaaacctggcagagactcaacaaaaaacgaaaacttcaggccaatatccttgataaacatagatgcaaaaatyttcaacaaaatactagcaaactgaatccagcagcataacaaaaagctagtccaccaggccaggagcagtagcttaggcctgtagtctcagcactttggtagccaaggcaggtagatggcttgaggccaggagttcaagaccagcctgtgtaacatggtgagtacctatgtctaccaaaaaatttaaaaaattagctgggtgtggtggcacacacctgtagttccagctacttgagaagctgaggtggaaggatggcttgggcctgggaggcagaggttgcagtgagctgagattgggccatggtactccaacctgggcaacagagtgagaccctgtcaaaaaaaaaaaaaaaaaaaaaaaaaaagctaaatcaccatgaacaagtaggctttacccctgagttgcaagactggtcgggcatacacaaatcaataaatgttacccgtcacataaacagagctaaaaacaaccatattatcatctcaatagatgtagaaaaggttttcagtaaaattcaacatcccttcatgttaaaaaccctcaataaactaggcattgaaggaacacacttcaaaataatgagagccatgtatgacaaacccacagcagcatcataactgaatgggcaaaagcttgagaactggaacaagacaaggatgcctactctcaacactgctattcgacatagtactagaagtcctagccagagcaatcaggcaagagaaagaaataaaaggtatccaaataagaagagaggaagtcaaactatctctgtatatgatatgattttatacctagaaaacctcgtcgtctctgcccagaagctcctaaatctgacaaacaacttcagcaaagtttcaggatacaaaattgatgtacaaaaatccgtagcatatctatacaccaacagcatccaagctgagtgccaaatcaagaatgcaatcctattcacaatagccgtgaaaaataaaatacctaggaatacagctaaccagggaggtgaaagagctctacaatgataattaggaaacactgctaaaataaatcagagatgacacaaatgcaaaaacattcgatgctcatggataggaagaatcaatattgttaaaatggccatactgcccaaaacaaaataaatattcaatgcttttcctatcaacctgccaatgacactcttcacagaattagaaaagactgttctgaaattcatatggaaccaaaaaaacagcctgaatagccaaagcaatcctacacaaaaagagcaaagcatcacattacctgatttcaaactatacttcaaggctgtagtaatcaaaacagcgtggtacaggtacaaaaacagtgacatagaccaatagaacagaatagagagcccagaaataaagcctcacacctacaaccatctgatcttccacggagttgacaaaaacgagcaatggggaaaggagttcctgttcagtaaatggtgctgagataactggctagccatattcaaaagattgaaactggacacctttgttacaccatatacaaaaaattaactcatggtggattaaagacttaaatgtaaaacctaaaactataaaaacccttgaaaacctaggaaataccattctggacatacgccccagcaaagatttcatgakgaagatgccaaaagcaatggcgacaacaacaaaaaattgacaaatgagacctaattaaagagcttctgcacagcaaaagaaactatcaatagagtaagcagacaacccacagagtaggacaaaatatttgtaaatggtgcatctgacaaaggtctgatacccagaatctataaggaacttaaattaacaagcaaaaaacaactccattaaaaactgggcagaggacatgaacagacgcttttcagaagaagacatatactcagccaatgagcatatgaaaaaatgctcaacattggctgggcgtggtggctcacgcctgtaatcccagcactttgggaggctggaggcaggtggatcacgaggtcaggagatcaagaccatcctggctaacacagtgaaaccccgtctctactaaatatacaaaaaattagttgggtgtggtggtgggcgcctgtagtcccagctactcaggaggctgaggcaggagaatggcgtgaacccgggaggcggagctcacagtgagtggatatcgcgccactgcactccagcctgggtgacagagcaagactccatctcagaaaaaaaaaaaaaagctcaacgtcactaatcattagagaaatgcaaatcaaaaccacattgagataccatctcataccagtcagaatgattattattaaaaaataacagatgcaggtgaggttgcagagaaaagggaacacttctacactgctagtggggaaagcagtttcatgatttctcaaagaacttagaattaccatttgacccagcaatttcatttttaggtgtatacccaaaggcatatacgttgttctgtcataaagacgcatgaatatgttcattgcagcactcttcacaatagcaaagacatggaagtgacctagatgcccatcaatggtagaccagataaagaaaatttggggcatgtacaccatggactactacacagccatgaaaaagaacaggataatgtcctttgcagcaacatggttggagctggaggtcattatcctagatgaactaacgcagtagcagaaaaccaaataccacatgttctcacttataagtgggaactaaatattgagtatacatagacataaagaagggaacaatagacaccggagccttctgtttttattttttttgagatggagtttcgctcttgtttcccaggctggagtgcaatggcacaaatcttggctcactgcaacctccgcctccctggttcaaacgattctcctgcctcagtcctcttagtagctgggattacaggcatgcaccaccatgcccggctaattttgtatttttagtagagatggggtttcaccatgttggtcaggctggtcttgaactcccgacctcaggtgatcctcccaccttggcctcccaaggtgctgggattataggtgtgagtcaccacacctggccaatactggagacttattgagcagggagagtaggaggagggtgaggaagggaaaagtacccattgggtaccgtgcatattatctgggtgacaaaataatctgtacaccaaacccctgccatatgtaatttacccatgtagcaaacctgcatgtatacccctgaaactgaaataaaaggttttttttttttaatatttattttttatttttgagacagagtctcgctctatcacccagctagagtgcagtagtgtgatcttggctcactgcaacctctgcctcctgggttcacgtgattctcctgcctcactcagcctcccaagtagctggggttacaggtgtacgccaccacgcctggccaatttttgtatttttggtagagatgggatttcactatgttggccaggctggtctcaaactcctgaccttgggtgttccacctgcgtccccctcccaaagtgttgggattacaggcatgagccactgtgcccggctttactctttattttgaaaagataactatagtaggcttttttgacttctaaggatggaaatggggaaatcatttggaacagtctttatgatagttaaagggagtaacgctaaggacatggtttagggcagtggaaatgaattagagggggcacattttagagagatttggtgaagcagctacttgggatgcataagggagagaagggaggcaaggataactaagtttttagttttaaagtacttgtcacatgtcttagagacttttagtaataggcagttggaaatgtgagttaggagattaggattgagtgagatgaatatagtgatttttgaaatgtttgaaataaggctttaaatctcaactctgacactcactaaaatgagaaataaccatatatatsttaaagaactgttgggattgtgcatataaacctgtcaataagtaacacttggtattattttatctaatttatcagaactagggttgaatgtttcacagtaaatggatgagagtttaagagggagagattgatctatttagattgctggaaagttaagtacttgaactatatcgttagttctttatggaattacctcactttagttgtggcataatattcttttctgtacttctattgagaataaatataaaaagtgtttcaagaaatctttcagttgtcttgaagatgtcatggtgttcaatgttctttatggaaaaatccttgtaataatttcttcgaatagtttagtactaggaaaaatggtttttgctcaaacaaattggtatttgttattttactaagcaagcaatttttaaacttccattttccctttttttatcttgtctgtttcaaaatgtctgagcttaatgtttgactgaaatatttttattaacctgtatttttagtttaatctatatttaatcttttattatgtggctctattgtatgttttcgggggcggggagcttacacaacagaaatttattgtctcaggtttggaggctgaaagtctaagatcaaggtgttggctggattgccttcttctgagggctgtggaggataatctgttccatgtctttccccttagcttttggtttgctgacaatcttggacatttcttggcttgtagaaacatcttcccaatcactcctgtcatctttacttgatgttttccctttgtgtgcatctgtgttcaaatttcccttttttataatgtcaccagtcatactggattaggactgccctaatgacctcatctttaattatatctgcagtgactctatattcaaatgaggtcacattccaaggtacaggggattaagacttcagcataggaatgtggtgggggttgggagggacagttgaacttctaacagttgtgtggttaaacaaatgagataataacctgaaatgccttatggagcttcggagttaggtagagaattgagaatttgaacttgttctcttcatgactgtctccacagaagctttatcataagggcaggaagcacagtgtttatagtcattaattgctgttttctgacagtttgactttttccttggtttgtgaactttcgagggagttccagctcttcaaacagacagtatgtcttgtccacctgctttggatttgagtcttgttttacagacagcttctgtgggttttataacagatgtgtaaaatattccagcctacctttttatcatttattttaaaattaaaaagagaaaaacctacatggaaagtttttcctaacacactctattacaaagagcatattagtgtttcatcagaaaaagcaggctactttttgcaaataaataagtagatttggcacctaatatcaactgggcatgccagtatactgaattaacacaacaaccttggaaagtagatgctactgttttagtgttacagaggaagaaactgagacttaagtatactgttgaaggttagtagttggcaactggctgaaacagacctcatggtcagtatttgttaaaagtctatgctcattccacaatccgataaagaaaaggatggtgtgagtatctgctgagggggtagaggagcccctgtttcttgggcctgcactcactgtactgtcatctggcatctctgaggtctcagtttcctcattggaaaagtggaggcaatcagccgggtgccgtggctcatgcctgtaatcccagcactttgggaggccgaggcgggtggattgcatgagctcacgagtttgagaccagcctgggcaacatggcgaaaccccacctctactaaaaatacaaaaaattatatgggcgtggtggcgcacacctgtagaacccaggaggtggaggttgcagtgagctgagatcacgccactgcactccaacctgggcaacagagtgagactctgccttaaaaaaaaaaaagcatttaattgaaaataaaagtttgtacaaatgtgctaggctgggctcagtaactcatgcctgtagtcccagtactttgaggggccaaggagggaggattgcttgaattcaggagtttgaggctgcagtgagctgattatgccactgcactccagcctgggtgacagagggagactttttctcaaaaataacaacttgccaccaagcttaaaaaaaaaaaaacctaacaaaaatgtgctattagattaaggagtaccaaaaagtgaaaggtgtgcataattacagatacatacagtgtagttacagataatttaaggccgaatgcagtggcttacacctgtaaactcagcactgtgggaggccaatgcaggaggatcacttgagcccaggaagttttttttttgagacagcatcttgctctgtcacccaggctgtagtgcagtggtatgatgacagctcactgcagcctcaatttcctaagcccaggagttcgagaccagcaacataatgagaccctgtctctacaaaaaataataaaaaataaattcaaaacaaaacaaagataagataatttacattagtagatagtacagaaatacctgaaaatgtaaaggcttaaatactgtagttgaagacagcaataaaaagtcaaaaggaagtttttttttctcaaatgagtgatataaatagtatcttaagaggtaaaggttttaacagcttggaataattggggaatactttctagagaagggcaaattaaaaaataatgtttatgatgacctgttagaaaacatactaggcactttacatagattatttcatttgattccacaccacaaccctrtgagtgagatggtatttaacctcttttttcagatgaagaaatgaaatttacagttacttgctcatgctcatatagtatgtaaatggcacaagtaggacccaaactcaatgtgtaactccaagtattttttctttctcatcatacctgagtcttgagtatgtatattagaaattgattatactccagatggtaaagtgtgggagattttaagcatataatgagtatatcattgtaactggaggagaaagttcaatcgttatatgattcttgtaaagatcttacagtagatgtatacttttattactttacgccatgatctttaatcttttgtaaatattggtgtaaggtattcagttttttccctagatggatactcagttgtcttaagtccatttactgaataatcccccttttcctctactaattaaacgaaaagttttattggccaggcatagtggtgtgcgcctgtagtcccagctacttgggaggctgaggtgggaggatttcctcagcctgggaggcagagattgcagtgagttgagattgtggcactgcactccagcctgggcaacagagctgtctcaaaaacaaaaccaaaccaaaacctttattgaaatgtaatttacatgctattaaattcacctattataagtacaattcagttatttttaataactgtatagagttatacagttttttaaaataactttaagatattgtttttcataactcttaattgaagttttcttggtagatggtatgattttcattttataattcatggcataatctgcatcttataagcattttgcccaagactttgtggccagtaaatggcagaaccaagactcaaactcagcaccttttagaagtattagcatgatagttgagaacaaattgttgaggatatgctaatgtcaaactaagaagtttggatttcatcctttagcgtgagcatcgccagcatcttctctgtaatgccctacttggcacttgtagctgggtactttttggaaaatgtcttctatgatggaactctagtctctgaagatgttccatgtagaaagggttccctactcaagtaaatttgggaagtactctgacttctttttggatgatcacagttcacattgtatacacacatcctgggaagttgtacagtaaagaaatgggtttacttgtttttactcattttcccccagaattttccaagtttcttgaccatagatgaccttttgagtaacactgctctagtatgatgtttttggagaattagactcaattcattaagaggggttaagtctgaagaagaaaattaagctgcaggattggatttttttaaaaagtaggttataattgtgtacatttatctgttaatagtcatggggtaactgctgacagatggagaagttcttatttttttttagaccgaatctcactctgttgccaggctggagcgcrgtggcgcgatctcagctcactgcaacctctgcctctcaggttcaagtgattctcctgcctcagcctcccgagtagctgggactacaggcatgtatcaccacgtctggctaatttttgtatttttagtagagacggggtttcaccatgttggtcaggctggtctcgaactcctgaccttgtgatcctcctgccttggcctcccaaagtgctgggattacaggcgtgagctaatgtgcccagccgaagttctgattcattaggtataggatcctttggtccaaagtttgaaattttgtctcttgatttatacttatatatcctttttttttttttttttgtagagatgggggtcttgctatgttgctcagggtggtcctggattcctgggctcaagtgataataccaccttagcctcccccaaagtgctgggattacagacatgagccaccatgcctggccccatttcttttaaaaatttgaaagactgtttagtatagtagcaagatcacttttatgtcccacgtgtaccatttactagtgttgtgactttgggcaagctataatctctgaatcagtttgcttaaccataaaataaaaagaatatcaaccttgccacagttgttattcagatgtagattcatatctataatgattgttcaatttcttattattctatagtgtcttagttcatttctgcagctcttaacaaaatattggagactgggtaatttttatagaacagaaatttatttctcagagttctggaggctgggaagtccaagatcaagtccaaccaaggtgggttggtttggtgtctgatgagggctgctgtctatgcttcaagatggtgccttgttgccacctgctcacatggtggaagggtctaacagtttccttgtgcttcataagggtgctaattccattagcatcatggcatggtccaccctcatgacttaatcaccatctaaaggccccaattctcaatactatcacattgataagtttcaacacatgaattttgcagggggtcggggggacattcagaccattgcattctgccccgatcccttaaatccttgtctttgtcacatgcaaaaaacattaattctatcccagtagtctcaaaagtcttccagcaccaattcaaaagtccaaagtccagagtctcatctaaattaggtatggatgagactcaaggtattcatcctaaggcaaattgctctccagctatgagcctgtgaaatcagacaagttacgcttttctaaaatacgatggtaggacagacacaggatagatacttccattcagaaagggagaaattggaaagaagaaagggatagcagatcccaagaaagcccaaaacccagcaaggcaaacaacattaaatctggatgcctgagaataatcttgtttaactccttttcttgccttctggacacactgggactgggggtgggtcctgaaggcttcagggaaccacgcccttatggctttatctggggcaacccttaatgcaactctcacaggttggagtctggtgcctctggctctcctaggctggtgttggatgctggtggctgcacagttctgaggtctctgggggcagtcttgccttcacaacttcactagacataaccctggtaaaagctctctgctgcagcctgcccctttggcagttctctgtctagcccctgaggctttctgaggaatcctttgaaatctaggtggggatagccatgcctctgagtgtactgcactcctgaagagttagcaccatgtaggcatcaccaaggtttaccccttgtgcccacttttgccctccagagtggaggcctgagctgcacctggctgcacttgagccacagtgggggtagtcagggagtcttgcttgggaataaagggagcagagatgtgaggcaaccctgggcaactgggcctctccctagaaaacagttttgtgctcaaggctctgccattgtgggcctgtggtagggagtagcagccttgaagcaatctgaaatgtctttgggttcattcttccattgtcttgatgaatatcagttgcttccttttatctatatgaatctctttacctttttattttattttttatcttaattttttttttttttttttttttagagatgaggcctcgctatgttgcccaggctggtcaatctccttatcaaaaggtcgcttgatcatgcttgtggtactctcttccaataccacacccccgttttttattttgagacagagtctctgttgcccaggctagagtgcagtggcacaatctcagctagctgcaacctccacctcctgggttcaagtgattctcctgcctcagcctctgcctggctgatgtttgtatttttagtagagatggggtttcaaccatgttggccgggttggtctcaaactcctgacctcaggtgatctgcccacgtcggcctcctaaagtgttgggattataggtgtgagccattgcgcccggcccaatacccatttttaatctttacaacctagccaggctgagaatttcccaaatttttaagtcctgcttcccttttgattgtaaatttgatctttaggccaggtgaggtggctcatgcctgtaatcctagcactttgggaggctgaagcaggtggatcactcgggctccagagttcaagaccaggctgggcaatatggtgaaaccctgtctctmcaaaaaaaaaaaaaaaaaaaaattagctgggtgtggtggctcattcctgtagtcccacctatttgggggcctgaggtgagaggattccttgaacccgggagtccgaggttgcagtgagcttagattgcgccaccgcactccagcctgggtgactgagaccctgcttcaaaaaacaaaacaaacaaacaaatctttaattcatttctcacatattactataagcaattaagagaagcaatatagcatcctcaacactttgcttagtgatttatcctgtcaaatatcctagtttatcccttgaaagtttgcctcaccttacacctcttttctacatacaggcactaatgccattcatgaggactctgtccttgtgacttaatcaccttctaaaggtcccacttcagtaatatcacattgtggattaagtttcaatatatcaattttgggagacacattgagaccatagcacacagagatgtaatagttctacaggttgagtataccttatttgaaatacctggggcaagaagtgttttggatttcaaatatttttggatttgggaattatttgcattatacctactcgctgagcatccctaacctgaaaatcaaaaattgaaaatcttccagtgagcatttcctttgagcatcattggcactcaaaaagtttcagattctggagcgtttttggttccagattagggaagtaataataaacctttaatacagatggcaatagagcttttatggaaaagggaattgcagcctgggcacagtggctcatgcctataatcccagcagtttggaaggctgaggcgagtggatcacttgaggccaggagtttgagaccagcctggccaacatggtgaaactttgtctatactaaaaatacaaaaattagccaggcatggtggcacatgcctgtaatcccagttacttgggaggctgaggcaggagaattgcttgaacccgggaggcggaggttgcagtgagctgagatcgtgccactgcattccagcctgggcaacagagcgagactctcttaaaaaaaagaagtgtattgtggctggatgtggtggctcacgcctgtaatcccaccactttgggaggctgaggcgggcagatcatgaggtcaggagatggagaccatcctggctaacatggtgaaaccccgtctctattaaaaatacaaaaaattacttgggtgtggtggcaggcacctgtagtctcagctactctggaggctgaggcaggagaatggcatgaacccgggaggttgaacttgcagtgagccgagatcacgccactactccagcctgggcgacagagcgagactccgtctcaaaaaaaaaaaaagtgaattgcaaactattagtccatggaaacagtgtaggatttacttaaagtagcttgcaaaaataaaggattgaaggactgaaaaattcttgatgatatattcttggtaattaaggtcactcacatatcttacacttaagtaatttaaatttaaaagtattctacatgcattttctcattttttttttgtttgcttttttttttttttttttttttttgagatggagtctcgctcttgttgcccaggctgaagtgcagtggcgcaatcttggctcactgcaacctctgcctcccgggttcaagtgattctcttgcctcagcctcccaagtagctggtcttacaggtgcccaccaccacgcctggctaatgcttgtatttttagtagagacagggtttcaccatgttggccaggctggtctcagatgaactgagctcaggtaatctgcccacctcggcctcccaaagtgttgggattacaggcatgagccaccgcgcccggctgtatttttctctttgaacacctggtgaagtaggttggatatgtgcctgttcttggtaattaaaaaaaattaatatatttatgatctgtataggatggaataacgtatcattggttagtgattttttcctaactgcactccaagtatctattcctcttttctcccttccaaaacaagaaaagtcaaacgtaagtatatgcgtgtgtggaatgtttactttaaaaaataataattttaggccgggcacagtggctcacgcctgtaatcccagcactttgggaggctgaggcgggtggatcatgaggtcaggagtttgagaccagcctggccaagatggtgaaaccccatctttactaaaaatacaaaaattagctgggcgtggtgacgggcagctgtaatcccagctacttgggaggctgaggctggagagtcacatgaacctgggaggcagagtttgcagtgagctgagatcacaccactgcactctagcctgggcgacagagcaaaactccatctcaaaataataataatacaataataataataataattttaaccattgattactggctatatcagcactcccttgccacctacccttgttttggttaagtccagtcaggtgtttcctctgctagggagcataagtcgtcttctatcaaagttgtgtatctgaaaggaatatatataccagtgttaatatagtgaaaataactaccagaaatttgtgtgtttattgggacaaattctatttcttaatgataaggtgttattaaaaggtgggaactttataagatggttttattgtcctctgacaatagtttaatattcattaattttaccagtatttcattttgcttatgtgcagtggaccttgctttcgaggaacttaaaaattctattaagacaagacattgaccatagatatttgaattcttggcatgttcaataattgttctattggcttgtacaaaatgtgaaaagagaaaattggatttgaaattaataaacataataaaagcctttgaagtgaaaagcatttaaaatcaaaatgctatattagaaaacaattttactctagaattgtactctattttggagtaaccattctattttattaggaaaatgtgaagagtagatgccttaaggaatggaggaacctctccccttatggattgctctgtcatcatcatcatcatcatcattactgtgaaaataactacattgtaaagaaagtcataagataaatgacgaatgtctttatttattttttcatttttttttgaaatggagttttgctcttgttgcccaggctggagtgtaatggtgcgatcttggctcaccacaacctctgcctcccaggttcaagtgattctcctgcctcagcctcccgagtagctgggactacaggcatgcgccaccatgcctggctaattttgtatttttagcagagatgaggtttttccatgttggtcaggctggtctcaaactccctacctcaggcgatccgcccgccttggcctcccaaagtgctgggattacaggtgtgagccaccatgcctggccaaacatcttccttttaaccaaccacatgacccaaaattgttaacattttgacatatttagtcatttttttctgtgtatgtgtaagcacacatcattaccctcaaataaaaatgtgttcccctttcacttcacattgtaaatggttattacactagaaaggaacaaaacttgctcctgttttctactacactctcacacaacacttttgacaccagaagtgtggagtttttttcccacaccagccaattctccaattctctggttaccacatgggtgtcctacaattcaattatgacactacttggagttagtgcggactccagaggttaagagctcagtcacgcaagactgctctccacttcagataccagtgacatgtagcgggtcctcagattatccacacttctatccgacttggctacaaattgggagttcccacgacccctcctcaggtttgataatttgccatgatggctcatggaactcagggaaacacttgcttgactggtttattacaaaggatacagatgaacagtcagatgaaaaggtagaacaaggatcttttttctctgtggagttggggtgtgccaccctcctggctcataaatgtgttcaccggcccacaaactccttgaaccccacagttaagggatttttatggacgcttcatctcgcaggcaagggaaattattaactcagcctgtagcccctctctcctcactggaagatggttgggtagggctgaaagttccaaactggtaatcagggcttggtctttctggtgaacggctcccatctaggtacctaacaaaagtcacctcattagaacaaacgctactcctatcaccctggaaattccgagggatttaggaggtctgtgttaggaaccgaggtcagagaccaaatatttgaaccaaagatgctcccagcaccaaatatttgaacaaaagatgctcctagtgcctatcacttaggaaacaagtttttttaggagctctgtgccaggaactatagatgaagacaaaagaaatatgtatttctttcgcagtgtcacagacacatacaattatttagtcttggctgggcacggtggctcacgcctgtaatcccaacactttgggaggccgaggcgggtggatcacgaggtcaggagattgagaccatcctggctaacaatggtgaaaccctgactctactaaatatacaaaaaattagccgggcgtagtggtgggcgcctgtattccaagctattcgggaggctgaggcaagagaatggtgtgaacccagggggcgaagcttgcagtgagccgagatcacgccactgcattccagcctgggtgacagagcgagactctgtctcaaaaaaaaaattatttagtctttattatcattttctataacagtttattatggaaaattttaaactttgataaaagtagagaggatagtgtcatccctgtcacccagcttcaacaatgattgatttttcccagtcttattttgtctgtcctccaattttagttctgttttgctgaaatattttaaacatatcctggacattagttaccatgactttgaattatttcatagtagtttttctatggatttacttaatcattcttctgtcgttagacacgttaacctacaaggaagaagctgaggcaaaattaatataaacagagtcagccaggcatagtggccctgtaatcccaacacttatagaggctgagatgagaggatcacttgagggcaggagttcgagaccagcctgaggatcataacaaaatcgtctctacaaaaacaaaagaagagagtttatttgggccagacttgagggttgcaacccaggagcatagattcaagttgccctcaatatatcctctgattagcagtagtggatttttaaaggtaaaatggggggacagggagtgaaagtgtgtcaggaattctcattggcttacagaaataacattgattcagctatacattgttaagctgtagggtgatggttacagtgtccaatgtggcattattaggttaatttatagctacttacggcaatagcaggcagtttcaagagatgagcacatagctcaaagtggggagtaggctgtgactgctgtctcattttaatacctctctgggcctgatattaaaagggtttgcattcttcagataataaatagttcttttttttcccatttcacattgtttcaaatttcttgttaaagatgaactttttatatgtaaatatttaggtgtttctgatgatactattcagccatatcctgaagttgtaatcaccaaaagatatgaaccattaaaataaactttttgtaattataaatgcagtacattttcgttatggatgttttgggaaataaattttaaaaactaagaagaaaataaaaattacctcagattgttttccaaagagacccaacatcccttctatccacatttttgtagtttgcttcttactggggttgaagggggtttctcaatgactgcctggagaagagcaagcctacttgcggcccatcttattgttaaactagcagattagaaaatagctgtatgctaagcacttactaggaagtagcatctaagacacagtgtcccgttgattgccctaatagttctacagtccttcagtatcatcctaccctaaactctaaagagaactatcagtattcctgaatgccatcctattgctacctctgcagatttttttccccctgaattttgagttagtgtgagtctgctggtttgtttcaaaagatgtgttttgagaaacagtcttgagaaaattgcttctgtttaccatccagtgattcacaggagaaattgttgtccttttactgagttgaagaaagaaaacttgatgaagaaactggaaatgcaagtggtagaaacttaatcatattgtgcctgggggctatttggtgactcagaaaataaattatttctgtgggaaataattagtcagcttgagcactgtttaacatatttctggagccaacccaattttatttgatcttacctgttatgaactggtaaataaaaataagtgtgacagatttgagactttacaacttatttaggaacacagaagtgaaatcaatgtttcatcctctgaaataattttaaatacttgaattttccttctctttcagttccaggaatggatggaggtgctttaactgatacaagtctcacagattcctattttagcaccagctttattggagtcaatggatttggaagccctgtagaaacaaaatatcccctgatgcaggtatccttagtataaattcatattgcactatgaagtttattctagggccagaggacatatagagtcttcatttattcctacatttgttgagtgggaggtgagattttaggaggcagtgagatgggtgagatgtaggtaaactatctcccatggggttggagttaatgagagcttttgtaagtgggggtttggtagggttaggggcaagagtgacgggagtatgtagagggtagttagagactaatttcacttgtgtattttgtatgtatgttagttaaacttggtagtgattgcaattttaaaattatgttttaagcaggttatacatgtattataaaagttaagttacaaaagggcctccctctcgtcactactcatcacttttccagttaaccttcctagagttagctatcattactggttacaagtttcctgtgtatcctctcaggaatattctttgcatatagaagcatagtgctagttttattttgtttaatgcttaaaatgttgaatttaaagtcatagtacttggagcattttacattaaaaatgtctttgaattttttttaaccccactttgttctttttggctctttttttcccctttatcatatgactgcatgcaatgcttaggagatttgtgtttagatgagtttttgttgatttgtattgcacaattttgtagaattggaataaaattggaaagtattctagtgtttttaattggaaaactgccataatagtaaaggcaatgtattgtcctttctagtttctgtgatgtactactggatggttttctccattattacaataggatatttaaacacaagagaaattcatctttacgtttctctccctctctctctctggagacagggtcttgctgtgtcacccaggctgaagtacagtggcgcaatcatggcccactgcagcttcaaccttctaggcacaagcaatactcctctcttgcctcagcctcctgagtaggtaggactacaggtgtgtgccaccatgcctggctaataaaaataattttagcagagatgaggtctgtgttgcccaggctagtctcaaactcctggtctcaagtgatcctcctgccgtggcctcccaaaggaggtattacacgttgggattacaggcatgagccaccactcctggcctagtgtttatacttcaagttggactgattttaagggtttgtatgaaaccaatgcttttttgaattattttaacttatttcgtgtagatatgcactctaagggttgtttataaagaaacatgcacagccatatatagaaatggttatgttttatgaacaatataactagtttaatgcatagttataccttattttaactgcctgtgagccacaatttcaggtactttttaatatatatttttgtattaaaattacctcaggagcttagcttttttcttctcttttaaaattatgcagacattaaataagaagttgagtaaacagattcaggactctagaattaaagccagagctagaaattcttaacttataatttttaaggcattgagttagaagttacatatgagacaaggatttgtgggcatgggatgaagggccttacaggatggagagaccatacaggctatggagtgagtctagaaagcatagaacgtgtttagagaacagaaaatacctaattttataagctctataaggtgtatgaatggtagtacaaatggagaaagggtattagagcatttactcattttattcatagtcaacgggtaccctcttcagtggatattggaatttatgttttacagacaaggaaacttagttatgtgttttgcccaggctaataagttatggaagcacaattcaaaataggtctgtagctttggctttgaatacctgggtagtgagtaaaattttcatttcatgtggtggtttttacatagttgtaatccaagcagtaacacttacaggaagattagattgtcagtaatgtgaacagtagattggaggggaagaagcaaagagagccagtcttaattggttggatacttttatttctgtattcctcagtgatgttataaataaatattttgtttttcagagaatgactaatagtagcagctccccaagccttctaaatgacagtgccaagccatattcagcccatggtaagacctgatcccttttgcttatgtgtgtctgtgtatatatttcttactctaaaagtaatatacaaccattgtagaaattttgaaaattgtaaacgggcataaagaagaaaataaaaattattatcttcccactcagatctaactattgagatttagattccaggccaggtgtggtggctcatgcctgtaatcccagcactttgggaggctcaggtgggaggaatgattgagcccaggagtttgaaaccaacttgggcaatataacaagaccatgtctctattattaaaaaaaaaaagaaaagtgtataagttatatacaaaaatttcaacatgctattttattaacatcttgctctttgcactattagttatttaatattaaattcatgttaattttaatgaaggtaagtctgaaaaaccaggaagaagaaggcagagaaatgaagcagcagtctatatgtactacattgtgaagagatttaaggttcctttacgtaagggcatttaatatattttttaggatttagcagaacatgtaatgagattaataaataaaaaattaaagctcagaaatgaagataaatatttaagtatatctcacacatgccttttcagagactcttctcatttgtaaagtgagaaataattaagatatataattttatttgtaacttctttctacagagtagtggaattttgaacctacaaaatctttggatttcatgtttgaaataaattttgaaaaactttattatttctgtcttaacttaatattttactttatctttttagtaataatatcaaacatctggtgatagactttaaaatatggaatagtttgcagagtaaatggttttaaagccttgctgatgtgttgaaatccaagacaggatctctcagagtctatggttgacactgcccccacccctcaccctcctttttatccttcccaagatatggtctcaagattataaacctttatttactttaggtcaacttactgccttcataaacacactcacaatagtatggttaagaggtttttttctcttatttgatttttcttttggttctagtcaaatagatctatcctgatccatatagcttttgaatatttgagcaaattggttcaccagtttgtgttttatttgctcagaaaatatttgaacataactgtgtgttaggtactaagtttaattattgtgtcatttgatttttataggcattgtcaaattaaacagttattagatttgcgggttacccaagttttatgtgtggaaacttacgtaacttacctttcagatcctctaacatcacctgcttcatccttgtttaatgactttggtgccctcaacatctctcagagacgaaaggtaggtgaaattgaaacttgaattaaactaaatggaatttagaagtgatgttggcattgttacctatgtagtgtcaatgtttttgtaagtggagggagagctttttatgggctttagtgtttttcctgccttttgtttatcctttttctttatctttttatatgtggaaatttatttgatctctgcatggaatagagattttgtgtgaagggatgaaatcctgcttatttttgttcagtttatttatctcaatgtattctgttcttaagataacatctaatttaatgttaagttgctgttaatgtgacccattgtaagcatrttaatcatgtttaaactttattttttgatggctttatctaaatttcaaaaattcttccctaatttactcctgattacaaggcaaacttaaaattttcaacatttcataatgggcccaacaatttaaaaagttgaaaatctcttcacattagaaatttaattttatttggaatttagattgatagaccatgtatggatttttgaagtattttataaggactgatgttgtgacaagttgaataatttgatgcctttgagtcttaatgagaatcttgttaatactaataatcatctagagaagatagtcttttttggttaggatcagcaacagctaaagatgttaaagaggttctaaatcttggtggaagttattataaagttataacattgtttcctaagtaatggaagaaagacccaaaatttaatgagagtaataaatgtaaaattaactaaagctcagaaatgaagataaaatatttcaacatatctcattaatattaattttagaataactgatatgaacttaagatacttttaagaaggatctgatcagcagatagtataaaatgaaattcaagaagactgtggtggtgttggcttcacggtgtatagttatccccaaactcgttgagttgtatacattaaatatgtatagcgttttacatgtcaatcagacctcaataaagtggtttaaaaaattcagaaagactagattttcttaagagaaaaaaaagttatgaagactgatataaattatgttaaaacctcatgtacctaatgttatttccattttgagacatggatgagaataagaaggtaattacaaaatgctttttagcaactagaattgatagactaaaatctgtgggtttaatggatttccttataggctcttatcatggataaatttaccctgctttacatacttctcttataaactggaatacttggtttctaaatccgtatgttagcagtgtaataatagagttggacagaaacagacccaggacaatagacaaagcctaacaatgtggaagcaagcagtaaaatgctgaaaagcgaatacaacctggaaatcaagttatctggagctttttatgggaaaacagaaagtctttaaattttcttaggtattccctaatcactttttctcatttataaaataatcagttaacttggctgggcaaggggctcaggcctataatgccaacactttgggaggccaaggcgggagaattgcatgagcccaggrgtttgagaccagtatgtataacataccaagaccccatctcttataaaaataaaaaaaattagtcaggtgtggtggtacacacctgcagtcgcagctgaggtgggagagtcgtttgagcctgggcggttgaggctgcagtgagccaagatcatgccactgcactccagtctggacaacagagtgagaccctgtctcagacaaaaaaaaaaaaaaatcagttaataactagcatttcagacatacgagtagaaagtaaaactagaatgacaaattaatgtttaaaagtatttctaatataagaggttagtgggatgtgtcttaaagtggaaatatatgatttagagctcctgacatttacttttgagaaaataataaaaattattagaaattgagaatatatagtacctattctttttataatttattttaatacaataaaatgttactagaaatgttactagaaatttgaaaataatgttagtagaaatgtgacctaaatatttggagagatattagaatatatccaatggaagcagactaatatagaaaaatgagcactctactgtgatatttgaggccctggatctcccattttgtgacctatggccaactttctaggctgtaatcatcccatctgtgaaatgaagagcatgacctcatcattaccatagttgctgtggtgtccttcatctctaaaacttaatgtctgtctaaattgaaagcatccatatgtcagtttctacctagaaatttgtggttcatatattcatatagcttgaaggactatattttcttgccatttatatttaaaatgatgtgtaatctacagacacagagtttttccagtagtgagcaatatagttagaatctttgtgggtacaggttgcatatattttaaaattgttaatggttgagttgagaaggtttcaaatctcaaaatctctttacattagaaatactcttggcataggagtatgacatattacacatagtgaattaaaggcatatgaaaaaatgtctgtttaacgaagtaattttagtggaagtaactcaaaattatatgaatattgtaattccaaatttatctcagcaggctagcatgattacttagtggtattttgttttacagtgatataggagaacaaataattaaactatgcttaccactatttcatagctagtgaggtaaattattttctgaaaatctcagttgggccagtctctgagccagatatgctaacttttgcctgtgggattatgtgatttactggggtcagaatagtcaggtatttttatagtaggcagttttactatatgctatgtggacaaattgaaaatgaaggactgagtttttttttttcccttaaatctaattggagatgcaatacatgaacctacaagggaacatttactcagcagcatattaattagtgccaatttaaatatttgatgattgctaggtagcaaagaattctctagatcctgaagaatttatggagaaaagatgttttgaattgggttttttgtggatgaggaatgtatagaggcaaagatacctaggcaaaaggtatgcttgcttacaggtgatagaggtaggagctttagtaaactctaattcttcttcattctgagaatcatagataaactaagaaatacggctgaggccccttagtatctttaggaacttcaagggaaatgtgggatgtgaaaaatagtacagtctgttasaatggctcatgcctgtaatcccagcactttgggaggctgaggctcgagaatcacttgaggtcaggagttcaagactagcctggacaatgtagtgagacctggtctctactaaaagccaaaaacattagccaggagtggtggtgaacgcctgtagtcacagctactcgggaggatgagaggtgggaggatgacttgagcccaggaggtggaggctgcagtgagccgtgatcactctaatgcactgtgtgacagagcaaaaccctgtctcaaaaaaaaaaaaaaaaaaaaaaaaggcccaaaacaaaacaaagtacagaagggtcacagccatatatctaggctgtataattgttgttaactatgtgagaaacttcctgaagagttgtgtggtgagaatgtatgccttagggcagtactactcataatgtgtcatgggaccagtgctagtctgtgaattgtctgttaggagataaacactgaaaataaatgtctagagacttctataacaatttgataatactgtgacattcgaatatggaatcatttttctaattatctttattttacaaaattataggaccatgatttataggagattttttaaaaagtgatcttttttgatgtttgagaagcactgattttcttttatttgtcacattaggaatgcctaattttatagagagaaaaagtaaccattatttgaggtttgttaaaaataggagttaatatacaagagattattacatgagtaaaccttaatagcaagatagataaaattaaatttgaccactgttatgaaaagaagtagttttgagagtcactgaatcacaaatgtgatctagacaagcattaaaatttccaatgagaaattatttgggaacaaaatatctttacaacagagttagatattggaatacagatattcataaatgaagtgattcagtgctatgatatcttgctgatgattcttgctaagatagaagtgtttatgtagggcaaccatgtatgattgaggcaaatcccaggcaaaatgagaaatctttcaaatttgtgtcagcttggctttctccttttatatctttctgggctattgcccttcttcatcttctttttttattcacctagtcacatttttattcagcttccccctacttcttccatttctttggtttatacccatcgtttatatttctttggtttactttagtatgttgtttcagtcaatatgcggttttatgtggatatttgtattatatttttaatacggagataacagattttcacttctgtaaatttttttaagttttaataacaagttaaattctttggggttaggaggcaaagacttttgaagtatcatgtttatctcttctgttcttgcttttaaagctttttgttaggactagggaagtgggaccaaagggagctggctggttcgtctgctgatagcttatttttgaggagatgtggttgctagaggtacagttctggattattctgcttgagagaaaaattcaccagcagtacttttctccgctttcttctttgtttgaacctagcttgggtctcccttttgcactgttgtttatcttaagagcacccatctctctctgttacaaaacttactgatgataaatattttatgttttctgattaacttgacatttaaaagttttcttatagcatttttattctaaagtcttyctttgaaaaatgatttttacattatttctattctaggcaagcaaatatggaataacaaagactagagcatatttacggtagagttcttctatggaaaaagataaagtaaatttggagaaattaatctgagtatagcatagacaatttggaatgtaaatcttaatccttctgatggttaagctaggccttttttgcatattgaatcaagtattgatgtcagaaaaaataaaggagaaaatggagaagacattgaaaaataactaaaattttaaaggagattgtaatctaaatttaatctgtaaaatgactgtttttaggttctttatgtatgttctcaaagaaataatgttttacttggtatttagatttccagtaagccacatcattatcttttacccattgagtattgttcactaatgtttctggaaaattgtggcgagaattccaaattaatgccctcagaactattatgctctgaaatcactaaacattcattcacctccgcttgtcaagatggaggagggaatgtgtgccatctcagcctaagccaagtttaggagagcttttaggcttagagatatgttttcctttggaaactgacacagttattggagtccaagttcggggtatggggaagacacccatgtgtggttcctgtttatagcttactcagagcctcttggagaattttaatttttcaaagaacaaacagcaggaatgataataacacggcagtgttggatagtggttaaggctttagggtttagagttagatgcgaggcagtcaggattgaattagtgttgcttcactgattatctttgtgtcttcaacttagtaaacctttttgtttcttcatttgcaaaatgagaatgtggtacctagtaagtaaggttgttttcaggactaaatgggacatgttgcctggcacagaagtgttgactattattggtagtaggtartaagtggtgttggtcaaattttgaactttgcttggaaattgttaactgttgttaattaagtatccctggctactcactctgtatcaggctgtactaaaattgtcctctggaaacgtggttctgtagctgctctgaggatgtctaccttttctttgagatgttcaggcctcctcctcccccagtattaattttttgccttcttcctcacagaaacttcttcctgttagcttctcaaacatgtcctccagatcatgtgaaaatccattgggggtttcttgcaacataattgcagacagatagaaacttgattttatttatatgaatgatgattttccgtatttgttccagataatatggtaaacctaaataattattttataaattaaatgttttatattttatcatatcatttagttacatcaacagttctttgggagagattattttttctgttttgggaaatagaagtttgagagatcaagtaatttgcatagaataatataaattacatagggcaatatgagaagggtaagttgactgagtttactctagggtgaaaaataggccactggtaatatggagaggaggagataaaacatcgtttaaccttatgcctgcttctttttccacttaagtgatttttttcaatgtaaatttctgtcaaaatggtttctggggcaagaatagacaattgaattttttataattgacagacaacttttcagaaatgtagcacaaattatattccaactaataggggctggtttttctacagtcttgaaaacactgggctataaaaatctttaatatttttgtaatttcacaggcaaaaaacttcatttaaatttgatggtgttgtagacttctcttttatgtttattggtcattagtgttattttatgtccttttctcatttcctattgggctattttttaaattcattgtaagaggtctttgtacattagagatgtaaatctcttctgtcacatgttacagtttccctccattttgttattggtcttgaatttcacaagtaatttatgctgtcagttttgaaatgtcatgcttactctgtttctctcatactatgtttaaaatagcaaaatattaagccaatttttgttaaaataacatggaaatctctgctctaatgagttagtaattcgaatataaagggccgtccttgtttttatakaattaatttgaatacactgtgatttttattgtgaatgatctctagtaatcagtttcccttagtaaatggctatgtgttctctcttttctctgctttttaactggtaggcttgaatgttcttcctgttggttatctccagtctcagtctattcttttcttaaaatatacaagtaacattagattgaaacttgctaaaaatatggtagttcttatagagaaagactttgagagttgacttttctttcctgctaagtaaagagtattcrtggttgagtttccaggattgggttgagataaagatgtactttggaaagaacagattaaattttgttttaacaagtgtgaggttcaaccatgtacttcctgtactttattttaattggcactttgtgtgcagcgaccatttgtttttgtttaatccagaaaacttcctccaaattcatgattgtaggagaattttgttctgttgattgatttttaaaaagagctctcatgagtttgttttggaagcctttttttttaaaggtgtgtgtggtagtatggtgtttgatgctttatcatatttaaacgtgaactgaaatttttttatgccttttatatacagtttgtaatactgttggctgtactcatcatctaattttatagctttgaagattttgagttcttatacacagtaatggtagtttaagtaaaaccatggtgcatttatctcttgaacctacaaactagtagatcattctaaggttagctggttggcttctttacactctggtcattctatttgcgaagtgtagtagctgatatttaggggcctagcattattgatagctcatccctattttcctaggaggtaggtatggggaatgaattagtaaaggtgaacttaaaattctcatccacaaacatgctagcctaagctccaaattaaatgtaaccaaaaccgtgtggttttccccaactctgttttattcccaagatttgttgtccttgtattttgaaaacggggaaggagaacttttaaattctagttatttgaatgaagtctttatcagttctcattgattccatccatgctaattaaatacaaaaatatttcttcatttgggtatatgtattttgttatcttaggtttagctagaatgacattaagattgtaatgtgttaaggagtattacagaatgtggaattgatttctttgagttggatatgagatgttatagttaagagtacaattgttggaacctgaccctatgttaattttgagataataggcaagttattttaaccttctctcagacttacttttatcatctgtaaagttggtataaaataggcgctatgtcccagaattatgtgaattaaatacattaatggatatagtgtttataatgccttgtacttgtcaaatggtagttattgttatagtctcctatttatgatctgcaatttaaaagtttgtttatctaattatgtacaagacgacttttcattatttaccatctttgtttaaattcaattataataaaactcatttctgaaaaagtgtacacatacaagttaaataaaatggaaaccttttgctaagaagccagtagacattctggcagctacatagtgacagctacatgggagactgaggtgggaggtttgagttcaggggtttgaagctgcaatgagctgtgatcgggccactgtgttccagcctggrcaacagaacaagactgttaatataatgaatgcatttggtaagggactgaaattgatagaaaactttaatgatcattacaattgatagattatcatggaaataactttcttgtttaaaaaaataaaactggcctggcatggtggctcatgcctgtactatcaccactttgggaagatgaggcaagaggattgcttgagactagcctgggcaacatggtaagacccgtctttaaaaagaaaaagccctcgtgagatgactcacacctttaattccagcactttgggaggctgaggtgggtggataactcgagtccaggagtttgagaccagcctgggcaacatggcgaaacactgtctctacaaaaaatacaaaaatgagcttgacttggtggtgcacgcctgtagtcccagctacttgggagactgaggtgggaggatcacctaagcccaggaggttgaggttgcagcgagccgtgtttgcaccacttcactccagcctgggaaacagagcaagaacctgtctcaaaaaaatacaacaatttttttcactcaaaatattttattaactttggcatgctattttatttctttatatctggtacgtattgtggttccagtctaaagcacaaggatataagaagttgcagttggtgttccagttctttagaaattgaatgtgcccttgcatagcaaggtcttccaactgattttatttttggtagcataaaatccctttgtaacactgagattttaagaacataagtaaagactgctttgtagacttccttaaattactatgtagataatgtttgtccccctcaatgacctgactcatagcagaagctacaaatacgtgtatatgtgtttatacatgtaaattatgttctgctgtgtttgatataatttatttttctcattttttacgtatttttgttttttgaggggcagtgtcttgccctgtttcccaggctggttcaaactccgacttcaagtgatcctcctgtctcatctacccaacttagctgggactacaggcacatgccaccatgcccagctaattttttaaattcttgtggagactgggtctcactctgttgcccaggctggtcttgaactcctggtctcaagtgatcctcctgtgtcagcctcccaaagtgctgagattacaggcatgagccacctcacctggcccaatgaatgatttaaatgacactttaaaatgatctatgttttattaatcagaacatctttacaaacttgaaaaatagtagtatacaaatgtgaaatatctcttttcagacactgcttaaacgagtatatgaatttattttcttttacagcatcaactcagcagcctatctcctgacactcctaagggtcwtaggtacatcaattgagaaatctctggcctaggatttattatatatttatttcaaaataagcctgcattttttttgcaacctcctctgactcctaatgagcttctttctgttcattaaatatcctgatactttagcatatctgcaattataagaattaaatatcaaattataccattaatgattagtggttaatcacttgaggccaggtgtttgagaccagcctaggcaatatagcaagacctggtctccacaaaaaattttaaacagttaatggagcatggtggtgtgcacgcatagtgccagctatgtgggagactgaggtgggaggatcgtttgagctcaggggtttgaagctgcaattagctatagttgggccactgcactgcagcctgggcaacagaagactgtctagaaaaaaaaagaaaaagaaaaaaattacattgtttcagagtgtaaatagtgaaatgattacacagtgattatgtttttgatgttcaaaggaggtttttataattcacggcattggaaactttttgtcctgaagcaacagttttctctagtttattattaatgagtagaccatgatatgtaataacatgtgactgataatgtgaggcattttggagatggtgctgttttgcaattaccaaaagaattaaatgctctgagaattggtctgttacttagtagctttaactacattttttatacaagtgctggtatttatagattgttcttctagctgcactctgaactttttgggagaagagaatagatcttcttgatcattttatttttaagaatgatagagaagtttatactgaaatgttgagtaaatcaaggaatgaaaaaatatacatgtgtgtcctaaaattaccttctgttctttcctttgacatagtgagtctagaggcttacctcccttgtaatgagagtggacttcccttagccctaaaccactggaactggcttttatgaagtggggcaaaggtttttggaaaagctagggctttgagggctacaaatagtgatcttaaaagctctcagtgttagccaggcgtggtggctcacgcctgtaatcccagcactttgggaggccacgccgggtggatcatgaagtcaggagttcaagaccagcctggccaacatggtgaaacctcatctctactcaaaatacaaaaattagccagatgtggtggtgggtgcctgtaatcccagctacttgggtggctgagccaggagaatggcttgaacccaggaagcagaggttgcagtgagccgagatcatgccactgcactccagcctggggcaacagagtgagaccccgtctcaaaacaaaaaaacaaaacaaaacaaaaaaactctcagtgttaagatcaagctccaagggggcaaggagctacaaggacttgcgatgctgaatttttaaacccctaccccttttcattttgaggagtgactccaatttctgtttgtatcactagttatttcttctccagatctctctgacgttattgagaactttagtactcaaagtgcgatcaccagaccaggagcatctgcagtcttgggagcgtctttagaaacacagattcttagacctcgctctaaggcctaccgaatcataatcttttattttagcaagatccctggaagatttctgtgttcactattgtttgagaagtgctactctagaatatattttcaaacctttycttcttgaaaacttttattcaagccttgagcttttttgtttgttttgatattttacttttgagacagagtcttgctcttatcacccaggctggagtccaatgacacaatcttgactcactgcaaactctgccccccgggttcaagtgattcccctgcctcagcctccagagtagctgggattataggcgcgtaccaccacgcctggctaatttttgtattttttggtaaagatgaggtttcaccatgttggccaggctggtctggaactcctgacctcaggtgatccgcccgcgtcggcctcccaaagtgctgggattacagacgtgagccacctcacctggccaatttgtttgttttttgagatagagcctcactctgttggccaggttagagtgcagtggcacagtcatagcccactgcagctttgaattcctgggttaaagtgatcctctcacttcagcctcctgaatagctggaattataggcacaccaccacacctggcttattaaaaaaattttttggcgggggtgggggtagagattggggggttctcactatgttgcccaggttggtccttgaactcctggccttaagcagtcctcctgccttggccttccagagtgctaggattacaggtgtgagctgctgtgcctggcctctgctggatgttttaccacgggaaaaggggtgtattagtccattttgacactgctataaagaaatacccgagactgggtaatttataaaggtaagaggtttaattgactcacagttacacatggctgagaggcctcaggaaacttagaatcatggtaagtgataaaaccatcagatctcgtgagaattcactcactatcacgagaatagcacgggggaaaccactcccatgattcagtcactcccttaacacatgggcattattaatataatttgagatgagatttgggtggggacacacagccaaactatatcaaggggattgggaattttgttatacaatgttaacttacacgtgtggagcacaaaagctggttatcaataggatgtggcattttcaaatgcttttatttcataataaccagcaagatgggactggtcaggctatcaagaatagaggatcaataagggaatttaccttttttgggggaccactgtgttcataaggttggtctaggtaaggatttctagaagctcggaagggaagaggagttggtgcttttgtttgctctgaaggaggggcttggatcttaaagaactgaaaaaactttagtaaataaatatttcccttaaaattgtgtttgccctgtttattttctgatcttctctttaacctcttcctttcccttagcacctgcttccagttaatcaccaatagtggtttttaacctaccagatgttgccacaagtaagctttcactagttctctatttctgttattattgcctcaagttcatatccttctttctcgactagtgattcgtagccagggcagttgtgtctttttacccccagagaacatttggtaatatctggagacatttttggttgttacaactgggtacttggtgcttagtggtatttagtgggaggatagagatgctgctaaacatcctacaatgcacaagacagccccccacaagaaagaattatccaaagtcagtagtactgaagttgagaaaccctaacctagactactgccagagtccactaatttgtcgacctatttccacttttactccctcttccccaattcttcctccacactgccacagaccttcctttctaaaatacaaatctgattttgtcatttattctttaccatggaatgatcctcagattccttagcttaggaaacaatatgtttatatttacttatttattttaatttttttttgagagatgagacatgtcactgcagccttgacctcctgggctcaagcgatgctcccacctcaggctccagagtaggtgggactataggcatgggccaccatacccggctccttttttcattttttgtaaagatggggtcccactgtgttgcccaggctgatcttgaagtcggctcaaacagtgctctcatctctgcctcccaaagtgctgggattacaggcatgagccactgtgcttggcactaaaacaatactttttttttttttttttttgagactgagtctctgtcacccaggctggagtgcagtggcaccatctcagctcactgcagcggcaccatctcagctcactgcagcctccgcctcctgggttcaagagattctcctgcctcagcctcctgagtcgctgggattacaggcgcctgccaccacacccagctaatttttgtatttttagtagagacagggtttcaccatgttggccaggctggtctcgaatttctgacctcatgatccgttcgcctcagcctcccaaagtgctgggattataggcgtgagccaccgtgcctggccaatactttttaaaaattgcattcaagcttcatcttttgttctcaaacttcaccttctgctaatggtgaactgcatacttgtggtttcctctaaacaccatcatgtctgtatacatagttttcccctaacctatactacatacttccatctcatattttcctatctaggcacatttattcttccttcagaactttactcaggcattcacttttctctgtgaagctacctttgtttctgctctattcatacatgattacttatgcattgttatatcacagtgggttgtggtttgtttacatttctgttacctcctagcctttaatctgtcttcgagcgtaaggtgtgtgttgtgttccaaatacttagaacagttcctgatacaaagtagattctcagatgtttagttgaaagtacatttttttcttcagggattaattagtaatttggaaattagcttatagatgagatattgttataatttacattctatgcaataaaacttttctatgtaatctttcgcctcaccatcatgttttacattgctaccatctcttttcagatgttattttgtattttgtcgcttataatggtaccttaaatagtattgataccttagggcaggagtgtccaattttttggcttccttgggccacattggaagaattgtcttgggtcacacataaaatacaccaacactaatgatagctgatgagctttaaaaaaatggcaaaataatctcaatgttttaagaagtttacgaattcttgttgggccacattcagagtcatcctgggcctctggttggagaagcttgctttaggatattttcatttagttacacagagaagattttacttttggattagagtttaatctctggctatttattgaaaaaatttagggtttataatggcacatgtttagagatctcttctacctattgaggagaggctttaggctagttaagggttttagggcatggagtggaaggagaggaatgatgaattccctttttgaaatgaagaaacgtaatttaatgagtgcagttaaagagggaggatgatacgttggatgtatttaaaaccatttttggggacgggcacgtggttcacgcctgtaatcccagcactttgggaggccaagacaggcagatcactggagcccaggagtttgagaccagcttgggcaacatggagagactcccatctccacaaaaagtatagaaattagctgggcstggtggtacacacctgtagtcccagctcctacggaggctgaggtgggaggatctcttgagcctgggaggcagagattgcagtgagctgagattgcaccactgcactccagcctgggagtgagaccctgacttaaaaaaaaaaaaaaaaaaaacccaagaaacaaaaactaaccaaagagcaacaaccttttttttcaatgttgtttactgtactactacatagaaagtgaattgtattgactgtaataactgtgtcaaaagtacatttgaggcccagtgcggtggctcatgcctgtaatcccagcactttgggaggccgaggcaggtggatcacctgaggtcaggagtttgagaccagcctggccaaaatgatgaaaccccgtctctaataaaaatagaaaaattagccaggtgtggtggcaggcgtctgtaatcccagctacttgggagactgaggcaggagaatcacctgaactagggaggcggaggttgcagtgagctgagatgataccactgcgctccagcctgggcgatggagtctcaaaaaaaaaaataaaaagagacactgtctcaaaaaaaaaaaagtacatctgaatttgtgaaggatctgaattacggaagaccttttaaaataattttcatgcattcagatatatgacctggaatttaggtgtccatgtataaatcatttgacaacctgagattttgattaagtaaacgttctttgatatgttgaactttcctgatagaacaaggttaattttagctcagaaattttcttaaatttacatatatgtgtgtgtatatatatacgtgtgtgtgtgtatatatacatatatatgtatgtatatatatatatatatttttttttttttttttttgtagagacggagtcttgctttgtcacccaggctggagtgcagtggcgtgatctcggctcaatgcaacctctgcctcccaggttcaagcaattctgcctcagcctcccaagtagctgggactacagatgcacactgctacacacggctaatttcttttgtattttagtagagatggtgtttcaccttgttgctcagtctggtcttgaactcctgagctcaggcaatctgcccatctccgcctcccaatgtgctaggattacaggcatgagccaccgttcccggccaaatataaattttaaattagtaagtgtctaattagggttatattactgtatgtcagagccttgtagttttctatttgaacacaaaaatgtacaatttaattcttatactctttccaaggaattaagttactagaaataacttgctttaaaattctttcacttataacgtggttccatggcatgaatcactaagggtacatacttattcttattcacaaaatttccctctatggcttttctaaagtatgatagcaaataaaaaaaaatgttccctatgctatagacatagagagtaactagattggttcaagattgcataaaggtggaggtatgttagtctcataaaactctgttcgttaggctgatgtggtggctcatgtctgtaatcccagcactttgggaggtggtggatggcttgagtccaggagttccagaccagcctgggtgacataatgaaaccccatctctactaaaaatacaaaaattagcctggcgtggtggcacatgcctgtagtcccagctacttgggaggctgaggtgggagggtcgtttgagcccctgaagcagaggttgccactgagctgtgattgtaccactgcattccagcctgggcgacagaatgagacactgtctcaaaaagaaaaaagaaacaaaactctgtccactgccataattattgagtaagtaggcattctagttacctttctcaatgcaagtttagttatttttgtccttgtttttttttgttattgttgttttttattgtttgtttgtttttaaatttgggatggagtctcactctgtggcccaggctggagtgcagtgtcatgatctcggctcactgcagtctttgccttccaggctcaagtgatttttctgcctcagtctcccaagtagctgggattacagacatgtgccaccatgcttggctaatttttgtacttttggtagagatgggctttcaccatgttggctagggctggtctcgaactcctgacctcaagtgacccaccacctcggcttcccaaagtgctgggattaaggcatgagccactgcacccagccttgtcctctttaaatcaaagacagtatagcagatgcacacttgtggagtggagaatctaatttgcatggaataatttacataggcattatttgcaagattttgaaatttggaaattatgtcttttttaaattggttctctttatactagaaaacattattaatatatttgactggctataggtttttttttgtttttttttttttaatagagacagggtcttgcaatgttgcccaggctgttctggagctcctgggctcaagtgatcctcctgcatcaacctccaaagtgctgggattacaggcatgagccaccatgcctggccagcatctttttttgaagaaacttaattttaactctttgtttcagcagtcttatacctcatgacagaacaatgagtaaacatatattttcttatttcagagtttaaattaattaccttcctaagcatgaattagtgttttctgaagggaaaaaatacatacaagttttccttaagatgcagtctagtgcaaatttgctgtaattaagagaagtgagatagtggaaacaagcactaattttcatgaataaaagtcctgctaaccactattaagatagcttattaattttcttataatgttaggcaaataatttatgattttattgaataatttattcattatcaatctgttcatattattgagatttaaaagaccaatttgtgttactgttttgttgttgttttttagtctgaggtttttttttttcattgaatactttagggtgaatgcctatttaagatagagtgagttgtactcaagtctaacgtgcatagaattaaaattttttaaaaatcaatttattaggaaacaactgcgtttttaaaagtgggttagttctcagtaggaaataaagtaacaagatggtgagctgaaaaagttgtagtttggcgaactttataaaaaagaaaaatctgtattctgtgtccttgaaaccatttcttcatattgcagtgagaataggtaagtgacagtagaaaaaattttgcaaagcatttttctttgctgataagttaaatttctattcattaagtaaagtcgtataaaatcagattaaatgtatttttctaaaaacatctgttgctttatataatattctttagcccattaggagtgtgggttattttggaggtgtgggtttggtgcaggggtgggaggtggtgggtggtggtaaggatattagaaggagtgttttagaaacttgtttcctatcccaccgttcccagtatcctgtatatgttagttatgttagtttagattagtgtgggggatgttaggagtggcctggtttctttccttctttttcctagccaaggaagtatcgcctggggatgctggaggagaggctagttccgatgggatcaaaggcacgaaaagcaaagaaccctattggctgccttgctgacaggtgtaaatcaggagtacccatcaatatggtttggtggaacagagtcacagaaaacaatttacaggtaaaaataatttttattagacatttcttgaaagtgaatgtcttggctgctttctgtgtctgtttggggtggtggttgtgaaaggattggatgacttagctggtatacttaggtaattaaaaaaatttttaatcagaataaagttagtgacccttaaccaactaaatgattttttcttggtggctttttgagcttttcctctttgtagaatattttacttttgtttgtttgttttttgttttttcagacagagtctcactctgtcccccaggctggagtgcagtggcaccatcttacctcactgtaacctccacctcccagattcaagataccatgcctcagcctctcaagtagctgggactgcaggtgcacaccaccatgcctggctaattttttgtatttttagtagagatggggtctcgccatgttggccaggctggtctcgaactcctacctcaggtgatctctgccttggcctcacaaaatgctgggattgcaggcatgagccacctctcctggccgaatattttactatatttagttaaatttagtttttctgttttcaattttgttaatacttgagttcaattatttttactacccaagagttattcaggataggactacattgaagagtcatataaggccgggcatggtggtgcacgcctgtaatcccagcactctgggaggccgaggaaggcgtatcacctgaggtcagaagtttaagaccagcctggccaacatggtgaaaccccgtctctacaaatatacagaaaagaaaagaaaaattttagccaggtgtggtggggagcacctgcaatcccagctactcgagaggctgaggcagaagaatggcttgaacctgggaggcggaggttgcagcaagccgagactgcaccactgcacccactccagcctgggcaacagagcgagattctgtctcaaaaaaaaaaaaagagtcgtataaaatttattacacaaagtcacatttatttggaaatctgaagaacaagatgcttcatatgttgtctttttaacatttttactaggaaacaaaaattatatgtaaacaaacttgtcaagagttgctctaaaactaacttcaatagtatgttgtcatagagtcattacaaatacattccatctttgactgtaccttttttgtcaatactgaataatgcaaatgaaaatttatgtcaggtagtttctatataatattttgaagtaccaacaaaaaaatttatatgccattttaatctggattataattttatttccatttttaaaaaattgataattattctgtaatattgttttattaaccaaatttcaatttagccagaggtagaatgtctttactcccaaacttgcatttaaaatatatcccaaggcaaagcctataatcccacatgtacataccacacacagaaaagatataacaaaggtaacaaattggttttatttctgtttccaaccttatgttataaataggttccacagtattttgttctgtttattactgatacatgagtagtatctgtattgccttgggcataggaataaataaattattccaaaagtaaatattgcaaaatgtagtatttgctccagctgatattttggtaatattttctaaagataagaaaagacaggggtttcatataaccatatgcttcaaatttcattggaaagttttggctatgtcaattatgaataacagtatagtttttttaactgaatttgcttgtcttttatatcagtagtggagaggtttttgatacgggttgttacaattagtttttagtttaaaaaagaaggtctgaagaaaaaaattggaccacagctatttaagagcagatacaagtgaaattggaattacttgtaggttgtgggggtgaaacacttaccaatgcagaggtgtagccactcgacctctccacgactgcccccattatcctggtggcagttctgaggtacttttttttttagaatagcttgaaaaatctttaggttgattatagttatgttttatttataattaaaatagtaatagatttgcattaatgtgtgaaatattgaattggtgttatctgaatctaatgtttccaatactgttattttatacttcaggtagttcttttcctttaaggacataaggaatgctgtacccaaatttagagctttataatctctaaaatgtttcactttaccaggcacatgttgaagtactgaaaaatactcatctcgtctctattactgtctgtgtagattccaaactgggggtctggaatagtttatacaaagcaaatagtatgtcaatatatatttttgtattggagtttttatctttttcttgtgagagaaaagtaacttaccaattccataccatttttttttccttttgtgtgattagaaagtatttttaatatcgttttgtgttttcgacatatactagttaaaagaattgtgtcaggagcatattcatctttcctgttccatttgtttccttaaatcttaggtcctctcaatcctagggtcagaaaaatgttttaaaatattttatgttaataattatggctatgtttctttaatggttgtcttgtgccaggcactgtgctaagctctttacgcgtattgtcttttggtattgctaatagcttatgggatagatgttactgctagatgaagaaacatcttcagagaagctaagtagctctaaggttaaacagttagtagaggaacagatatttgagtccacttttgtcagactcaaaatctctttacttctatgtgctgtagctctagtaactacagttggtttaattatctaactggttaactgaatttctgcaggacagcttttgaggatgaggatgcatccatagttgtatagacacgggctgtaacttacgtatgactctgcagcatgtaagctctgtcatttttccttgtgcttcatctttttcctctgtgccatttaactacttttctttctggaactttaaacattcctttacgttcatttcttaatcttgacctaacatcttggtctttttctacttctgaaaacaaaggaaaaccaacaaaccaactaacaagaaacttaacaaaaccttggtccaagtttccgagctctgatggaatgcagtcattcatactgcatttattctcttcagtgctggatttctttcaagaggcttatgattccctaccctttattacttagtaatcttttaactgattttttaaccaaatactttatgatacgaaggagcctgtctgccaaacatggcatttattaaacagtgatacatttgaaaaatacatatgtggagctgctaattagagaaacagagaagcttaaaatttttc

SEQ ID NO: 96724 - DNA, 200667 bp, Homo sapiens
  misc_feature (1)...(200667): n = A,T,C or G
gacacagtctctgtcacccaggctggaatgcagtggcatgatcttggctcactgcaacctccgcctcccagattcaagtgattctcctgcctcagcctcctaggtagctgggattacaggcatgcaccaccacacccggctagtttttatatttgtagtagagacggaatttcaccatgttggtcaggctggtcttaaactcctggcctcaagtgatccacctgcctcagcctcccaaagtgctgggattacaggggctagccactgcccctggcctttttttttttttaagggtctgtgtctcagtatgttgcccgggctgctctggaactcttggtctcaagcgattctcctgcctcagcctcccaagtagctaggattacaggtgcacaccacctagcctagtttatcccaaatttttaaatagaaatttttattcccttctctggaagaaatatgaaaaggaccaaagcaaagtggttttcacttgtttgtttgcattttggaagtgagattgccttatagatcctctttcccaatattactataaattaaactgactttaaagtgaccaactttcctaccaagcttaccgcactatctaaaggccttgtgttctaaaagcaaaagatcaaatcgtatgttttaaagaggaatggtgccattgttattatgtggatgctcactatgtgtaggttctgtgttgagttttactcagtcactcatttaaacaatttatttgttaatgcatcactttgtttattcacttaacacctgtcttgagtgcctgctatatctcaggaactgtgatagacattggtggaaatagaagtcagtgagatacatgaaggaggctagtagtaaagacagaaattaagacaaacaaacacaaaaatgcctgagaattcgccaggccctgtggctcatacctgtaatcccagcactttgggaggccgaggtgggtggatcatttgaggtcaggagttcgagaccagcctggccaacatgataaaaaccccaactctactaaaaatacaaaaattggccgggcatggtggcaggtgcctgtaatcccagctactccggaggctgaggcaggagaatcgcttgaaactgggagacagaggttgcagtgagcccagatcgcaccactgcactccagcctgggtgacacagcgagactcagtctcaaacaaacaaaaaaaaaagcctgagaattgttatgttaccaaaaagaaagcacagagtgccacaggagtcctccagcatttggctgcaccatctttctataagctttacaacaacgctgttatcatgcccactgtgtagatggggaaactgaggggtggagcttacttacggagtaagagtttgcaaagccaagttgaccaaactctacatgttcttaccactccatctccttcctggcttggaacttccatgctgaaggttccagatggacctttattttagagaccttagaactggcttaggtttacatgctccagagctcactagaaatgtcagggaaggcacagccatggggaagggggtgcactgtgccaagaattttgcttaagaagccagctcaacagtgaaaggtgatgatcattttcaagtgttcttggtttttcatgtgtcataaaattgcactattcaggaataatcccaaaatcaaattaaaaacttctatgaaaatatgaaatggaaagcttactgatgcatgcttataaactggttactgtactttctctgtggcctcagggctggagggctgtgttttttcagaggtgaccagggaccatccaaacacagcctccttccgcacttctcttaaccagcgtagactcttctggtcccattcagagagtgaattccttcattatctgggaaggcgtggtcccacctacttatagcaatgaggggccaccttcatcctaacccatagggtgcaactggccacagccttgcctatccgtataatgcacaattgtcatgttataaccacgtgggccaccctggcttgggccatgtttcctcagccccctgggaggggtggtggtcataatcatgttctgcaatcccaatgaaggctcccccccagttggggaaaagtcagcctgtttgttggggcaagaatagcccacatgggcaggatatcccctcaatgaggcagtggtgcggctcccaggggccccaggacagtagccacactgccggcacacacctcagactccaggcagcagctgctacctccagggttcagctcccagttccccggcccactctgttctctcacccttcactttgctccaagagaaagctttgtttcatgcttcagaaaactgctgtgggcctggaaagccttccaggcagaggcattctaattagtattgtgacttctctgggaaaatcattttccaggcctcaaagaacctctgatgattctctaacttttcatgagggtccctgggacatctcagccatgaagcttgttccacttaggtttttgaatcagaaatgcaggaattttccgctggtagtggctggagcttccttgagatgagtgaagagcaagtgaactctcccgcctcccaccatcaccagcctggatcaggaggggagaaggaacttgcttgcacattttgcaaccaaaccccatggtagaaaagggccctcgtagtgggtcttaagatagatgaaaggaaaaaaaaaaaagagtcctcgcttgctccatttccccagccactgcccatggatgccaccggttgatccctccacttacctatttaagtattgctccagcattccctgtgtgccaggcggaggtctctgctggggtgcagtggtgcaccctgaagtcccgttctggcaggggagacagagcatggacaaatgagcaggtggaccccgaaatgtcaggtagcaatgctgagccagaaggatcaacagcaggggactgaggtgtgtgtggggggtgtgtgtgctaaacagggcatcagggaaggggaagtagtctctgagcagagatctggtgaagtccaggagagacccatgaatatccgtgagaggcttggtccaggcagagggcagggaaggagcaggtcctgaaatgacgtgggcctggcctgtggaaggagcacctgaaggctggcatggagggagggactggccgcagggaaatttgaccagcggctccttcgtgtggcgcaggactggcagcaggggactttgaccggcagctccatcatggggcacaatcttctaatctctgataagcggcccttttccgtggagctgtcatggataaatgttttctgtagctatttgtggagcactgggtcccgttcctttctacgagagcggccgttcccaattgggtgtgactttgctccctatgggatatttggcaagtttggagacgttgtcacaacttgtgtgtgtgtgcaggggtgcgcatccagtggatagaggccaagggtcctgttaagcataccacagtgcacaggacagtctcacaacaaggaattatccaacccacaatttcaagtgtgctgaggttaagaaccctgaaaccaaacaggagtgtcagcgagcacagggaaggttgcacgttttgactgacagtcactggtaccaggctctggagggccttgtggggtgatggaaggtatatggggaagaggtgctcggcctctgcaaatccttctcccatgggagagaagtttgcatggctcacaggtgagacccatccccacagtgaccgggacagagcagaccactgcctgggccactgcctcggcctctcgtacagtttagcaaagaccaatttcagagcctgagaccatgagctctggcctaggatggatggatggatgctttcactttcttgacaggtatctccaagacccaaggccatggctagcccatctcacagtggtgctcactgggctaagcaatttgcgcacattgacttatgatctgccctctgctacagcctattttctacatggtagtgctaagcagtgagcaggtacgttcctggtgcagggtgtttgcctttgctgtgatctcatctgcctggaatgctccctcctcatttctgccctttcaccatggggggtctcagctggaacactgtccccatgcagaggcccttagccctccaattcgtttcccttatccttgtttttataccacttactagcctaattgaaaacaagctgctcaaatgaagaagtcattgtagtataattaaattactctggtcttggaaacaaaaaatggaggaccctcctcccaaggacaatttcagggaagaagcttccagctccaccaccagcacccaaagctgaaattctacctgaacgattccctgatttttatacttggagcgcaataagtgtattttaactgtttacatttaacatataaatgtaatttatatgtcggtattgacatgtatccaggcttggcttctgtggcccctgctgagactggccccctgcccctcagagcagagctctaagtctcagtctcccagggccctttctctgggtcctgcaccctcctcccccaccacctttattaaaaaaacacctgccccatgtcatagcccctcaggtgccggctcaattgaggtgtccgtagctggacagaggtctgatgtgcttcttggtgcaggacgtgctgggtgggaaaggaggaaagggtgggaagggagtggggggaacagcaaccggggactgggagggagagggcagggggcaccccggaaggcaggcaggctcacctcctgtcccctctgggctggtacccaccccacttgatgctgcctgaggcggcatcctgtctggccctgctcagctgtgagtgtgccaggcccgtatggttaccccaggaaacgggagctgcacaaagccacgtgcagaatcgcgtgggagtttaataatcccggctggtgattgctgccccacggctgcgttcctctccatcagacccctcataggcttccctccaacccgacgctcaagcttccgaggcctgtccgttctctgaagcgattctacaccttttaggctctggactccatgttcctaatttgtttttggagcggggggtctctcctcacttccctattagctcacgtcatctttgtgcaagaaggatcacatgtcagccgtggggaagaaagggctggcactgctctgaagctgctgaagttatgacattaaggaaaataagccagcttcattgggcttggggtaggcgcctgagcattgggacttttaagagtttcccaagagattttactgcagccagggttgaagatcactgaattgaatgatatgttctcaatcccttaaaaaatgtatatttgtctacataaatatatatctatttttcctgccagagaaaggtggggtcccactggcttcagctcctgcgacccctcccccacccccgcactatggctgtggtacatcagtattcatttacctgggggccgcctgtggctgtgtgacccaggacaggccctctgacttctctgtgccggagtcgtctcatccgtgaaatgggaatcgtcaaggcatctacttcactgggtcgtcactgcgcagtcccatagcgccccacgccttgcatgactttggctcattcctcataatcaggccttttgcttagcatctctttttaaaaacatctggttgtggtggtggtcgggggcggtgttctttccgggggcatctggggtttgagaagcgaaggaccccacagccttccctctcctgtgagtgttttcaaagttaactttgggacggttctcccggagggccagacagaaactcaaagaaccggcctcaggggatctgagcaaattccaccgtcgtcaattcctggtgctccgtgaaagatgctctttccctcggggcttcggagccggagcatttgtagacagttcctgcctcttcactcggctgccggcctgggggtcccgtcgcctcccggagccgcccgccgcgtcccccagcccgcgccgccctgcgcggcccgccggcctcctcacctatcagatttcctgtgcgcatcgccgcgcgctcctcccacctcctaaatgcggagcggagcggggagcaaaaccatcctcggcctggacccagcgcctccggggaccggccgcgcgccccctgcgtccgcgggccgggatgcggctctgagccagcggcggcttccagcccgactgggcctgccggggctgccccgcgcacggtaaggcccggggctggggcgcggggcgcggggagcgctggccgggagcggggggccgggtcctgcggcgcgcgggggcgtgggtgccgggcgcaggggaccgcggcgcggccgcgcactgcaggcgtgctcttctgttttctccttcgttccttttaaatgaagggaaagaaaattgttacagaccaaatgtcatcaaacttggtgtgaaaacatactcatttataaagtcttatcgctactcacgccacgccccgaggaagttgtgttcctgggtgggcacggtgcggacacaagacttagggaatcagcactggatggaaacatcgcacaattaaaaagaatggcctaatcttaagcaacaacaacaaaacaaactctgaagcaccctgcggcaggcagcttctgcatcgtgggggttgtggaaggggctgatgggcaggatcatgagaaagacagcttttcattaagagatgacaccaggggttttgactttgggaggaccagaagggagtctgtaggtcattgctaaatacagtgaggtaccttaagactcagtaatgaacattattttaaaaacaatatctgtaccgtgtgtgtgtgtgtgagtgcgtgtgtgtgtgcgcgcgtatgtgtgcgcatgtgcacgtgtgttctcacacacaccgcaccataattttccttcgtggttttgtttcgttttttgtttaggtttctgactcttgagggataaatacagcttccaaataatagcaactgaatctgcagtaatcagatgttggaaaattatttttcactggtcctttatgttagcatagcaaacttaagtctttgttatatgtggccacctattgtaaatattaacattacttctcatctccacatcttcctcatttactatttttgtctttttcaaagagatggagatggaggaggagtagaatttaatgaagatacagatctggggaagtgtcatgtttcgttgggtgcttggggtaggcagtggctgctgttgagagtattttacagatgtaggaagtcttcggaggggcatttctaggtaaatgcatgctgattctgcccatctttacatgtaccttttgtggtgtttcctctttaaaacagstgcgtgtaatatgcaaatttggtttcaaagggagaattttatatcttttaaggaatgattgcatgtgtattaagtcttgtttcctatctcctttcattttttccttctcttttaaagtcagttcgtcttaagtagtttctttgttaggtaaatttaataataataaaaatctgacgtgttcaggaaggagctcagtgtgaggcccatggacgttacctcctggagatgcaaatcggaaagagatgtttcactatgctgtcacctcagaagattgacaaggacaaggttgtctttgcaaaggttcttccagacaagggcatcccttcttttgtaggatttctaagtaggtactttgaataaacaagggccacctttaatagttggttttatgagattctgcatacctcaccatggccaaacttctccacacggatggtaaccttcatccatgcagcagaggacacgaaggtgtagccctccctcctctgtccctggacagctacagattcaggccagttcagacgggtccaagaagagtttcagggtctccatcttgtccttcctgggcatggaactgagcccagtactggcatcccargggatgccccccatgcatgcttgtccatttaactgggcgtctgatcagatttctgcttggttttctgccaggcctagagcctgatcctgaatcctggttacagtgactttgaaaagctgcctgggctttatcagcctctctccccgggtgaccgggatactgatgaggatggagtccctccttgtacctgacagacgtctgtctccctgactataacagccttgttcctgggtcccacccaagcttcgtggccctgcataaacccaggtttgcagcctgtgttcattgctcttctgtcgacctttctcctcctactgcttactttcctctgctgccccttcctgctcccaggtaagtccttggacttggtgagggctcccgtattccttgttaattccagtttcttctcttttgccttggcctgaggatagggttccatcaagctttgtggctgacctcttccgagttttgacaacacttctttgcccgtggaaggagggagttaactgaccctgtgtctgaagatgaaaggtgaaggggtgggtaagatgatttatagagattttgagaactaacatggccttcagttgaaaaccagaattaggagctctgagtatcgtgcaggtgcagtgagattcatttgaaaaacaaaacaaycggaatttttatatctaattttgaacatcatccccacatccttaatagaagacatcggagccagaagtcgtttgggaccaagttgggtaaacagagtggctgatcattcattcacgcattgaataaatattcttgcagagataaatagctcaggctctgcagccagatgactggttgcaaatcccagctttgacaggtacttgttatatgaccttcggcaagttacttaatttccctatgcctcagtttcgttaattgaaattgaagagaataatagtacttatttcataggggtggttgtgaggattacgtggttctgtatataataaagaacaatagaacagtgccaggtatatacatgctacttaagttatagctattgttgttattatgacttcttgttgtgtgccaagcactttaccatgctgagtaataattgttttggatcaagaatgaggtatggaaagaaggaaacaaaactagttgtttcttattgaattttaaaaaataayatgatttgaaaagtaattcccaaaaagttgtgagaagaatattgtgagcaagggcagaattatttttataagatgactaacatcaggggaacaatatttagtttgttatttaaattttggtccctgtctttttttttgtttaagctgtagacacaggcaggagcattgcttgagtccagaagtttgagaccagcctggacaacatagcaagaccccgtctctgaaaatgaaagagctctgattttttataattattggaaaccattcctcagtgttcctattcacgtttgcaatgctctctctctttttcttactgtttctaatttattcatttttccatagaggtgttttggtgatcactgtgcttcctaaactctgcaagttccctttttaatctcgttccgtctccttgtcattgcttgtggctctgttttgttgatttcctgttcttagtttcttgtagcaataaatcatttactgtgaaaacttttaatccactgctgggagtatattttcttccagactgtggcttcttcacttgtcttttgcacatttccttttgtttcatttcctccttcctttctgtggtatttatgcatatttgctctgccatttctttatttgtcaagcatatttaacaagggcaggttcagctgaacctttagataacaattttttgaattgtcctcgattgcttctctcctatgtgaacatcgtttccttcccagagcttcctttggtgtcctggagatacagtttatcagcttttctgtggcctgaggatatgaaggagcagaagcagtgggaatgatggataatcatgattggtggatttagtctctattcattttgattaaatttattaaaatttatagttttattaaaagttgctctcaggatacactcaggttttggattgcccccaaattcaggatgtaacttggaggcattacattttttatttttcaaattttgaagtatttcaaacatgcagaagtgaaataataatagaaaaagcatgtgtgagtccacatcccagctctattgtgtcctaacacttggccatacttgcttagatgtagaagacaataggaaagcattgttgaagctccctctgtcccctccctagttctccccatctcctttcatcccttctcactatcctgaattattactgtcttttccatgtgtgtttccacatcacttctatgtataaatctgtgattaattatggtattgacttcaatatttcaagctctctaaaatggtttcgtatggtcctactgaagctctttttgattcattgttttcaatatttatccatgttgagacatagcttgtattactccattttcacactgctataaagaacttccagagactgggtaatttataaaggaaagaggtttaattgattcacagttctrcatggctggggaggcctcaggaaacttacaatcatggcggaaggggaggcaggcatgtcttacatggcctgagagagcaagtgagagaacatgtgagcgtgtgggaaaaactaccatttataaaaccatcagatctcatgagaattctctcactatcaggagaacaacatgggggaactgccttttaatccaatcacttccctccctcgacacttgaggattacagccggagatgagatttgggtggggacacagagytaaaccatatcacagctgtagttcaagcttgtccaacctgcagcccaggacggctttgaatgtggccccaaacaaattcataaactttttaaaaactttgagatttttttaaaagctcatcagctatcgttagtgttagcgtagtttatgtgtggcccaagacaattcttcttctaatgtggcccagggaagccagaagatcggatacctctgtgggtgtagttcattcattttcattgctatgtaaaatggtaggctgaggtgggaggatctcttgagcccaagagtttgataccagcctgggcaacatagcgaatcctcatctctatgaaaaaaataaataaataaaaaataaaaaattascccaagcgtggtggcatgcacctgtagtcctagatacttgggaggctgagatgggaggattgcttgggtccaggagtttggggatgcagtgagccatgatcaatccaatgcactctagcatgggcaacagagcaagaccttgtctcttaaaaaaaattatattgtaggattgtactacaattggctcagctattgttttgttaatggacgtttagatgattttcatttttcatataaaaatgctataataaacattcttatacatatctcctttgcatacatgttagagtgtactttagagtacatacctagaaaagatgcattgggtgaaaaagcatctttcctagatactgaagaatgttttccaagggatttgtaccaatttatgctcctacatactatacctctaactcagttcctgtttttccacagcttccccaacccttagaattattggatttttaaatttttgttattgtcatgagtatgaagtagaatctcagtgttttaagatgcattttcctgattctagtaaaactaatcatctgtttgtatattatgtatctcagccatttggatttcctcttctgtgaatggcctgttcatgtattttgatcatttttcatttggaatgtctttttcttatagatctatagaagctcatttagaaattctagatccttaattttagtaatatacattgcaaatatctactccgtctgtgtcttgtatttttacattttattgaacaataggttttcatttttaatttggtgaaatttaccacttttttttaatggtttgtgctttctcttaagaagaagcttttcatcttatgaaattcttccccactctaaggctataaagattgtctcatatactgtatttcttgctaaaagccttcaagttttgcttttcacatttaggtttttaatcctccttggatttatttttgatatgttgtgagttagggattcaaattcaattttttcaaatgaatagtcagtcctaggttgttaattcagtactcctttttctggtgatttgtaataccatttgtaataccatacttgtgtagatctgttttgaggctatttattctattttatggtctgcttgggctgccataatgagataccatagactggatggctaaacaacataaaattattttctcacggttctggaggctggaagtctgagatcaaaggtgccagcctgatcaggttctggtgaggaccctcttcagggatgcagatacatcctaaagattctgtctgtgtccttacatgcagaaagagattcctttcttcttatgaggccaccaaccctattgaattaggatcccaccctatgacctcatttaaccttaattacttcctcaaagctttgtctccaaatacagtcacattggggttagagctttaacacatgaactttgggtggacacaattccgtccatagcattggtttataaatcacaagtatcttattgatgtaataagtttttatatatactagatcaagttaggtcaagttttcccatcttgttttgctttataatgtatttagctattttttgccttttagtctatgtacgaatctgaggttcagttgtcaagttcatttccaaaatttgtaggtttatttttgagatctctgttctgttttgtcatgatgtattttgtttgtttctgcccaaacaccacaagttttaattgctgtgactttataatatgtcttggtctgggaaggtaagttaccactttgttcttttcagccattctttttcttttctttctttcttttattttttttaggcagagtcttgctctgtcacccaggctggagtgcagtggtgtgatttcgtctcactgcaacctctgcctcccgggttcaagcaattctcgtgcctcagcctcccaagtagctgggattacaggcgtgtgccaccatgtgtggccaatttttatattttttggtagagacggtatttttggtagagacagtattcactatgttggccaggctggtctcgaacccctgrcctcaagtgatcctcctgcttcagcctcccagagtgctgggattacaggcgtgagcctgcccggccataatattcctaatcttcagaccttgtttgaatttttccaattttcctgtaatgtcctttttcyggtccaggatcccagccagaatcccatattgcattgggttttcatgttgctttattcatgttcaatctgtaatagttcctcagtcttctcttttgtaaacttgacatctcagaagagttcagggtagttatttgtagagtattcctcaatttggagttgcctgatattttcttatatgcagactgaagttatgcatttttggtaataataccacggaaatttgataaatgtgatgcattttctattggttctgatagtttacatgtagagtctcttggatgttttatgtagataattgtattagatattttggttatttgtgtctttctagcacatgggaggattttgcttctcccacctcttgaagttacgcaaagcatgtggctttycctggccaatgaaaagggagctaaagggatgtgtgctgagacattgaattgcaggtgcatgatttcccagctgtctttgctctgcttgtttaaagcaaatgttgatatgagcataccattagatcaaaatagcatatgataataaaccgacctttgtatgcttgccttcaagagtagcctgaattagcaattgattttgcttatgagaagataaacttgcagtgttaagaccccgagattttggggttgtttgtggcataacctagcctatgtggtctgacataataatcatattgtctataaacaagaatagcttagtttcttctcttttatttcttatatacatcttttctggtcttattccattggctgggacctcaagggcaatgtttaataaaagcagtgacaggttaggtacaatggctcatgcctgtagtcccaacattttgggagaccaaagcaggaggattgcttgaggccagaagttcaagactagcctgggcaacrtagtgagaccctttctctgagaaaaaaaagtgataatggacatccttgtcttcaccttcaccttaatgggaatgcttttaagtttcactatcaaatatgtctattttagatatttgatggacaccctttgtcaaattaagaaagatctcttttttattatgaattggtgctgaattttattgattcttttttgatgtagcttttgaaataatcatagactttttcttcctttaatttactggtataatttattagtgcatttcttgtgttttatttaggacctttccatttgtattcaaaagagatattgttcataattttcttttcttttactatccttgtctgaagttgtgtattttttctctgtctcttggaaatggcttgcacaaaaaggttttttttttttgttgttcctttaaaatttggtaaagctcacctctaaatctttctgggttgttgcatygtagagtggaggcagtggacttctgatgacagattcattgtttatttaggttctatttccttttgtttattcaggttctattccttttcaatgaactacattaattcatgatttgctggaaaattatttcaaagttttgaaatttattggcataaaattgttcatagtattttcttatgatttaacattttaaaaatttctctgttgcagacctttttgactttaaatatgatttatttctgtctctttttttcttgttaaatcttggtaaagttttatttgctttattagtttttctgaaagaaacagtttttgagtatgtagataatttctttggttgttttattctgtgtatcaatgacttgatagttatatcctcgtctttttctttttctcacctttcaaatgtttattgctcttttttcgtagcttcttgaagtatatgcttaatgtattctacatatttattcttttgacctataactttatttctaaataatttttaattgctgtccacaggttttgatatgttggtctttcatttttatttggtttaaaatatctattatgatttcctctttaagccataagtttttttgaggcctacttttgaaagtttcaaaacacacatttttctccagtatgtttttattgttgatttttaatccccataagtggtatgtgtgcaattgaaaagaatgtttactttctgtttctgtatggtttaataaatgaagtttattaattttcattgtcaaatcattattactaatttttgttctatttggttacacgtttctaaaagaaatgtgtaaaaataaaatttattcttagaatgctatcaattttttgttatatgttttgatgctgtgttgttgaagcttacaagttctaaagatctatattatactatctatattataataatttatggtgaattgctatgtagtgttgatacttttggcttgaattctttttgccttacatagctgcattaggggttggtttctttttcttttctccccctaactaatagcaagtatctttcctgcctatcgttgtagctttactttgggtgtgtcatttgaactcgcatataggtagattttttccaacctgcttattgtgtttctaagcaagtgaacttaatccatttataatatacataatttctgaggcctttggatttaattcttttatctcwttatgtgttttctttttcataccttttttctttagttctcttttcttcattttttcgtctcctgttggattgatacagttttctacattcccattttacttcttttgctggttttcagactgtagactgtatatatatttttaatgattatatttaatcttgaatcatgtattttaaygatatataaacatttttggtattcctggtattttctctatcatgacaaggacctcagcacaatttaactaacaaccttgttcccttattttgtaactattccttagtttgaacttgtaaattttcttttcttttcttttcttttcctccctccctccctccatccttccttccctccctccttccttcgttccttctttccttccttcctccctcccttcctccctttctctttctytctctctctctctcttttccatccatccctccctccttcctccctccctccctccctccctccctccctccctccctcccttccttccttccttccttccttccttccttccttccttccttccttcctctgtttctcttttcttgggtaatttcctatatttttggatgttttaaacatgaaaatgtagttatttttatgggcataaattagttaaatttaatgatatatttgatcaatttctgtgctcatttttgtgtcctgtatcccttgacatacacatgagtttatgcaacttcttgctgaactacattcattaataattaatattattgaggctacatgggtgataagctttcttactatttctgtgtttgaaaatattttaattatggctttgcttttgtgtattagtttaactgggtataaaattttagatgggcagttacttctttccagcattttggtatcttctatatgtattattggtcatgggaaatggctatcagcttaattgtgactgttttgttgataatttgcctttctccacattagcttttaggactttctcattttcgacgttctgtggactcactatgatgtggaagataggtttatctttatcatggtgagtacctagagtccagttttgatttgagatctcatattttcaattctggaaaattctcagctgatatgtcttcacatattttttcctctgcttttcctccattcctttcttcaggaacccttatcagagtaagccaaccctcttcatgtatctgctacatctcctttgtctgtccaataagtcctgattgttactggagacagttatctctggggaaggagaatgattctcctttcagtcacaaccttccttctctctgtgaaaagtggaatggcaagtctgaaggtttctttctcatttatctccagaggatcatttctcttaagtctcctcttcaccacctctgtttacctttctccaatctgggaagggaaactattaatgaaactttgatgaatttcagttcctcaccccttttctgcattcgctccccccataaaacatacatgtaaaattctggtgtttttggtgtttttccctggccaccactttcaaggagtattccaaaagttgtgtccctttgtttgggtgctgcttgtatatttttggccaatttgaacttacttttttcatttcagtgtgggcaaagtagagaaacaaatgcccccaggccctactacacatttgagcaataatagttgtgaatattattcaactcatcagcagttgctcagagtgggtgttcaatggcttggttttgtagggagtctggcayaattcccaggtgtctggaagctttgaagagaaacaggtgcctattataattggatataaatgaaggaattgaggaaattgaatgaggcaaatggtggagtgctggttttactgaggtggaggtgctgatggaaggatggtggtggacattccatagacaatgctgcacagcgaactctcaaaggttttctggagaatccataaataactgaatttggatttttcagaatttggcttcttcaaggataaaaatgtgcaaattacctctttgctagttgttagctaatcagtttacctaaaaaaaaaaagtgcaaaaataaaatcacctcgtccaaggcgatagttttttttttttctttccatcctcactctcttgaaaatcctgtttgtgcttctactctgagactcagtttaccatctgactccctccgagggagaagatcatttgcaggaaggataaccaaactacatggaaaatgaggattttcctctgggttcttctttgacggctggctctcaactccacattgtagactatggtgtaacacttatgtccaatattacacacacactttttcagtttcctgttttggtgacttttcatacatgccacttacacatgtctaaaggaagctctttcactgatgtctgtagccacctatggcacaaaaagccagggggtttgtcgcatgttattccatcaggtagagggaggagtttttccaggctaatgaaacatgatgatgctaaatggttagtgaagagtgatggagttagaaagcagttttcgtgtgtgatcagtcgttctgagcctgatggctctaccacgcctgctaaccacctcggttgacccggctgcaaccccactcggtcsatcttttatttatctgatttcctcattagtccatggggtgtgttcctcgcaagcttgaattcttttcgcctcacctagctgcactaggggttgctcactttgtttttcctttccccgctcccaactatgtgcaggcatttgcagcaatttattagtttcaaataaatttgggtaatcttgcctgtgagtctcctttttgagattcattatgcatattaattttggaagatttccaaaaagtcctcaataaagaaacctgttttcatttggtttaacccagtggtttcccagtttgcaattctaccttcctctcacccccgcaggggcgcacacagggactcctgatgtctgaaggrgcatggttagggaaactctgcctccacctacagagagaactccacgttccctctagccctagtcttggcttcccttcaagcccttgatttttttctttcttttattcatagtttttttgggggggtataatcaatattatgcatgttatctgtaaagtttacaattcagtgaacccctaactcttttaaaattgtggtaaaatagacataatgtaaatgtaccattttaacgacagttttgtggcattttgtccatacacggtattgtgtgaccttcactactgtctagccccaggacattttcattaccccagaggaaatcttgtacccattatcagtcatttytcctccctacccccagcccctgggaacccccattctatttcctgtttctatggattttgctactctaggtagcccatgtaagtgaaaccatacagtatttgtcctgttgtgtctggtttattttatgtagcatgtcttcaaggttcatccatgttggagcatgtgacaraatttccttgctttttagggcagaatagtatttcactgtgtgtatatatatagcattttgtttgtctattcatctaccagtgaacgctcgggttgttttcaccttttggctattgtgaataatgccactatgaatatggttgtacaaatatttgtttgagtctttgctttcatttcttttgggcatatgcatgggagtggaattgctggattatatagtaattctgttttaagttttttgaggagctgtgatatcattttccacactggctgcaccattttatattcccaccagcagagcacaggggttccagattttccagatttccttgccaacattcgttattttctgtttttttttctttttttcattaattgctatcctggtaggtgcgaagtgctgtctcattgtgactgagatttgcatttgccagtggttggtgatgttgagcatcttttcatgagcttattggccatctgtatatcttctttggagaatgtctattcaagtcctttgcccctttttaaactggcgtttttgttttttgttgttgacagactcctaattcttaacagatatgatgctctcactgtgatgaacttgacttctgggaagatactggctgcattcatttctcttctactttcctaggccaatcattattctccagcagtcatcatttcttacgttcctcgcttgtcctgttctcaggctggacctaagagctcattccctcccatctcttcccacattccatatcatggactttcttcttttcagctgttggtactgtggagggggggattttattgaagccaactgccatgatcaccttccttttccttcctaaaggattgtcatctgctttctgattttagccacagtagcttggctgaggttgcattttggaagttcgaggcttctggctcccagatttcctgtagaactgacactggtgactatcctttgttcttgaggctcctttgatctctgggacactttcctgtgatgccatgaaggggaacgagcaggaagtttagggtgcagamtttggggtgcatcacctggcttcagatgctatctttgcccatgaactcactcttggtaaagtcaccctgtggggtttctccttagtgaaagagcacattaacacctaccttgcagctggtggtgaggattcattgggaaatcacatgaaaagtacttagaacagttgctggcagagaggaagtgttaacaaggtgccactgttggggcattaagctggttttgctcatgtattcagtcgatcccctttcacctccatttccccccaaccttttttttttctaaattctgttctttgctattcatttttctgctcctggacattttcccattctttccatttcaatattcctctttacacaggagattccaatcaagtcctctctctaccttttatttattcatttattacttatgtatgtttgtttatttaagatgtaagaaagcataaggtggagaggtgctaggatgtctaaatgctagaagatgatacatcttcctagctacttgacaggtagtcttttggactttaaacacactttaaaataagtgacgtacaagcaccactttaaaatactaaacattttcattttaaaccagcattactggtattataactatatgtacttctgcacatcagtgtaactgtacacagatttaagaggaaatgataggcatttatactagtcacaaaacaataaaaccagggatgaacactaagtttaataaagatcatttataattctaaccacttagaaataagaaaattaactatgaggtcaagggagaaattacgtgtgcaataacagattatttataaaacaaaaccaatgagaacactagacatgatagacaaagactttaaaatcgttattataaatacggtaagtaaattaggggaaatgatgaaccaaatgggtgaaaatatggagaaatcaacataaaaatgtaatctctttttaaagtttatctaaacttacggggtacacctgcaatttggttacatgcgtagattgtgtagtggtctagtcagggcccttagggtgggtatccatcacccgagtaacgtgtattgtacccgttaagtaatttctcatccatcccctcacccttccgagtctttgttrtctctcattccactctctacatccgtgtgcacacgttttagcacccacttagggatactgtctcaacattttagtgggaggcttcttgtagcacaaaacggtgcctaaggacatatttcctggaggacgtttcgacctttgtcacatgactccatatcagctgccactggctcatacacaaccatgtcagtgctgtgtcagagatggaagaatttgacctttcaccagtttctgtgaaatacattgctttgaagatgaaatcacaaatgtcgtcctgtacaggggacctaatgggaccatgtcgagtgattatatcttgagcagatgtaagtctttagaatggtctagattatgacctgagtgcttactggtctctggattctatgaagtacttgtttgattttcacaagatctttaagaagtagttagtgctattctctcattttacttttccattcttatttttagagaaaatcaagtcttaagaggttaactgtgcccagagtcttgtaactaaaaagtggttgacttgagattccacccagttcccttggattccacatgcagaactcttaacatcctcttaacatcctttttttttttgagatggagtctcgctctgtcgcccaggttggagtgcagtggtgcctgatcttggcttactgcaacctctgcctcctgggttcaagcaattctccctgcctcagcctcctgagtagctgggtctacaggcccacgccactgcacccggctaatttccatatttttagtagagaygaggtttcaccatgttggccaggctggtctcgaactcctgatcttaagtgatctgcccgcctcagccctccaaagtgctgggattataggcgtgagccaccatgccgagccttaacatcttgattgtattctatacgtgccatttcacrtggtctatttctcatttttcttgttcttttttcttttctatgttgattagatacactggagcttaatccattttagagtgtgagtgcatagtgcatatttatcagtaatattgttttaatatttgaattaattcaatcctgcttttaattttattattcctgctattttctataaaactttttataactttctgtaactttttagaatttgttttctaaattctttgagagcttagtctttttctttctttcataatgaacatgcttaaggctaaagctgcctctgaaagcaactttgaatgtgttaaaggaatcatatctagtgttcttattagttttgttttataaataatctgttattgcagatgtaatttttcctttgacctcatagttaattttctttaagtggttggaattttaaaatgaactttatcaaacttactgttaattcctggttttattgtttcgtgactagtataagtaggctatcatttttctcttaaatctgtgtacagttacactgatgtgcagaagcacatatagttataataccagtaatgctggtttaaaatgaaaatgtttagtatttaaaagtggtgcttataagtcacttattttagcataagtttgaattttttccaactgattttgaaaatttaaatagaatatatattctcaataaaatttttagagtaaatgactagttttggtttttgtgggaaaacggtcctagcgtattctctaacaaccaacactcaaagccagatacctgtgaaaaaactgacatgttttaaatggaacaggagacctctccaacaaacccatcaatgtttaacwatcttaatgagctttaaaaaagtgtcatattttagctgtgaatcacttcacgttaaaatctgtggttttcctgccaaagttatctttagtaaacgcgatgtattggcagctagatttggagtgaagtgaatgtgagtgaagctggaagcagattctgcaagaaacccaaatgttggaggggggttttccaagcgtcagagtcttaggtctctcaataccccctttgacactcgtggccacactcttccgccatgcccattacagtgactcactcggaactgcttgggaatcagtgacttgggtgagtgcaatatctctttcacatattgccggcttcctccatcaacccatagcatctgtgctgggtttatgctttcaagtgagaaatggtgaaatacacaaggggatggcttgcacttgactctgggatggtgtttgcatgtcagcgttttctttcacattaaattgagtggagctaaactcatttggtttcagtgaaggtagtttccatgcattcactgaaaagctgggattgctgagagtggtgaccagaagagagaaggccatggggaggtaaggtgaggcaggaatactagagggtggggcagggctcagctcagtggcgatgtttccccagcagccttcaggcctttcatcccatcatttctctcctctgataagtgtctctgctttaagagtgtttgccagacagaaataaaaatcgattgggggaaaaattatatggaaaaaaaattttcctttcaaaatattcctggagaggagaggaagcacgcatggatagaatgaatgaaatgttcttggggcacagtgccatctaatgttgctattattgcatttgctgcttagcaaagtacatagaaggcacattgcaaatattcaggtattagctgtgttaagtaattgttttcatgtagtaaatgtattagtttgcttgggctggcatagcaaagtagcacaaactgaaagccttaaataacaaaaacttatgatctcacagttctggaggctgaagtctgaaatgaaggtctcagcagggtgggttcttctgagggcgctgaaggagaatctgttaggtgcatctctccaggtttctgctggttaatggcaatatttgatgttctgtggcctgtggagcatctccctcatctccgccttcatcgttacttggtgttctctgtgtgtgcctgtctgtgtccaaatttcccctaattataaggacagcagggatattgtattaggggcccascctacttcagtatgacctcttcttactgaattgtatctgcaaagatcctatttccaaataaggtcacattctgaggtaattggggttaggacttcagcacatgaattttaggggaacataaatcaacccataacagtaaagatctattaactcactttaggaagctgatatttatttaggaagtaaatgtttattgagcatctatgatgtgacatgcatgaggtattgagatttaaacagatacgcttaaatattttcctgtatccaagtcactttcagtaaagaagtagagagacataaattaataactagaatacggcagagctatatgaaggtatgcacgaggaatagtgctggtaccaagaaaggggatgctggtgaagcctactttttaggggagatgtcagggaaatgtcactgagggggctacatttgggctgcatatgaaagcattaagaggagctccagggcagtctggacagaaagcacagcgtggaggtctgacacgaaagggtgtgttcgcaggactttaagccatctcatatgggagtgtagtgtccactgggaggtgatggattgccactgtgaagtttcaagtgtcggagcggaactattggacttgtggttttgagaagttctgcctgacagcctggtggctggcatggagctgggctgtcaggtagctcttattttccatgtccattctgttctattctactagtaactgtctgtcttttccagcatttcccaagtcttcccttaccctttrtggtgattctgcagaaggaacaagctggtaaaagcacttttgggagactggggaaaggaatacaaatattcctgtgttaactattttctggccccaagtaggctattggtgacctttggtatgttcagataagcagtgggaatggaggccggagtacagtgggttgaggttaattacgtgatggatgaagtggtgcgagtggtgagtacaggctgtctgttgcagaagcttgatttggaagggaaagaaaataagaggctgacaaggagacgccacgtaattgaggtagggtctgttgaatgttttttggggatgaaattttattttgtgttaacaaagtagaaatttacaaaggaaatggcccccattttaacagaaaaatcaataccatttgcatccctcattattaatatgcattggaacttcatccattggacctggtgaagaaggcagtcaccgtctcaccaggctggaagcctggatgttggaatgtggacatttcctactagagtggcttgaaaatcccctaggatcattctggtggtagggatgggggtataaatgtgggtgctccttgagaggaaggaatgagccaagagggatggagcccggggatgcagggagaaagtggcctttgttttatggttatgcactctatccagtttatatgtttcagatgatttattcaacaaacctttgtgtatctcttcctacttctttcccactgagctaggtaggtcctggggttcctgtgagtcctggggctgtagtcaggcagttgcaatatctcatcattctcatgctaattttttcctgacctgaagatttccattggaaaatgatgattgcactcttctaatagaaggctaagtgatttagatctgggggcagggaaatggtggctgtggttcttctagagggggaagaggatgtagacaggtagtttcatccaatgcatgagggccacaaaggtttctgtggacccctggtcttatactgcaatcccttggtaacaaggaaatcataaaactaggggtgactcatcaccactgtgatgaggtgtttctgagttcaaagggaagagtcagtttaactcagtgaaatggttattttttgtaatgacattcatttccttggttctttgcttatatgacacctggatgtacaagatggttaacagaatagtgctatggaggcactttgacaagtcctgaaccaccatctgggtgagaatatttgtaaccggcacaatacttatacatgaatggccactgtgaaatgggtttctaaggggcgatattataatttgctttcttaagagcactgactacaaagacatctcctaaactctttctttgtaaacttaccagaaacccttgtatccccatggatgaakccagagcttttcagtggctcaggtttctccttctaacagtgcttgaaattccttccacagagaatgaagcttttaattctagaaccaatgttcagattgtgcaaaggcatggatttaaggtgacagctattaacattggcaaagttctttctattgtgaaaattgctttcatatatatttggtttattttgccctccggacagtcctgggcttcattattgagtaacttattttctgtttgaagaaacggaggcttagtggtttaagaaagctgattaaagtcaaatggcaaggatggggtaaatgatggarctctaagcattgggtgtyggcgtctgtaatatttgtgcatgactgactacacagctctccttctgagtcagtggcttttaagctctttggaaccacagtaaattccttttacctcatgactcagtacacacatatgacccaccaaacagtacttgccttgaccattccccatgccttctaatattttattctacccaattctgttttcttttcaacgtcgggtcttattaaattgacttggtgatgcactaatgggtcatgatgcagaatttgaaaaaattacactcagttccttccccaagaagtagaggaaggtcagaaatggaggatggtggggaaggaatggggtgtgtgtttttccagartagggtgggagggaaatggcctctcacagcccacttgtcagaactgctcccatgtcccgatccgacttcagargtgggaaaacgttgggagctggtgaggtgggtggggaaaatcactgtctgccacacctctcgtttctggcattcagtccacttttgtggccatcgtttgttgtgctggttggctcactctgcccaattcttccttctggttgccagttctcttcatatgtctactcttttactgcgggtcgctcacatctataaatgacggtctaggttgtacagtctcggaggttcaagtggagtcttttggcagctgtgcaggccagcatttgcatccctgcaggggctgcagggggccttaaccctccccgatcagtgcctggttctctgatcctggccaagcatattggttctcaaagtgttgcctggagtctggatgtgggaatctgcttcaggccaggccargtgatcttgaacccgaggaacagaartcatcacgtttgctctatgtctatcaggaaaacagctcaaagcacattccctattcatgtcrgggcagtagaatcttcccattttcccagagacaacgcgtaatggcaggccagaggaagctctgtgatcaccctagagaggaaaacagcaggcgtaagaaagcatttgtcatctcaaggcagaaatcacccactttttacaagaatgtcccactgtgaaatcagaatgttctaccatgccatctgcaacaaaactgagggcccccgcaaagcccaccatccaaaagacatggtagcataagataaatggcaatgattgcaattaacaatggcagtctctcaagagtgggcatgcctgcgggacccgtgttgatatttggatttggatttttgcttgtttgtagattttggggtcatcttttgttagtsttgggaggtagctgtgtgtggtgaaatccgtggatttttcccacagctagaggaaataggaggttgagggcaagatgtgccatggagagtgaaggtgtgtgagtcaagggatgatcctatggtgggatgcctgcttctgagagtctcttctgccatattaacaaatcacggatgcgtttgagtttcctgtctggacacccatggtttgttattgtgtctgtactactttctgaatagggattatcttccatgctcttttttttgtttttttgacatggagttttgctcttgttgcccaggctggagtgcaatggtgcgatctcagctcactgcaacctctgcctccygggttcaagcaattcttctgcctcagcctcccaagtagctgggattacaggcctgtgccaccacacccagctaattttgtatttttttagtaaagacagggttttgccatgttggtcaggctggtctcgaactcctgacctcaagtgatccacccacctcggcctcccaaactgttgggattacaggtgtgagccaccgcacctggcctcttccgtgctgttaatcctcacattcctatctcctgggaccaactggctaaatgctgggatctgtgtttattcacctccaattgtcagttctgtgcatgtgctcttagtttccttttccctcttctctgcatagcttttttattccctttgatactccaagattagaatctttgctagggccaggactatatcttttgcattctcttgtcccagcaactaagataggacattttatgttgtggaactgacaagtttctgaaatttccatccgtggacatgatccaccataaaccacagaagttaagtactggaatgtttactatcgggcaatttgctcattatctctaagcctcagtttctcatctttagagcagggatggtagtatcacatggaatcattgtgaagttaattgagaaaatgcatgtaaagaatttaatgcagtgcttgacacatagagacatcactccattattgatatactaacttcctcaagaaattaacagaatgaaccaggatcacaacagtgagaccatgctgtggcctggagagaaggtgtggaactgcagctgtgctgggaggggctgtgaggaaggagctgagcagagaaatgtgactttagccaggagaagccagggagggatcctgggaagagaaaccccgacgcctttccttgttgttgcttcccagtgaccaaatccaacccccctgttgttgcttcccaatgaccaaatccggaggacactggccaacaaggcagccccagatgatggcattcacaggagacaggstcctgtggcttagataaggactggcacatcttcttgaggggctgtgcacacaccttattgttgcccacgaattccctgttttccacgagtccttggcctgaccagtgcttccttctgtacaggattgcaggatcctgggactggaaaggatcctgtgatcactctcctcacccagtctcttcatacggagggaagakcaaggttgtctcctgtgtggctttggtggcggtcaaatggggttctttttattggtgttgccagagtctgctggggagcagagcacacagagcatgctcagaacgtggtggtggaagggatccgctgtttctcatgacttttagcctttacagcggcaccatgtttttacactgagccaygtgttgtctttctcattcatgggactgtttcttgcaagtgtcttcctcttagtgtctgtgtttttggagggaccctgccctygagaacaggggacctgtgctgtgctcctcttgatcccctgggacatttactattagggccgagcacacggggccagcacatactttctgaattaaatttcacaaggattacctggaaagctgtgacgttttccgagtcctaaaacagaggagcactgttggttcctcccttttcctttctaggggyattgtggcagatgtctgttcctgcacttgcagctccatgagaggagaaaagcccccttcctcccagcagggccattgccactctgatgggcattacagggaatcctaaagatggaggatctgtgtgcgttccctctctggagggtagagaccaggcattgcatgccaaagcccatcaggtacgaggtaacacccagtccaacccttgctggcatgaaaccactgtgtaaactcttgtcatgtcagtcagctaaggcttacgacgttttcaactgaaaaatctttgctgcttccctgttgtatgcggaaacagctgcctgggtgtttgtcagtcctgctgtgttctgtgtgtcccagtgtccttgatggctaccccgcccagggcttctttcctgggaacacctagcaggactgctcccagctgtggttgcagagacaaaaggaacaaaggccattgattgattaacttgccaccagggaacccacctgccgtggyttttcttgcagcaggattcagaggtgctagagagacaatggtttttctagagtcaaaagggaatacttgacaagtcttctcttaaggtgtcagttttagaagcaaggagacttaattggtcttagggtacattgggcagtccatggtttggctgcaagggagcaagtgagccctttggggacattttgaaagaggaaggattatttactgttaggggcggggagcaggaagctttctgtggctggatgttttctggagcaagtcagggtcagggtgttgccttttgggtccacttgtcataatgtccttgccacaccgggccatttctcacttttatgtctgtttgatacggaagaggggaagagaagtgctggcaagggaagggcacggtccctttaaatgatactgaagggggaagggcgtggtccctggttagggctccatccctaggcctgtgcccacgaacctaggtgaggacaggcatttttgttttcctgcccaaatgttgcatttcccaagaccaccctggcctgccacacccccatactgtgcctgtaaaaaccccaagaccctagcaggcagacacacaggtggcgggacgtcgagaggagcasatcagcggaggaacacatgggcggctggacgtcaagagaaaagcacagacaggcactgacaggcaccagcaggctgcaggccaccgactggcagaaggatgcggaggcgggctagggcagtcgggggagagcccaggccgttgagcagcctgactccaggggaaaaccatctccctcctggctcccccatctgctgagagtttcttccattcaataaaaccttgcactcattctccaagcccacatgtgatctgattcttcaggtacagcaaggcaagaaccccgggatacagaaagccctctgtccttgagataaggcaggggtctaactgagctaacacaagctgcctacggatggctaaactaaaagaacaccctggaacacacgcccactggggccgcagcagtaaacattcacccctagacactgccgtggggtcagagccccacagcctgcccgtctttatgctcccctagaggtttgagcagcggggcatggaagaagcgagtcactcccccatcacacgccctgggaggaggacaagggaayttcttctgtttcatgttgacacagaggtggagtgtgtgactaggagagggattgtgtttgcgagaagtgagcgataggtggattgcatgctgactgaagccagtttcccgtgtacagctcttcaatcttaacagtagatgacaaaactgctaatgggacattgggctgggtggacctctttcccacagcctcgctcccatattaccacgaaaggaaggtccacgttaatttctgccatgtagacggaagccacttattaaactaacagaacaggtcatactccatggagtttgtaggtgaggtgccacctctcttcttttaggtcacctgactttgcctagcatgaaagataagttgtaacatgttccagaattgtgattctgtttcccttgcaagcagcttcaggcatctggctctttctttctttctttctttctttctttctttctttctttctttctttctttctttcyttcyttccttccttccttccttccttccttccttccttccttccttcyttctttytttctttctttctttctttctttctttctttctttctttctttctttctttttttctttctctctctctctctctttctttctttcttttttttkgacagagactccctctgtcacccaggctagagtgcagtggcgcgatctytgctcactgcaacctccacctcctgggttcaagcaattctcctgcctcagcctcctgagtagctgggattacaggygggtgccaccacgcctggctaatttttgtatttttagtagagatggggtttcaccatattggtcaggctggtcttgaactcctgacctcatgatccacctgcctcggcctcccaaagygctgggattacaggggtgaaccamtgygcccagcccagcacgcatctggcattttctaagtcactggcccctgcatcctgtagctctcctagcggctaatctgaaactatgggatgcagggcttgttagagcctcctctcttcatgcacgtgaagagaatgtctataaagggctaaataacaagctgtcaatcaataactgtaaaatgtaaatgatgtaactgtaaaatgtaaataaataactgtaaaatgtacctggagggctcattagcaagcctctggcgtggacaaggatacctgaagctcctgtagttgctgccatggtagagggtgggggtgggctttaaaacggtgttattcccatttgatagatgaggaaagcggaggtctgagaaggtaaataactcgcctgagctctcactcttagtgacaggcagaaacagccttgcaaccaggctgcctgtgtttgattcaaacccactgtggagcacatgctttgaaccaccgaccatgactctaggtggtgggcggtgtcttgtggttgataagcagggtcccaccagccctgcgcctcctgtcttggttggcttgtcaccctagagagtggctgcktaggagcctagttgcatccttccctgctcctgagacccctttctccctcatgctccctggttcagaccctcttccccaggtcaacagttgctctygccccatgggtgagaagtccagctcttttcaggatctatgtgtctcaacataggaaaacaccttaagagtacctgtaaggcagtcagtatttgggcctatccttaaaagttctcagacacgtttcgaaggaattaaacaattatttgcccagcctgtactgaacttcaaaactatgaggtcttgtaaaaatgaattatttgatgataaagtggattccatcaagaaagatgaaatccattctatttttttttttttgagaatgaagacagttttaatattgcctttccaacctggatgctttttttgtttgtttttcaagacagagtcttgctctggttggagtacagtgctatgatcatggctcactgtagccttgacctcctgggatcaagcgatcctcctgcctcagccccctgagtagctggaacaatgggcacatgccaccatgcctggctattttttctattttttgtagagatggagtctcactatgttgcccaggctggtgtcgtctcgaactcctgggctcaagcgatctacctgcttcaggctcccagagtgctgggattataggtgtgaaccactgcacccagctgcattcttatttccttttcttgtggtgttgaatggtgaagacttccagtataatatagtggtgagaacagatatttcaaggttggaagatgccaaaaagtagtttgccatttgtaaagaaagttcgggatattagctagagttatgcactactacaaacatgataaatctcacattactaaaaacatgaagttaaaatccatagcagttgtattttagcttccgacactacagaactgtgtttatgcctgggatttccacagttaaactggttttatgaaaataagtgtcagtgatgtctctttaaagcattaaaataaataaaaaaattttaaaagctgaaatgtgatatgaaattgatgccctaaattcttactctaactttgtttactagaatattagcattatggaatttagatgaaaraaaagttcttaaaattaagctagtcttatagtccatgtaatgcttgaattccctttaccgcgttttttaatatcttcatggtaaataattaactattttctggaatagctcattccacctttagattttactaattgtttgcataaccattgttaagtcttcgattgaatctgatctcagtattttctacccactggttcttgttctagtcttttctttctctgagacatgttttctaaatgttaagcattataagtgacattgaaaattcttcatattccatcatataattcttcatatattctatcatataatacatgctctctttctcctggtctctctcttctgaatgtcattcaggcttataagtccctggtaaaagtgagacatgtaaaactaactgtccaggagtttttttgattcatgttctaaacgctatgctttgatagccagactaagaggacttttgctgttttggtagcaaatcccacagcttcaagtagaattaatgatcyccattttacatatgaaaagtaaagaggcaccagttctttacaacagcataccagcttgacttgtctgtcctgtagtaccttgctccgtaactgttgctttccgtaggaaaatcttccctataacaggctacaagcttcaagcttaaataattaatttctcctttggctagttttccatcacgtccattcattcatcaagtgtacattgcacttggattcatgggctctgagctaggcacgagaattattaattgaagaaagcaaaggtcagcttcagagatgttcataaaatagtgtcctttatattacagtgtaatgactgctataaagaagcatatataaagttagtaataaatggtaataaattactgatctctgctctggggaaaccgagaggatgggacatttcatttgaagaatgtaggaatggctgagctgagaaggcatggaagggcattggagacccagggacctgcatagacaaagcagttgaggtacggtaacttaaggagttacacacattgaggttcctcttcttatatacctcctatctggattttcaagtttcttttttgtttgtttgtttttggatgtttctgtttgctctgtctctttctttggaaagtacttgtaggatcagctgtttttgaagacgttagaaaatacagacaagaacattttcctcactttttaaaatggattaacatatggaggaagtgggataattttgattttgtcttagtcaaaatagcctattttaaatattttgttggctgggcatggtggctcacgcctgtaatcccagcacattgggaggctgaggcaggatcatggctggaagccaggagttagagaacagactgggcaacataacgagactcccattgccacaaaaaaaaaaaaaaraaaagaaaagaaaagaaagctgggcatggtggtgtgtgccttcgatcccagctacttgggaggctgaggcaggaggattgcttgagcccgagaggtcaaggctgcagtgagccaagatcgtggcactgcactccagcctgggcgaaagagtgagaacttgtctcaaaaaaaaaaaaatttttgtaaatgttctttactaatgggatagacacagtggggaggggtagcttgagtctgttacatgaatgaaatggaatgagtactaaactggactcaatggggccattggcgagggccttgtggagatgctgacggagatgggcagcatcgcaggattgaaaagcccatcagtgcagtttcatgttggtgaaaataaaagcctgggccgggcacagtggctcacgcctgtaatcccagccacttgggaggctgaggcaggagagtcacttggacctgggaggtggaggctgcagtgagccaagattgcgccactgcactccagcctgggcaacagagcgagactctagctcaaaaaaaaaaaaaaaaagaaaaagaaaagcaaagcctgtgtgaaaagccttagcattagctctcctggcagcaacagctgccttgcctgcctctgctttcgcagctgttttatgtaggtgacaggcggacaggagaacaattgagctttttcttctggttgaatttgcgtttcctctttcatttgtgggttattgtttgaaaagaagtgtacccacattctctgctctgtcagcatcttccttcccaagttttgaagcatgccacagattgctaggagacagctgaaatttttaaagctttttattatgtgtgcttaaagaggggggagagatgctccttgatgagggaaaggtgcttagcatttggcaagaggagatcatgccttctctccctaccttcccgcagctcctcgaggctggtgtgcagggggagtatgagttttgcctgctcccctctgtggcttattttgtagtaaaatcttgcgttcttgtggaagtgattgacactgatagttctgtcaatcaaggaaaatgaccaaagaaagtctcaatcatttcaggaggtttacttgctaaagttaaggatgggcgcctgggagacaggtctatgcctttctcctaagatgattttgaggtctttagtatttacaggggaaagggcaggatattaagaaataggcaattttcatgtgagaggtgggtaaatrgtcattcatgcctttgtctggctcggtgaatctgcatttgtacataaggtaacgtagacagtagggcagaggaaacaatcagatatgcatttgtttcaggtaggcagagaaacgactttgagttctgtcctacgtccccaacacctgtgaagataaggtatttgtttacattaccatgttgaactttaacagaaatgctgtagggtaaaaagcttgggactcacaaggagtttccttgtgggcaaaatatgagggaggtatgtagcttttcatctttgtcgccattttatttaggaacccaaatgggaggcaggcttgcatgacccagctgccagcttcactcttccctttggcttagtgagtctggggtcccaagatttattttcctctcacagttccattgcaaaaagtgcgaagttcacagtgatgggaaacatagagaaggtacagcttcagcggcttacagaaccattgtctgaccttcgaaacgatggcgtgtatccctagagagagtgaaggaatgtcttgtgttcttgtwatgcacaaggagggaaaggsagctagtatttattaaactcctactgtgtgccatgaatgctttcatttaattctcacatcaaccttcagattgggcattgtgaccttttaaaaatgagagcttgggttgggagagaaaaaatgatttgctaagattatccaggagtgactggaagaccccagcactggcctccccagggtcacctgaggcttctacctccccaccatgctgcactgactgtcttgkgsggatggatgtgtgttgactggctcacccccctttcttctyactcttcttatactgccaggggtgggttgtgttgtcagatgattggcccaaattatgatgcagtcataatcaagagcatgagccccagggaatggaggcgtcaggcatgacctggttagcaacgtgctccctaagtcatggctggaagacaccacgtatttctctgctggcctgtatctactcaccctgctgctgacatccctattgtgtccaaaatcacactttcctgaccgttcccggagtcttacttggtaaccacaggcagcgggcatataaaggcacagttgccctcttcctaccatgaggtttggtccaggatcagagacaactttctcagctgatgtttttgttttcttttctccttttctgggaatctgaccctcaggtctcgccctgagtgtgcaagcttttctttgcctttggagggaggcaggaaattctcctatcctggtggactcagccagagatggcttctttttcttaagttcttccttatcagaattttcccagcaggaggtaggggttcatgatggatgcgttggtttcctcacatctggaaaataaccagtggggactgccccagcagtggtttggtgtgtgtggagcctctctgtggctgacaccacgtggtgtctccccatttcacatctgtgtgaggtggcttggacacactgaggtgctggagaccagcagcacctcctggactagctcctgccagagtctctgctggctaagaggcaaattggggggagtcatactggacttggaatagaracctgttgtccctgttccagttgggacaacctttgagaaacaccacaccccaagggcaggcagtggtcaaaaggggagaataattcactgtcagcatccctgttagccaaactgtcccgacccggggcagatcgctttgttagtataatagtttttactctgttaaacaaaggtccccacattaaaacctgttctcagtgaaatgttaggctcggacactgatcccgcagccgccctctgcctcccagcacaggtgggatatctcggatgcatttattctctccccttgcacggytggagtaaagtgcttatgaaaacatctcttttattgattctacatgctttttaaaattccattttcaagatcgagaacagagaatgcgtggtgcgaccgaaggtctcctgctggtgtggaaaggtkgcaggctgcctctgcagctttgcccggaagctggtgccccggactactgcttctcaacactcctgaggagttgcctttggctgtaatcacccaccggcctcctctgtatgaacagcacgggtgaaactcttgatgttacttcttcctccattgaataagccagattctctttcttctgaggrataattgaagtcttttgcagtgtacgtaagcaaaattacctaacgctcttaaatttttcatacaacagtttcatctggaagagaggccattgaaaccaagcatttgtgttcaagtaagaaaatgtatccaagtcacaaagaaacataatttggcttttggagacatgagcagcttcatttctcatttgttcattcgaaagtctccactgggcttctgagtgccacatcctgtccagaatgatgaaagatacagaaaatggtgcctgctgaccttctggagttattggctagtaagaaaggtgggtggtattccaaggtttgtaccaagaattaataaaatacaatcccaataattaaagtgatacagtacaaaatggggtgctgtgagtagtgaataaggaaatgaggattaaaggtaaggaagagttagctgagcagagagagaaagaggaaagcaaaactgggaaagagcaggagggtcaagaactgaaagggggttgggtgcagtggctcatggctctattttcagcactttgggagacggaggtaggtggatcccttgaactcagaagttcgagaccagcctgggtaatatagcaaaaccccatctctagaaaaaatacaaaaattccctgggtgtggtggtgcatgcctgtagtcccagctacttgggaggctgagacaggaggatcgcttaaccctgggaggtggaggtggcagtgaaccaagatggcgcctccgcactccagcctgggtgacagagtgagaccctgtctcaaaaaagcaaaacaaaaaaaaccaaaaactccacacagctgaaagggaacaaggatgtcctgatggccgagaggcagaggaagtcccttggaacaacaggacattgccagccaactgaaggagtctttggttctcaccttgaggacggccaaacttgtttgtcaagaacaaattctcaagccttgtagagttaagatggcttcgtgtagcacaattaaatctgagcgctggaaattgcttccattgcctgtggtttagggtgcctcatataaattgaaatccagcaggccagtttctagaatgatcatactcccttgttttaattaattaattaagtttttggttctcgggcctcagtctcctgagtggctgggattacaggtgtgtgccaccatgcccggggaatttttgtattttttgtagagacagggtttcaccttgctggccacgctggtccacgctggtctttaactcctgagctcaagcgatccactgacttcagcctcccaagtgctgggattatgggcgtgagtcaccatgtccggccccttgtttaaagtcttcctcttccttccccaaccctttgtctgtggtttgcatgctgaattcctatcactgtcaaattcttcatggagaccttactcaagcagcctagagtctatggctttaccattagggcaacaagcttccagaataatctgggagaagatgttctttgggagaaagcacttgtctttgttttcaaggtgttttatatggggttaaagataccatcctcctgttatctcactagatgtagacagttaaaaagcttttacaaaattttcggarttttctaatgtggttggttgcacagaataattggcagccctattaatgatgttctgatgatcctcttttgctatggtattaatttgtttagtttagttttgggtcagaagaaagacctcattgctttgattcttagcttattgtgtaatcaaatcttactttttaaaaaaaagtccattgtagattggccttcctgaatctatagacaacatatttgacactgtggacgaaattgttcaaataaaatcattcagtgttatttgggttattaatcagaaaagaatgcatcagatttaaaagaattgggttataaaaatattgactgtgcttttggctgcttagagatttggagctgcaagtaaaggtacttaagttaaaaaaaaaatagagcttcagcaggcggtagattgtagagtgaggggaggggacaggacagagcctgaatgggggccagaccctcctagcwtgtgcaccttctctttctcactgtcctgagtctgagtcccaaggccaggtgaggtcgtcttctctatgtttaggagagaataagagtctagggggttaagtgatgcttcctagcatgaagcacagtggataggttggaagagagcagcacttccctctggttgtgcattctgggggacaagtttggccctccatgcagttgagggaaatctgaggagacccccatggccactccccatgaccagtgccatgctgtatacagcaggtgctcaataaaygctgggagatgatctttgctatggactgaattgtgtctccttacaattcctgtgttgaaggcctcacccccaaagggatggtgattggagaggaggacattgggagctgagtaggttcagtgaggtcccgagggtggagcgctcgtgatgagatgagcgtccctgtagaaagaggcaccagggctgtctctgccgttgtggggacacaacaggaagccgaccatctgcaagccaggaggaggccctcgccagaacccggctgtgctgggaccctgatcttagactcctgtctccagtaccatgagaaaagacatttctgatctttaagccacccagtgtgtggcattttgtcgtggctgcccgaggtgactaagacaatccttaaaatgccttccagctctaaattcatcagtcctgagaccagtgatcatgtgtacaaatccctgtggcttttctccccagtcacttgattgattggaggcttctctgttgtattgatgaatgggacagagaggccctgctggactctagactcatgggcccgtaaaaccctgagaaggaccatgggccccctgatgtgcttggccagagcccagactgctcatttgctcctctaggccattctgagctgccctgcctgcctccagcctcctttctcagctttccctctgcacaccgtgctgtttctggaacccacaggcccttccggattccctgcctctgcctgccagcctccctggccaggtctccctgaatatccacaggcaggacctctgttctctcccctgccccgttaaagaaaagccagagctggaggtagkaggtgaagacagtttctattcaggaactattgcagtaggggaaagagacctcagtatagagccgggcttaattctgaatacagcatggacaagtggggaggtgcagcccagaaacagggtggaaggctcagtgggtggaaagttactaagaggagaccccaggggcgagggggattctggctaaacccaccttgctggaggcagaccagggtgaccagacatcaagggtgggggacgaggaaccgatcagatagtgacgttggggatctggaggcagagtccaaggtggccagacactgagggtagaagacaaggaactgatcagatagygatggtgtgggatcctggcaaaaccaactttgcaggattcttgctaaaactgggcagtgcagagacagacatggaaatgtaaaggtggaggcctggttgggatgaggatccagaggcacccaactggagtctctgccagacctcacgcaccaccctgctgtgtcagatcccagttactgcttggctcatgctgtgaatcctgaaccccgcaaagatttgtcgtcttygtcgtggaacccccagcacctggacccctgcctgccccaggggaggtgatcagaagaggcttcccgaggcagtggaagggcctgggatgaaggtgcagggctctgcttctccactgagagacaaaataaaataaatacaggtgatttctcttggtagccaagtcacaagttctactcctgtgggtcagggccccctcctcaaaaattcctttgttaaagtcctgcctcagaatgtgaccttatttgtaggtgacagctgcaggtgacacgagagcccttccaacagggcgtgttcctgccttcactggtcagctgcaaaaggcgggcacaggctgctcctgaggctgtgtggccagggcaatacctcacggagcttcctgtggccacagcagcagcagcatctgtgagcttgaaaggggatgatgagtgagacttttgtccacagttcttggttgagctgccacaagcagatgggaaaggctgagaaagaaaccattcctccctgggtggggacgcttgaaattccctttcaaccaaggggacgccacaagcaccccgttcatacctgcgtgcagatgccagcgcctggctcgttggtgaccagcaagggtcccagctgagccggggtgctctcctgtggctctggtggaacgtccacaggatactggagagatgattcaaacatcatttagatgggggagccgttgaaatagacttgacagtttgttttgcttagtagaaaaaaattaaaaaattgtcagctactatcaccatttttaaaataagattaaaaaatgtattttacaaaaaaaaaaaggtaaaaatgagcagctcaccatgtcccacttcttccaccccagcgccaacaccctcactcagccgtggtccagccagaagacaaggtcagataaaacaaccataaagaaaaaaaaaaccttcttctagagtggctgggaatgaggtcaccgtgatgtcttcccctgaatcggtgccatcgtggttttgaagtgtgacggtcactcagctcaggagtcctcgctatgtgagcctgtccaccactattcacccttggtggaagaagaccctgagcaccccaaaacatgacatccttattttcaggaacctctaactgaaattgagcccttcctttctttatgaatataggcactgtcttagttccctgcggctgtggtaacaaagcgcctcaaactgggtggcttaaaacacagacatttgctstctcagggctctggaggctggaagtctgagaccagagtgtcactggggttggttcttctgaggctgtcagggagaatctactccaggccctcccgcaggctctgggagtggctggctgcctttggcattccttggctgggagacacaaagccttgagccctgccttcctcttcacactgtgttttctctgtttgtgagtctgtgtccaaatttccctggagaaatacccatcatatgggttagggatcccccamtgacctcactgaaacttartgtggagcctgtctccaaataaggtcacattctgaggtattggtggtgaggactttaacatgggagttttttgggaggaggccctcacccacagtagtagaacttgtgactttgtcaccraaagaaatcacttattttcacatcgcaccgtagtagcagtggacatctccaaataccggcgaagctagtcctgcctgcaaagttaaggcagttttttttatcagatctagagctggaaatcattgttaaatgaggcgatgargaagtgtgtatattattctggctcacttttaaaaatattttgatccatttatttcaacataattgatttcccctgtgattctgtatgttttgtattatacatgtaaaaacgttattcagaggagttcacaggcttcacccgactgtgttgaaaggacccatgatgtaaggatgtttgttgtggggggtgcttgtggctccttaactggctctggaaagagcctacttcccatagtgaaccctgtgaggtccaattctgttcctccccytggagctccaagagaaggtcattgtccttgtagcagcaggtgcccccccaagctgggttctcactgcaggtgccagcgggctctcagtaggtatgacctggatgtgagtggtgagccaggattgaggcactcagcaccttcgaccacacttcccactctccctggggttcaagtcaggctatggaaagtgtacaccctgtttgtcatataactggatgggtggtgggcagaacgcctctggcaaggtagaccttgaaggcaaaactgagttgaggtttgttaggacggaaataattactgctgggcatgcagcacttcccaaccgttctgtgaggcaggcagtgttattgccagtttggcacaagggcacaggtgtagaacacgtaagtgccctgggccgtgctacaccaccactgtgtttgagctgagatgtgaaccagggccttctgattccaaattcctcattcctttcatcctagcaggctgcctgcggttagcagaaggggactcctgtatctgctctgcagcttcttcagctgatttataatggaaaacagagtagatattgatttggcaattagtgaaatattatgagaatcatcatagcaaacttcacagtttgatcaaggatcctgccttcaatatctggccaactgatgtgtaaaagcagctgcaagaacttcagagctgacaaaaaaagcaaactccagactttatttcctggaatctgttttgtgagacactggcccatgaaatgctctcccagaaatagtcggatttgtggtcaaataaatttgggcwattctacagaacatgtgtctttttcagagatttatttttaattaaacttatttaaaaatattaacatggtacaatttgcatatagtgaagtgtgcaaatcttcgctacatggctcaatgagtttttacatatatttccacccatgtaatcaccaccgagatctagaatagaatgtattcgtctctccagaggttcctctgttcccttgcagtcaataattctccaccaaagataaacattctgctgacttccttcatcattgataagtttttcctggttttgaacttcatataaatggaatcatttcatgtctagctcttttcactcaacataacatctgtcagattaatacatcgcatgtcaatagtttgtagtttttatggctgtgtagcatttcattcattcattctgctgttgatggaaatttcttgactagagttgtgttatcaatttattgcctcttggctccaaattcaccctttttgcctggtctctggaaatgggtctgggccctctaaatattttccctttgcaatctggctcttgaagcttatcagtggagggtcctggaggggcattgcaggggaaacagtttttccttcctggttcagggacgctggtttggtagcccctgtggtgttacaggagtacttggcaagacagcagtttccccgggtacacccgctaggtgttttgtagcagagtgcatctgtgagacaactggtgaactgcttyccttgcaacctagagggcagatttctggcaagttccagagggtggattccaaacatgttcctctaatgtggatctgcagtgatgtctctgccattcagtgggcatagctgtgcccttttagtggggtctagatctcagccctgggattgggggcattttctcagttgctcaatctcagccctargggcagtgaccattccttatatatggttgtttgtatattctttggaactgtcttgattttattactgttagtctctcattactccactcccttattatagtaaatgattctttgtatttgactttccctggtcaaggtactawgtggtttttctctcctgtttggatctagattgatacaataattttttgcaattatgagcaatgctgctgtgaacattcttgatcatgtcttagtggacataagcaataattgctgctgggtctgtgtgcaggaatgatttgctagatcatagcacataygtttatctgtagcagaaactgccaaggtatatacagctttccaaagtgtgttaatttacatgcctgctagcaaggtaggagaaatacagttgcttcccaagtagctgggattacaggtgtgtgccaccactcctggctaattttttgtagagatagggttttgccatgttggccaggctagtcttgaactgctggcctcaagtgatctgcctgccttgggctcccaaagtgctaggattacagggatgagccaccatggtcgacttcatgataaaacttcagtggatgaggagctgcctcttatgatgaacaaagaaggtggtttcttgaaatggaatctactcctggtgaagatgctgtgaacattgttgaaatgacaagaaagaatttacagtgttacatagagttagttgatgaagcagtagcaggattcgagaggatcgattccaatttcaaaataagttctkctgtgggtaaaatgctatcaaatggcgtcgcatgctacagagaaatctatcatgaaaggaagagtcaattgatgtggcaaacttcattgttgtcgtattttaagaaattgtcasgaccaccccaaccttcaacaaccatgaccctgatcagtcaggagccatccacattgaggcgagaacctccagcagtaaaaagattatgattctctaaaggatcagatgaacattagcatttttttaagcaataaagtatttttacgtaagatatgtatgttattttttaggcataatgctattatgcatttaatagactccagtatattgtaaacataactttaaatgcactgggagataaaagtatttgctcttttatgatatttgctttattgcagtagtctgtaatggaaactacattatctcttgggtacacctgtatacagaaagaaatttatcatgaggaaatgctcatgcaatgatggaggctggaaagtcccaagatctgcagtcagcaagttggagacccatgagagtcgatggtgtggccccagtctgtgtttgaaggcctgagaaccaggagagccaaaagctggcaagctctggacccaggaagagctgatgtttcagttcaagtccgaaggcaggaaaagactgaaggcccagctccaggcagtcaggcaggagaactttccttttactcacgagagggtcagcattttgttctgttcaggctgtcaactgagtgacccagaaaagctggcacataacattcaccatcgtgctgcaagagctgcaaaaccctctctgcttctaacactgatgctcagcccacctccagtgggcagggagctgggtgccgggaggacttggggttgccagcccagtgtgggcctggacagttgctgagaatctccctccgccctgtgacttcttaattacttagagggtcaccctggttgctcacttcagctcacttgggagattctctctgcttgaggccaggggtaggtccaggtctgatggggtctgaagcttatacaattggggtggggggcattcctctttaaggaaaagaaaacagcagaggtgagtcgtcctgcagcttagcttcactagtctcgtggaaaatttgcctcctaaaatgtctttcctctgagaaagcccaggcctccaaaggcccagccaggctggcgtcagtctggggtcagctgcggggaggctccaggccatgtgtgacacrggagtttaccccatcccagtttccagtggagaagcatcgttctcgtccacccccgtcatgctcttttccaccttcyccaggggaagggatattttcagtctgtacarcgaatccactgaaatgttaaggtgggcacagtggtctggggtcttcgaccttgtttatacgtggtgcctgttactggtcgggtctgtacaggcagtttccactggcgttttttaccaggccagcctagagtagaatgaccgcatgttaaaatatagattcctgggccccagacctgccagaatctctgtgagatggaacctttcaacctgggttttaaacaagcctcccgggtgattctgacactcactggatttgagaaccgtggggttgttcagacagcagggacgttgatgttgttccttctgcgttcctggtgatgctgttctgttctcccaaggcctrkgcggtggtgagaatctccaaggatacaagacagtgatctggagcgagtgtcctgaaagcagactctagcactcaggactgccaacaccctccccgggtttccttggtctggaattcccatcccctggttccacctgttacatcacacctccccttcaaggaccagtgcagatgccaygtccttcacggggctcagaatgctcaccagcttcctctccacygagggccacagcccctggagaccccttgagctgagtgctttgtccttgcatactctttctggcctcatagtggggcttggccattgtcccttcactccagatctctcctttcagdtccaggaagtgcatcttgaacttaactttccagacccycccttcagtttkccagtccttagagaggtggacttctgattcctttgtctctgtgccctgtagcctcaggtcaggcttaaggcaaggtctcctcacctggcctggggagagtcccaggacgctgcacgtgcctgtgcgggtaggatgctgatgcccagatttcccgttagagagcctttccctatcctgacggctctagctttgtgtgttacttacttgttccactttaattcaaaatgtacccagcaaccagcttgtgcacagttctctggggtttcaggagggatgtaagacataccccttgcccttcaggcactatggccagaaggggggcagtgacctaggcagagggcgggagccagcagatgggatacactcagaggagcctgcagcaggcagaggcagaggagaagggaggtctacacgttctgcactgtatttatctccttcagttccaaggttctctcctggcatctatattgctcatgagttacagagcaaagcctggtgtgatggttacttttaggtgtcaacttggctggattaataaatacctagagaactggtaaagcattatttctgggtgtgtttgtgaaggtgtttccagaggagattggctgtgagtcagtgggctgagtggggaggagctgccctccatgtgggcaggcaccatccattgactgggcccagatagaacaagaaggcagaagaaatgtgaattcctctttctctgctggagctgggatattcttcttctcctgcccttggacatcagagctgcaggctctctggcctttggacccgaggatttataccaagcaggtttctgggttctcaggcctttggccttggactgatagttacaccattggcatatctggttctgaggctcttggtcttggactgagccacactcctggcatcccagcgtctccagcttgcatggcctgtcacggtatttcccaacctccgtaatcacgctagccaattcttctaagaaatttcttctcatctrtctgtcbatctatctatctgtctacctaccgacttacctacctacctgcctatctatcttttgattaatctacctatcaatctttctatctatccataacctgttgattcgatctctctagagaaccctgactaatacacctggagtgcagaatctgctggagaaactgccattccgttattgactggctggtcaggccatacagcctggtggtctagatgtgtttggaggtagggcttcygtagcacagatagtgcctgttcatggctctgtcccaggtaaggcagagctagcttgtgctgagggcttctgctttgcagctggcctggggtggctaggatctggggacacaggctgccctttccaggctctgtctgctggtgctgcaggtgcccctacctcctccttcagtggaaggctggcccccaggtcctctttaggcccaatacagactcagccaaagatgcagatgtctcatatatgaggattctgagctgtgacttctggtggtaactccactttaggcaggaaaaatgttcaactgcccatgaaaacaaatgaccccgggtcatttgggtttggcacctgctctgccagttgggtttggcacctgctctgcctcctgggaaacagtttggccaatgcactgcatgaggtgagcgcccatccctgggaatttagagccctgtgaagggtcctgaggagaggcacatcagagagaatgagaatttaaggtttactgttaaagcaacccatagaaaaggagcagaattattcaagcaaggaaacaaagtagaaaaatatcttctttcccttgcacttggtttttatgtttctctctaaaatgtattgtgggggagaaagcagtcccccaacccccctaatcagctgcatatcttagccatgcaaataaataatgaaagagagaaagaaggagagaaagagaaagaaaagtaaaggaaggaaggagagaaggaaggaaagaaagaaaagaaagaaagaaactttgcagcatcctggagcaccagttcagacaagttctggtctcctgcttgccttctgctgtgatttctctgaagttgctgggggcaggagctgggcaggaactccccaggggtgccaagcagagcaggtagttggctaagtttgcctccaggaaagaagtcyctggagagcgagctggttctagaaagctccattattatttcatgttgcttttggcgaatatatgtagaacagaattttgacaatgaaattttcaggtgctcttttggccatcaaaataaccagctcttggctgggcacagtggcttgcccttgtaattccagtgttttgggaggccaaggcaggggactgcgtgagcccaggagtttgagactagcctgggcaacatagtgaaaccccatctctacaaaaaatacaaagttagaagagtatggtggcatgcgcctgtggtcacagctacttgggaagctgtgacccaagtcacaggaggatcgcttgagcccaggagttcagggctgtagtgagctatgattgtgctactgtgctccagcctgggagacagagtgacatcaggtctctgaaatattaaaattaaaaagcccaaaccaactctgcttttcactctttcagtttcatttcttgctgtcctctctgtcctctcacccagggtaacatttttaaagtgccgctattgtgttaagaattggatttattctctgtgttaaattctctcagcattaactacagactctgttatgtaaataaggtaaattatcaggatgagaagtgagactctaatttatgagtttatcatgtctctttaaaaagctgctaggtgctatcctaacttattaggcttgaaggattctgggggattggcatattgttactgttgtggactttgtttgccttgatcatacccattttacagatgagaaaagtgaggctgggattggggctcaaatgcgtgctcagagtcacataagtaggttggaaggtgacgctacagacayggtaaattgtgaaggcctgctggtaaggcacgagtgatttgaatgacactctttttttttttttcctagtgattcctgtcagaatcaccatttttggtaaacaaaccaagcccagaacctgataattatggagcattctacactgacagttctttgagacaaatttcctcttggcatttacactgtggctttagctttcaaaccagaggttcctcttacccagcaaaaagtgagttatacgctttcttaatgttataacgttaccatggatgatcctgaacttgccgaggatagcagagacgggtgggcagaacaggaaagaatcagatcagagactgtaaaaagtaacttaaaaaaaaataattctggcagagacagaatttgaaggtacttgtgcacatcagaacactggacttgcttttttctgggagcaggaatgctgcttaattagatcagagaagaatgcaagtggtccatacatttagatctacaatgcgtggtttccagacctgcagcttgttttgctgcgcttcatcatggagtcatagaagggcagagctggaggaccgagtgagggacctggtgccatatccctacagacaggcaattggagactcccgtaggttaagggctgcagagcctggaccaatgcccagaatctctgagctttttatcttacaccatgaagtgacagatgctggcagatgttagacctttgtgcttaactgtttaaccacacagcacccgacttctgtatgcagcgaggttctagagtttccaaaacacgggtctcctctcccacctcagcctcctagcataaaactagacacatcctcatgcttttgaggtctaatcattggattttgttcctttcagatggctttcccgaagatgagattgatgtatatttgccttctggttctgggggctctttgtttgtattttagcatgtacagtctaaatcctttcaaagaacagtcctttgtttacaagaaagacgggaacttccttaagctcccagatacagactgcaggcagacacctcccttcctcgtcctgctggtgacctcatcccacaaacagttggctgagcgcatggccatccggcagacgtgggggaaagagagganggtgaagggaaagcagctgaagacattcttcctcctggggaccaccagcagtgcagcggaaacraaagaggtggaccaggagagccagcgacacggggacattatccagaaggatttcctagacgtctattacaatctgaccctgaagaccatgatgggcatagaatgggtccatcrcttttgtcctcaggcggcgtttgtgatgaaaacagactcagacatgttcatcaatgttgactatctgactgaactgcttctgaagaaaaacagaacaaccaggtttttcactggcttcttgaaactcaatgagtttcccatcagrcagccattcagcaagtggtttgtcagtaaatctgaatatccgtgggacaggtacccaccattctgctccggcaccggctacgtgttttctggcgaygtggcgagtcaggtgtacaatgtctccaagagcgtcccatacattaaactggaagacgtgtttgtggggctctgcctcgaaaggctgaacatcagattggaggagctccactcccagccgaccttttttccagggggcttacgcttctccgtatgcctcttcaggaggatcgtggcctgccacttcatcaagcctcggactctcttggactactggcaggctctagagaattcccggggggaagattgtccgcctgtctgaggggagcccagaggcacatccggacaagtttcagataacccgtggggatagyttttgctagattttggaagagggggcgggacagaggatgctgttcttcagtgctgaaatccacgccagaatgtcggtgttcatgaagtcactgattagttcccacttggtgccccaggcaataataggcccgtctcttgggcacgcacactcttcatactaagtgtttgacatacacctggatttttgcatttcaggggtcagtatcctatgacatgatgggtgttaccatcctaattttacaggcaaggacacagcagctgcgagaggtacagaaacttgtcccaaggctcacagccagtaggcataggagcrggaatgaaaatcgagcactgtcagaatctgrtgggcagcccctgacttgaaccactcccacgtgctgcctcccttaggaggggacactgatgatgaggtctcggagccggcatccttccatccctgtcgagtcccctccacctcagctcccagtccttgtgctttttggagctaagcctgggatgaccaaattcaccccagctccttcattcacagggctggatgtagctgggattgagtccatgttatcggctcggtactcaacacaacccaagtttcatccgaggaaatgtccccgcagtggatgcagctcacatgctgaggaacacccagctctggacagagttcttataaatgtataaattaggctcagaaaccactgcattctgacctgctgtacagactgcccacactgctgacctgcctagcragcaggacatcccttctgagccatctgctgctctctcatttcatcaccccaactgtcccttgtttttgatcaatggggaccagccactgccccaggagcactttagggctctcagttcaaactgaaggacagttgaactcagatggggttcatgtgggattctgggagctttctgggaattcagttggagtcaagtcaggatgctctcaaggacccctcgggctcagagccctaaagtgggccctggtgaagcagggtggtcctgcgtccacttcccaagcctgagccaagctcatcttcattgaatgtctcatttggccgaggaacaactgaactttgtggtttgctgtttagccttcagtttgctccgctgcctcctacccagaggtttgtgcgagcctgtgttgcagggttgtataaaaccaaggtacttcgttagttttgcccattcagccatggtcacgtgacatgcaaagtaatcttgctcctaattatagaaatgatttttcttttaattttttactttaccagactttactttgtactcagagaagaggcctcacatggctgtgtcacatataaatgttggactaaactcttacttgaactcaggaaaagttacttgctgcaaaatggttttgaccatgttcaattgcaaaagtacgtctgatatcctattttgcataccatttcttgtgtttggattaagctgcttctttgtagatgtgtttcctcatcctggctgctctgaacgcactgggtcatgttcagaaaagcctccttctcaggtggaaaaaatcagggactgagcttgtcttttgaagcccaaatttaagagccacgcctctcggttccataggatgggccgcctctcattctgaagatgactgtgctttgagggagaagtcgtctgtttggcagtaggcctgcgtctgtgtttcgtggtctaccttgtcaggtgtgtgtctgtgtggccactggtctcagtcggcgaggccggtccagctgctgcctctgtgtgactggctttgggtctggccttcacagcatcagctcacagcccacagctccagggacaaatgaggacaggcgtgggctctccctactgcttctgtgtgttcttaaaggattttctttgagacccattgtttcccctcccctcccctcccctcccatccccttccctcttcttttcttttctttttttctgacagggtctcaccctgtcacccaagctggagcgtagtggcctgatctcgctgcagccttgaactcaacgagcctcaaacgagcctcctgcctcagccagtgggtagttgggattacaggtgtgtatttctttatacaatgaataattctttttcttgaggaaaaaacattatttcatgaatctagaacttgaaggaaccttagagctcattcaatcctgcctcctcttttatgtgggatgcaaacgaggctcagagagacgtaacaacttgcccaggaccttcccagcttgtttgttgcagaaggagggttccagctcagcgtgggtttcctggtgctgtcttgtctggatgtgagagtgagaaacaatgtgaaagcatgagtgaggaggccaagcagtgcttccccaggaacacccagcgctagctccagagtgggaatggagaggtccaggttggccgggccggggcttcaccgcaggcacccagagaggaaggattccgatgggcaggtgctgagctaggggctgtgtaggtattgcctcatctacatgctctcaatgagttttccgggggcagagacctgcagttgctcaggtttacagattaggaaactgaggcagagagagagagggtgaacaactcattcaaggttacataggtgaaaagtggtggaaacggggtgaccctaagctgccctgtggcctccccagccacctgctgacggagctgtgggagcacattgcattggctgctcccactgcctctctggggtgcctcctcagactcccccaaccatacacgcctacccccagcccccaaacctccgtactctgccttctactgtgactgtggcagaagccacttggcccccgtggtgccagaacccctggtattggactgactccagctcttcttccacagctcctgatgtggcctmactctcgtcctaccacctgctgtcccctctgctggatcaccccattagcacacagacacgctgccattttccacctgaccagaaatggccaccaccttccccgaccccttccctgacccccttccccgtcccgctgccccatcctgttgcgtttctggtggaaccccgcacgagagttttacttgtctgttgcctcgtcctaatccttcccttctttcccaaatgccgtctcatcagacttctgcacccccactccacccacgtggcccttctcagggcacccaccaccccctgtggctgggtcctgtgggcagttcttgttctcctcctgcttgacgtggcgagtcctcatcaccagcttccaggacaccgggtgctcttggtctccctcctccttgctgctcgccttttccatctcccctgcttgctccttctctttgctctgacagtgtcgtgctggaggatcctgggctctgcgtggggccccctttcttccctggttatacccagtcctccgaggggcccaccttgtctcatggctttaaatatgttgatgatgtttccatttatctccagcctagaactctttcttgctcttcaatccactgcctacctgatttcccatagtgaacaatccaacactgaccttctggttaactgccccacatccagcccatctgcagccattcccgtctcaggtaatggccactccatcttcctgcagctcaagtgggaagccctggagccattccgactcctctcccatctggtgcatcaggaaagactgtgggaactaccttcaaattctctccaggagccaaccacctcctgcccctccactgcgaccacccttgttcaagcctgcattgcctctcacctgcattcgtgcagctacctccagaccctccctcagcttccattattgcatcctttggtctcttcccagcagcatccagagtgatcctttgaaaatctcatttctctgctcaaaaccctcctgaggtttcccatcaccaaggatattaaggataaaaaccacatccttcataccattgtctacctgtgattccctaatcgtgtccctttgctcactccctctggcctcttgctgttccctgaacagcagtctgttccagccacagcagcccctttgccctatgtgcccatccccgtcagccttggcactggctgtcctctctgctgggagtgccctttcttcagatgctctcatgcttcgcttctttgccttgttgacatttggtcaatgtcaccttctcagtgaggcctaccctgacctccctgtaggaaaatgcaactcacctcactcccatgccccgtaccttatattgttttccttgcrcttaccaatttctaacaaagcatgtaatatctgtttattataacatatctatattttatggtttatgtttcacgcgacttgaatgtaacctttgtgtgggccgtgggtctttctctgtttccttcactgacgcaccttggattcttagcatggtcccagcacatartaratgctcaataaacatttgttgagtggaactgaatgtattggtatggtaggtgggttttagaagggaatgggtgaaccaggactgaaaaaaaagaaatatttttcaaagtaagccaacactgtggtttcacttgagtcagtaagtaggaaatgggtgcgactctgtgacctgaaaacctagaaatgctccacagccatgctcttcaccccttttcttccaaaacggaaaacctcacacaatgcagggtggacagaatcacacggtgcagtctgtgcgcctgtcctccagcccgacacctggccagtcctgtctcatctacactgtcatgcaaactcttgtttttgtttgtttgtttttgagacagartctcactctgtcacctaggctgaagtgcagtggtgcagtcttggatcactgcaacctccacctcctgggttcttgtgcctcagcctcccgagtagctaggattataggcatgcaccaccaaccagctaatttttgtattgttagtagagacggggtttcaccatgttggccaggctggtcttgarctcctgacctcaggtaatctacgtgcctcagcctcccagagtgctgggattataggtgtgagccaccacacccagccatgtttcaagaatttgtgcttcagctcagcacttagtggcagtgggaagaccagacctcctgacccttcagcctgctggcatccaccatgccttaaaaaacaaaacaaaaccctaaatgtatttarttcctgctcctcttcaaacacaccattgtaaccacataatacactgtgtgaaaagagaggaaagaaaaatccaagtcaacaataacttgccaggccttctttccttgagccccatatcccacgcccgctgtgctaacctctggcttgccgcccacacctgtctggattcatcccgactcgagccacctcctcctaactggtcccacgggcctgtccctgccactttccaatctgtcctccacttgacatttggagtaattttttaaaacagcaaatctgattaggaaactcagaggcccagggaagccagtgacttgccctctggcaccctgtcctgagggtagagcttcctggcacagggtcagtgagccccgaggccacctccctggaggctgcaggagggtgagcgtggtcaagagcagcaattttcattgtttcatgtgtcattgcctatttaacgagcttcgcagtgccctcaatttgctaagttaactttggccacgccgtccgtgagaggtcagactggtgatttccaactcccrccgggcaccgggtgctgcaccggttatcccaacaggctggcacagagggctgaaatggacttggaaagccaaataattaattttcatgcgagtttttgatccccttgagtgtggttatttttgtgcaaaaaattatcccgatgtttactttggtttcataagtaatttattaaaattccttcctaagctttaaatttcagctaacaaatatgagcatggcctctgggaatggtaagaacaaggaagcattgtgtgtgtgtgtgcacaccccaaggttgtgcagctagaagtgcagaatgtggattccgtccgctctttagggcacagctagccctgtgcacctgtagaaactgtactgacgtacagccttgcagagcctccagcttccatggtggcaggagccatggaaaatagagacccacccggtaaggaggtaactgggacaccaggttactgtctacctggtggggaagctggggaaaagggcccatgggaggatactaactggggaagargagaccttgcttccagggctgggcgacccacttacggaggccccattccatttacatctccgctcaagcctccgcctccgggttccagccctggctctgcaatttgctagctgtggccccaggtggtcattctctctgcacctcagtctctgcatctctataaaatgggatgataatagtgttcacctcagaaggttgtcagaggygtggaaattaagataattcacattgagttcttggcacggctgtgcctagcactgggtgcaggctgaatgcatgggctgctatcgcgatgttgtatctaatggcctgcagtggttgcttagcagcaatgggtttgcttggttatttcctgatttggggtaaatagatccagagaccaaggctccatgttatccccagcaccgggctgaccccaagtaccagagaggtctccatggccccaggctgcagaggacccaggttacaacttgctcaagtagacccaggatctaggcttatcctagtagatcttggtaccaggccagcctctgtgacctgagactccaagaccaccattgcagacccaggctctaagctagcctctgcaaactcaggatatatattccaaatatccctgatttggggggcaaggtctgtgtgtgatttgcagagtaacgatatgaagaaggaggtcttgttaagatggcgtggtgtggagtgcccaggtgtgaaatggttgtctcaatggaagttgtagcctcctcctcccatgacatcatcctcacacgtgctcagtgttaggcattttttccccctcctgctctgaatcaatgcgagtgagatatgcatgcgggagggacaagcttgcatggcacccagctgtggtacatttagaactcggcctcagccctccagtgtgaccttgggcatacccttcacccccgggctctgttcgctggggcagggtctgcgctctggagtcaggctgcctgggtttgaattttaccttyctcgccaagtcccttgagtggcaagttacttatcttctcattgtctccgttttgttatctgaagaatgggaccatagtagttcccgcctcatgggatgatcatgtgggttaaatgagaggatgagtataaactgctcaacatcccatggtaggtgctcagtaaatgcaggtgcttatgattatagtcagtgtttgggctgtgaattttggtggattctatggtggtgtatacagcactatctatcagtgtacctgtcagtgtctggtgatctctgtgcaaatcaaaaactcttcagattgagtctgtagggctttgtttcagctcttgttctttttcttcatttgaatctttcctggaactcttggagaagttcttctgttcgtgacattcttcacaatcagagcactgtgttcttgaccctcttaattcagaatatgtgaaaatctgaatgaggtaaaagaagttggagctggaagatgccttagaaattatctacagtatttttttttttaagataaaaccttttacagttaggaaagccaaagctcagaaaaatggagtgactttgccaggtccttcagcgagtggcacatccaggattaaaagctggcatcagaaatcccatgtcagacattcattcgtttatttattcatctgttgagtgctcagtgctttgaccgggcatcctgaatgagggtcaagctgaggttcgaggccgtgggttttgcatacagagctttcactgggtaaatacacaatgctgagaagattatcaggggcacctgatcccttgacagctgaataaagaagcgttccagtgccttctctgtgggcatcgtaagccatgtccatccatacctgctgtttcactgaaaccccacagcagcctctggagggcaccattcttataattatgcccctggatttaagaggaggaaactgaggggcaggtgactcagtgacttccccgggggctcagacgtggtggagacacaggccctcggcctccaaatgctgcctcccgcgagcagccttgcttttctccacttggcacagtggtgagtcctccgatgtatctgctttcataggaagcttgggaccagccctgcccaaggagtgtgccayctgaccccttttcctgtcttctgtcacttttttttttccaagtgttgatatgagtttcagtctgccccttcctgggcctgtttgacctcctgggattcggcacttagttatctgtgtcattcccaaggacctcccgtttagctggatcccctgacctgtcctgccctggccagccctctcttgaggttactcaagtgtccaatggcagcccaaacaaatgtctggcttcagaaaataaactcttcagtccagcccactttccctgtctccctatctaatgcccttgcaaaacaagcccgggggcgccacactcagactgtgtgtgtgtgtgtgtgtgtgtgtatctatgagagagagagagacagacagacagatctgaggctctaattagagataccatgctcagtggaagctggttctgaacaatgttaactgccccacccgtgtccatgaagggcagtggaagagcaaggggcggtttaattacctgggatgtaaaacagcaggcacccccactgccctcctcagctgttggggtggcagggtggagttgagggcctcactcgttttcacctttgcacaatcagtcacacatttgttatatgacagctatgtgccacacacccatgttcagtaaggtggaagccagctgcaggcgtggtccacagttccagacatctctgaaggatgtgacaccaactttcaggcagaacatttagaaagagtgaaataaagtgaaacagatcaaccagcctattgagtatctacgtgttttttttacaggcaagaactgaggaggcaatactatttagaatccttgataaacagttccaaaagaaaaaaaaaaacaggctttggtgactctcatgggccctccrtgccaagagtctatggctctgtgatatattaaatcaggcttgttaattatttaatctaacagctgccatgcaccctcattttaaaaacagatgaggcaatgtttacattttctccatgtcctccatttggaagtgtcttagtttgttttgtgttgctgtaacagaataccacagactgggcgatttatagacaatagaaattaatctggctcatggttctagaggctaggaagtccaagagcttggcactggcctctggtgagggccttcatgctgtgtcattgtgggcaaaagagcaaaacttgytttgataaaatcactcttggcaataactgaccctcctctyataataacattaattcattcatgacagcagaaccctcctgacccagtcacctcttaaaaggtcccacctctcaacgctgttgcactggggattaagtttccttacacatgcactttgggggacacattcaaactgtagcaggaaktatttgctttctcataacatttttttaattaattaattttcagcgtttgttatatcagaatggacattatagcaatttccatggctgtgtcgctcctggcagattttaaagttcttccagcctgattcctctctctgtttgggtctctggcatggtgcctgctggagagtagatacttgataattatctattgggttctcaggggatctctcaaaggtggtattcaggcacccacaaggcaactcccatcacaagaaagaatggtggcctgggagtgagctgtaaggttccttcaaacatcagttcctgaagcctcttttattcattattgttgggacttgtttttatttctgtttcgttctacgtgaccccaaaatctgtatgtgaacactaggaactttatcatgggctgaggtgtatttgaagtaaactcttaactatgtctctgggatatgaaaggtgcttacattctctgttgggaatgtagagagaaggatttgcagtgtgtggcccctgggaatgtagaggcatgaatttctgtctgttttcctgctgttgaaatctgagtgctaggaacggacctcttgctctcagattggccttgaagctgaagggaacctgtccaccctctgcacagggcaagagccacgccaacaggaggaagttggagtgcatcctggcacctgccaatcggaagactgacaaacaaaaaattagtttttaattaatttaaaaaatgatcttcctacttatcagacacaatcacttttaaatatgagcagaaaaacgaactccatagccaaatgcaacattttgtgtcatactgctttacatcatctattctacctccattcactggtcaaagaarcgcagagttaagttggccagtgtggcgtggacacagccaggcgcagaccctcctgccagcgaagccagcgtgaggtctgttggctcaggggtccagtccctgggtccccgaagaggtaagccaaagacatagtgatacttggttcaattcggctccagagagtatcagatgggaaatagatgacttgttttacctggtcaaataagacatcactaaaatctaccatgactggaaattacttaatgcaaccagaggagacttcgcagtcaaattttgcttttcctaaaagacacgaaattaaatttacatgtcactgaatgctatttgaaactgtcatttccttgtatattagggggatctgctagactcttatgtcattgtattttggaaatgggtatatgtccttattattggttaataatcatatttatttttaatgaaaattaaattatgaaaataatgcacttaactaggtgagttttaggttgtcgattgatgtgataattcactcttcccgaaaaattggcaaggtaatggtctgaatcggacaatccttttgtttttacattgatgttttctatatttattttgtacctggaaaaatatttttacaatttattttgattttatatgtgtagaaaaatgtactgaacaatgttgacatgcttatttttgtaagagatgggtacttcttgttccccttggatttcggaagcaaagcaatgggaccctacgcttcagagtcttaatggggtggggcagtgtccattgaggtgtcctgtcgggaatgacaagtccagggcagattatgaggcaggcatcctttggagttcttctctcaggtatattttaactaaaagctatcatttaagttgaagaaatcaagtcttgtgaattgatacgattgtacttctagagtctttgatgataagttgtctttgcggtacagattggctcctcgatctttcaaagtgtcatttaaatggaaataaatgtctgaaacagatgtgtgtttctgacttaatcatgcatgggtcaccgttcctgcagtactgcaggcctggaaatctctgcccaccgatgctcctggcaggctgcatccaggacccgctcagaaacgaatctggagttggaggcggcagggagggaggggtgcagcactgtgtgtggggaagtggtggatcctgaaggtgggcggggggtggtgcagcttcagaggatgagggtccctcctgctccctccccaccagccggccttgccatccccctgtggcaaggtgggggctgtccctggaccctggaaggctggtcctttctcgctggctgctccctcctccgggactccatgcccaccatcatctcctctcccacaatggccacttctcccttccagaaccttcctcagcacacaagcctgctctcactgcccactcaaagatgacttgctggactttccccttttctagtagtgcctttctctctcttttttcccttaaggctaaagctcctcccaagagtggccttcccctctgctgccacctcagctcccctctcctttcccccaccatggccctgaattagctgttgcggccgcaccagcacttgggttgggtcagcaccgtgtcactctgggcgcttgcctggccaggtcttggcagtgcctggcactggagcctgccctgctccctcccgcaccctcctggctccaggacatctcagcctgttgcctttcctcccctcccagcagctccctccactctttttggctcactccacctccttgtcccgccctctcatggtggagggccctggctgagaccccaggcctcccgctcgccatcagtactgcctgccagtcagagcacctgtctccccatgtgttcgtttgtctcagggccatggaaacagaacacaagccatccagctggaaagaaacgcaacaggtgtttctcttcccgtcgtcttggaggccaggtgtccaagataaaggtgtygtcagggctggctcctcctgaggcctctctccttggggtgtggatggcgccttcctcctgtctctgcacatggcctctcctttgtgtgtgtctgtctccatttccttttatattttataaggacaccagtcacattggatctgggcccaccctcttgacctcattttaacttgattacctctttagagaccccgtctctggctactggaggttggaacatcagcagatgaatttttttgacaggggtcatgattcaacctgtaacatcatgggtttcaattccatctctatgttgatggctcccaaatatgggtcatgacctctgacttttcactgaaccccaaacccagatattccagttcctgttcagcagcatcactttgatgtaaaatgggcaaagctgaactctcacttttccccttcagactggcctctctgctatctcagtatttctgctgccagtgcctcacgctcaggagtttgctttggctcctgtctttcctgaacatcctgcagcagcaggtcccgagcctcctcaggggagaagagcctaaatcgggccgttttcactgccctcagccccccacccaggccgctgtcatccgtcacctacacttctgcgggggtctcccagtgagctccctgtgcgttctttgacatgtgtgtggcctcatctacacagagtggtctctgaaatgcatgaataagatcgtggaccactgctgctcattgttctagaagtttttatttaccttcaatgtgactgtgaagtccttaccatgactcacaagatgacctctggctcctgaatgcccctgcaactccccaccaygccctgcctttcacccctgggccagcacacggtccttgcactttcctccaggcagcccagccccttcagccccgtcagtgtcacgtgtttccccaggaccttcccgtgggtgcctctcatgccataacagggcaccacagaygagtcggcttcaacaacagacctcggttctctcacagtcctggaggctggcgtcccagatcaagccgtcacagggctggttcctcctgagacccctctcctgggcttgcagatgacatcttccccttgtgtcctcatggggccatccttctttgtctgtgtcctcatctcctgtccttacaaggacacctgtctgatagggtcagggcccaacctgacgacctcattttaccttgattacttctttaaatgcccgatgtccaaatacagtcacattctgaggtgctgggggtcaggacttcaacatatggatcttggggggattcaagtccactgctaacaccgcccccccctctgtgagtacctcttgcaccctcgccttgttccttcagtgtgctctattttcttcatgtcactcatccctgcccacattttactggacacttatgcatctcttgtctctccctatggactgtaagctccatgagtgcaaacactgccttcctgcccacactccacggcatttacacggcatttacagcggcgcctcccacccagcaatccatttttctgaacaaatggatgagcctgtggtttgaaggacttgagtctgagagcgtttgactttaggagctggagggtgggtctgtgactgcactggcgaggactacctggtggaggggctgctgagtgggcccagccaggagagggtgtaaggaaagagrgcagcggtacctgcctcccgtcacgcagtgtcttggaagaatgaatgtggggaygtatttcatttcatgccatttgaatagctactagaattatccccactttacaacagacacaagtggcctgcrttagattattaaggacgccaaaggagaaataaaccgtgacatcagccattccctctacatggcctgatgactttctctagccatacagcataatgatcgaacaaagaartgccctcattgtcatgaggtccttatgcaattgtgctatcctgtgaagaaccaccaggtaggtacaggaaggaatcactttggcagaaaaccgcaagacaacacacttctgactgtctttaggtttctaggtaattgcrgtttgcatgttcagacttacagcgcctctgaaccacgacgaaacattcttttcgtcaggcatccgtggccaggaacattgtctctggcaggcctctcccagctctcagatgacagatgcgtctgtttattctctggttgtttgaacagtgctgcggccctgcaggcttttctggggcactgtcctttgtcagtgcagatggagactggagctcaacaattagattcccttcagtgatgagaacctggctgcacttcagttcagagaatatttctgatcagtgcttttagcagcgatgctttgggtaatgcttgctcatctcaggaaagaaacaagagcgtcagacaggggaggaaccctggagatcccctggcccaacctctctattgtacagaggacgaaaagcactcacagctgccttgtccacaggaaacggtgtcagaaacaaagccttcctactcatgtctctgtaattttagctgtttctagatattgaatgccacaataaatagcacgtaagatgttacattgaaaaacraaaccttggccaggcgcggtggctcacgcctgtaatcccagcacttgggaggccgaggcgggcggatcacctgaggtcagaagttcgagaccagcctggccaacatggtgaaactcagtctctaccaaaaatacaaaaattagccgggtatgatggtgcatgcctgtgatcctagctactcgggaggctgaggcagaagaatcacttaaacccgggaggcggaggttacagtgagctgagatcgcaccactgcactccagcctgggcaacagagtgagactctgtctcgaaaaaagaaacaacaacaaaatcctttctgtgttatttgctgatcctgccatatgtcagagaagaccgtagttaagactgtatataagagcagaraaaaccattctatccagaggctcagaaagtttacttttttgcccaagtcatacagctagaaattgaccctggagttttaacttcaactttactgcattacagcctagaattcaaaaatagacccaaaggtgtacatcttaaaggaggcacgctgtaattctatgctcagacttccagtcgcgtactgacttgcacttgctaagcattcatcaacgcattttagttggatgcctatcatgcatcacagctcctggtgtcatgaacttcttttctgtttaagaaagtggtttgtaaacaggcctttacaatgccacgtgatattgccgggtgcaagtgggtgcacacagagagggcaccgacaatgttttttgtttgtttgtttgtttttgagacagaatcttgctctatcccccaggctggagtgcaatggtgcgatcttggctcacttcaatctctgcctcccaggttcaagtgattctcctgcctcagcctcccaagtagctgggactacaggcacgtgccactgtgcctggctaatttttgtacttttagtggagacggggtttcgccatgttggccaggctggtctcgaactcctgacctcagatgatccacccacctcggcctcccaaagtgctgggattaaagaaatgagtcaccccccaggcctccaacagtgttcttgagaggccaggaaagctttccagagaaagtgaagtctaacctgaaacctaagtaagacctagtcacatgggaggagaagggggctccatggagagaggccagcgtgtgaaaagaagcaagggggtggggagctgaagcagggggcgggggaaggcatgaggttcaacacagcaggagcactgagtccaaagtggtaggatgcagagatgaggcctgttgtggactgaatgtgcccctctcagattcgtatgttgaagccctaatcagtagtgtaatggtattaggagatggggcctttgggagttaattcagttatgggggtggagccctcataaatgcaataggtgcctttataagaagaaacrcaagagaaatgacctctctccctgccatatgagggcagggcaagaaggccaaaaaggtgactatctgcaaaccaggaagagtggggaccatggcatgctatagagaatactaaggacacagggcaaaaaatctggtggcagaaatccaggctgcaaactgactattggttttagtcttagctctggacctcgcactttaagcaagagacttagtctctctaagactgggtgyctacaaatttttttttttttaatcagcaaaataaagataactatcctttccttaccattcacccagcgatactgttgtcccataaaaccacctgtgcataaaaaagaaaagcatccctttcttctggctcttcagctgggtgtccttgggaaggggacctcctgcatgagcttcrgtgatggctgcatgagttagctaatgctatgtaatgaattaccactccagtagctgaaaccaacatttatcattgcagaatttctttgagactctaggcatggttagctgggtgtctctggcacggggtttttcacaaggctgcagacaaagtgttggctggtggctcatctgaaggcttgactggggatgggtcctcttcccagcacacccagtgttgttggcaggacttagttctgtattagttgtctctctctaccagagagagacagcaccagcaggagatgtatttctatccatatctgtatttgtagcyctacctcgatgtctttattgcaaggaattggcttgtgcaattatagttattggcctgacaggtctgaaacccacagggcaggccatcaggaagggcaggctggaatcctttcgatgctgcagtctgcaggtagaatttcttatttctcaaaggagctgcaattctgttttttaagaacttctggttgattggcttaggcccacccacattatccaggataacctctcttgtataaagtcaactgattgtagatgttaaccacatctacagaatagcttcacagcaacacttaagctagggtcatatcaaatcatggggactgtagcctggccataaggacacaccagcctgatcattacaagttcgtttctttgcgggtgtgaaactgagggtctcagttccttactggctgtcaacagagtccaccctcagttccctgtcaggtagctccccacactcagctcacaacacagcaggtggtgagtccatgcaaggcccacatcacaatcttctgtagcctgaccatgtaagatgcaatgacctcttgtttctcttgttggattctgttcattagaagtaaatctcctggtcccacccctactcagggggasaggtttgcttcagggccgtgagtagaagtctgcaatcacagtggccctactcagtcatttctggggaaagtatctgagatgatatgtgtgaaataattgtgtgagcctgtatgtaaatattagctagaaccacaggaaattgtttatttttcacctacaaaaatggctcacctaatgtaaatgattatagtaacataggggactgagagggcataaaacgactttataatattgggggggaccaggcaagaatgaaatcttggctaaatggcaactaaaacagacagaacctggggatagacaggggggagagagagagagagagagagagagagagagagagagagagagagagagagagagagagagaaggaggtgctgctgatcgtagtaggtttgcattgggcttatttttctttctatatattgtctatcatctatctatctattttctatctatctatcatctatctatctatcatctatctatcatctatcatctatctatctatcatctacctatcatctatctatctatcaatcatctatctatcatctatctatatctatctatcatctatgtatctatcatctatctatcatctatctatcatctatcttcatcatcatcatctatgtgttatctatcttcatcatcatctatgtgttatctatcttcatcatcatcatctatgtgtcatctatctatctgcctaccaatctatctaatctgtcttgtcatctatcatctatgtattaatctattacgcattttgtactggtcagatgcwaggctttatttgagcctacagtcatgcaccatgtaacaatgttttgatcacgatgaactgcctatatgatggtggttccataagattataatgtagctgaaaaattcccatggcctagtgacatcatagctgttgtaacattgtagctcactgagtttgtggtgatgctggtgtaacctgctgggctgctggttgtataaaagtctagcacacacaattatgtaagatatataatacttgctaatgataataaacagcgatattactggtttatatatttactacgctatactttttatctcttagagkgtactcttttacttatattaagaaaggtaacgataaaacagcctcaggcaggtccttcaggaggtatccagaagaaggcattgttatcatcggagatggctgctccatgccagtgggacaagatgtgcaggtggaagacagtgatatggatgattctgaccttgtgtaggcctaggctaatgtgtatgtttgagtcttcgtttttaacaaaaaatttaaaaagtaaaaaagcaaaattaaaaattaataatttgggaggccaaggcaggtagatcacgaggtcaggagatcgagaccatcctggctaacacggtgaaaccctgtctctactaaaaatacaaaaaattagccgggtgtggtggcatgcgcctgtagtcccagctactygggaggctgaggcaggagaatttcttgaacccgggagttggaggttgcagtgagccgagatcacgccactgcactccagcctgggtgacagagtgagactctgtctcaaaaaataaaaaataaaaaaataaaaatataaaaggcttatagaataaagatataaagaaagaatatatttttgcatttctgtatatgttttatgttttaagctaagtgttattacgaatgattcaaaaagttaaaaaattaaaaagcttatatagtaaaaatgttacagcaagcaggggtgaatttattactgaagaaagaaaaatatttttataagtttagggtaggctaagtgtaagtacactctatgatgttctcacgacaaaattgcctaagaacacatttctttgaatatgtccctgttgttatgcaacacgactctatttacaatgcaacacaaggccagtgctttagaaatgttttgtctgtaccttgagaaatgaatttgttctacatttgtagcacactgcctgtgagataatagtggtgattgtgtaattcaaaaatgactacccgtagatggtacaaaggaatgagttggatagaygagttagaatctaaacctctctgagaacatcttgttttgtaaatttgactttgtaacaatatgaatatttttatgattatacaccaaaataaaaaagtaatttccaaagtttattgaaaaaaacaaaataaaacaaatgaacttcgctgtgtattgactttgtagtatggtaacatatggtttcacagtatttcaagtgactttaaaacatggtaccttgcctaccctcagtaggataaaccctaaaaacaaaaagaatggcaaaaaaaaaaatactttaaactcctttcagggatcttgtctgtggtggtagagttgatgtggtcattcctagacaattatatctgtaatgtgaaatgaagcaagtgagtaattacattgrgaaccagaatgttcagtgttgctgagaggagatgcgaatgtaagatctatgaggttaaataaacactctgttgctccgaacttgatttggcaatatcaagctacactcatgatgtaatttctttctgtcttaaaaacatttccttatttttgtctaggctacaggactagagacaatgaataatccttcagcaatgaagactctcactgtccatattgkgctaaaaaaaaaaaaaaaacccacaaacaaaacacacaatctagagatccttgaaaaaatggctgatttcagaattgaggtagaaattgtagaagataagcttgaaatatgttatcctaccagaaagcaggcaagccagcaagcactatgggatcatgtcacaaagactcaggagcctgtagtctatataacaagcctgtagtctcattacaattagttgtaataagaataattagactaggtgtggtggctcatgcctgtaatcccaacaatttgggagcccaaggcaggaggatcacttgagtctgggggttcaagaccagcctaggcaatgtagtgagaccccaattctacaaaaataaaaaaaaaattagcccaggatggtggcatgcagctgtggtcccagctacttgaaaggctgaggcaggaagctcacttgagcctgacaggtcaaggctgcagtgagccatgatygggccacggtactctatgctgggcagcagagtaagaccctgtctcaaaaacaaacaaacaaacaaacaaacatcactgcattggaatcccattagttgtctaatgatactaaaacacacacacacatcagtcatatttagaaaatatcaggggaccaattcactatttttggaagtataaacaaagagaaagggtataacatgtatcctgatttttctgtataaaatatactgcatatcaggggttggagaaccagagcttgagagtcaaattgggcctgctgctctgtttttgtgaataaagttttattggaacacagtgggtttgtctgtggcctctctcacactatggcagtagagctaagtagttgccaaaaagaccatatggcccagaaagccaaacatatttatcattgggccctaatgtaggttgaaccctgccttagggtatctatatatttgacgaggggagctatccttttttaaaaaataatttttatttttaatttttgtgggcacatagtaggcatatatatttatcgggtacatgagatattttgatataaagggagctatcttttaatagctgtattgaagataataaataaaaaaggagtgatagaatatcaccagcttgcaactattaatrcaaataggggaacaaattaataattataaatggttgctaatattattgaagagagacaaccagatactaaaggctttctgatagaattgcatgataccacctgcattagtccgttttcatgctgctgataaagacatacctgaaactsgcaatttataaaagaaagaggtttaattgagcttacagttccacatcgctggggaagcctcacaatcatggtggaaggcaaggaggagcaaatcatgtcttacatggatggcagtaggcaaagagaagccttgtgcagggaaactcccccttataaaaccatcaaatctcatgagacttattcactatcatgagaacagcatgggaaagacctgcccccatgattcaatgacctaccaccagatccttcccacagcacatgggaattcaagaagagatttgggtggggacacagccaaaccatatcaccacttatgaaatattcttgcaaaaacaaaaacaaaaaaaaatcaaatctaaatcaggtcagacttttatatctaactaccaatctacaggaaatccaggggacagaagaatctcttkactagcaacacaggcaatcagcaaagtctcggatggtgggaaactatgggacaaacaacygggtttcttccacaaatatattgtaaggaaaagagaatgcagtggtgggatggggaggagcttatggattaagacagaaagaaagcaacattgtgggcaattgcaatttatggctgtttcttattttctgattacaacacaaatactctgataaaacatttrtaagtggggaaattaaacacattctagatatttgataacatcacagaattattgttaaattttagatgtgatagttgtattatggctgtgtttaaaagagttcttgtcttttacagatgcatactggaatatttatgaacaataaaatatctggtatttgcttccaaataatttgacataattggaaggaagtgggtgggtatgtcaatgaagcagataagttgataatattgaagttggctaatagttacatgtagggttgtcatactattttctccacttttatatatgtattagttttctgtgrgtgttgtaagaaataaccacaaacttggtgacttaaaacaaggttaaatttatcttacagttctgtagatcagaagtccaacatgagtctcatggtgctaaaatcatggtgtcagtaggtgtcttcgtctgttctgtgctgctgtaacaatacctgaggctgggtaatgtataatgaacagaaacttatttccaatagttttagagatggtaaagtccgagatcaaggggctggcatctggtgagggtcttcttgctgtgtcatcccatagcagaagttagaagagcaaggaagggtaagagagagcaagagatcaaactcaaagactcaagcccttttataatcaacattaatccattcatgagggtgaagccctcattacctaaatgcttaaggcctacgtcttaacactgttgcactggggattaagtttccaacacatgccttttggggacatagtctagcgatagcggtgggcagggctgcattcctttctggaagctctggggagaatgtttccctgccttttccagcttttagaggctgcatattcctaaacttgtgaccctttctttcaccttcaaagcctcaagggcaggttgagtccttcttatgctgccatctctttgggttctcaccagccatgaaatatcctctgctttaaaaacctcctgtggttacactgggctcactggttagtccaggataatctccccatctcaaggtcagatgattagcaaccttaatttccctttgccatgtaatctaacatattcacaaagtctaggaattagggtgtagatatctktggcggatggaattattctgcctgctacattatatgttaggcattttccacaatagaatgtagaaaacaatatacaaaagttacctgaggaaaagcacacccttcatttttttctttagactgtgtttattaattgtmtgcacaaccaattaagtttagagcaaaagttgaacatggtccatggtaataaggatattaactttgccctatttatgacaccaagaggaaaatgcagatgttgtaatctcatcactatgtagattgcatctaaagcattgaatagaaagaggaaccattataggatgatgctacagataaaatttagtttgcctaatttattatcttgttttcaaagcaaaactgtaacgtggtggtgarttatataaaaagaagctaattggtaggaaaaagtcaattaaaaatagcactttaccattataaaacatttgtactcattctcattcagcttcacaacaacccttctgttgggcaggatatgtgtacttttttccttttgtaggtgaagaagttaattgagactctggaagtaaggatttgttttaacttttctccgttaactggcaagatgaggagcgggacccagctcttttgattccactgcaccaaattgccttggtaaccaccagagaaacgctgggatgtgttccgaatactctgtttattaagaaaaagatgggtgtaactccatattaaattttccataaacactagatacaccaggtataaaatttaaggtatccgtttaatggtcactgacattgggaattctccccagcagcccttcctgctcagctctcacatcaacctatgaactctgactgtgaactcccagtgcagcttttttatttcccaattaatagaaatagcatcactaaatcccataagtttccttttccgtgtacaatagaagatggcgtttcccagcgatgcctgcaattaagctgaggccatgtgactggttctaaccaataggttgcaaggagagagtcaggcgtggcttctggattgaaacatggaagagcaagtgtgaattctccttacttttttttttccgcccttagtggtgatttctgaggtcacttgttgacatggtagagccccaggttggaagtggcttaggtcttagtgaaccactgaggtactatttaacgccagtatcagagatgttaacaccataattaagagttaaccaattatgaaacagcgtgtgtttccgctacaaaatctgagactctcgtagcgggcaggggtgtgtattcaagttaatatttctttgttctacagtctgacatcaatatatcttattttcttattaaggattcttattgccattaaagaaaaaaattgcttggcaaagatgaaaataaatagagactaagcaatatttgtagcttgtgagaattataaagacaggacaaaataataatataactggatgagaaagataagagtgcgtgttagagatttgcgctgtcatgggcagttatgcctctttaggcgagcaaattgtgcttgttgcagtgagattggtgagatgtaggcccgttctgactgtggatggcagcatggctttccaccccagccagacacaaagggcacaaggtggggcaggtgacctacagcccttggactgtgtcactctagggaacctctgctcagtcagccgttcagtttacaaaccttagattaagacctttgaaaacaagwtgaatggtaaggaagttttctcccagcaacaatgcaataaactgaaattaaaatagataatctaacatcttatgtttgtgtactgttaatgatttacaaagcattttttctttttgtgcctcaggattactctgagaggtggtgggcagagcgattaaacccccatttcctgggagggtgcgtaggattcgccttcatgtcccttcctggctttacttagcactccacactcttttccttgtttgttcatttacacataacgctttggcaaattgttctccacgcagagtgtgttaagctcagttcgtaactcatgaactcctgtagattccccagctgcccttgcaattagtttgggaccaactcctactggccgttgacttaagatagaaggcaattaaaagccactgtgccctgtccaaccttttccccgctgagctgaccttggaggctgtgtattccagttgacagtgtagcccacggcctccatcggccttaggaatcagaaattagcctttcctgtgtgaagacactgacatttcagggtttattctgtggtttcatcataacacatcctatcctgattaataaaattacttactctccacaccttctaagtgtatcattaagagatgtttctaagaatccttagaaattggggctctgaaattggaatgcggaaacactccagaacacaatcagtatcatttccacttttaactttacatgaattttcccataggcagaattttatttatttttttatcaaaatcatacatttacatagtgtaaaatgttactagtgctatcaggcttatgagtactgacagcagcagctctctgccccagcccttctctcccaggtctgattcctttctgcggtttcccccggcatttatgtctatatttgtaaataatacacttatcctgctgtgtcatgttctattgtttcagatgttttctattgactttccactactgcagatgaggattcagccaccttttccccctcaccaccactgcgcctcccccatcttctcattatatcacaatttttggctaaatctgaatttactatttattatttataaccatgtaaatattgctgactgctaggacaagtagtgtgctttgattacatatatttttttttctgtgaaagttcctctttattttttatttgcttagcttgtgtatcagtaatgcttcccccttcattcaagcaccgtcagttctagtttccacatggctgaaggtcatggatcattttctgattggagcctgtgctcatggcacttgctcttcctcccacagttggatctggctgggttgctccccagctgccatcccagatctcatttcctggagtccatgtctaccttcttttggtttatactcttttgtgaatggagcacacccttttggagtttccagagaaaaggtgcatgacaggtgaaacttttgatatcttgctaatgtgaaaatgtttgctgatattgctgtgaatagcttgacagtttggatttggaaatggagtagaaaataatttccttcccagtccatctctggaagcacacactgggagtggttgcccttgaggaggaaaacagsttagggatggagcgagacttacttcactatataactttttgtactattcaacttttagaaaccatttgtagacactgctttacgaaacttaaatagacattagtaaacagaaatcatgagcaatatggagaatatactgcccccagtttaccatgtgctgcattgtatttaatatttagtcctatgagcaatgcatttattgccatgcaagaattttagcattgaaagggttttctatagaccagaaatggtgcaagcccaaacatgatcataattgcatgttataatggaaattcataaccttgttatctcagagcttttagaaaatttgtgaagatttggacattttagggaaaaggagcacatgtaaaccaaattttgggcatcaaagatggaagtagattggtctccaacagttgtcctgtatcctgaaattcttactgccattaccattatcattaccattaccattaccattaccattactcttcctaacaatgccaccccaaaccatttccacagaaaccaggttgctttaagtgggctttcttggactttcccatttgactaaatagcaactctgcagaaaggtaggcatctccatgggcaatgcaaaacaagaaagctgacatttggctaagggcttacctgcaacagttacatcatgttacacaaaattcagagttaaatgagcatatgagagggacatggttcaacctgtatcttctgtgaaatgctcttcttgctgttacataatattttacatgtttatggggtacctgtgatattgtgctgcatgcacagactgtgtaatgatcaagtcagggtatttggcatatctgtcaccttaagcatttatcatttctatgcgttggaaacatttcaaggcctctcttccagctactttgaaatatacagtacactgttgctaattatagccttcctactctcctgttgaacattagaacttattccttctatgtaactgtatgtttttatctgctaaccaacctctcttcatccccctcccacccatacaacctttcctagcctctggtgtctatcattccactgtctacctccatgagatcaactttcttatctcccacatatgattgagaacagctaatatttgtctttctgtgcctggcttatttcacttaacatgatgacttttggttccctccatgttactgcaaatgacagtttcattctcttttatggccacacagtatttcactgtatatatatatatatatatatatatatatatatatacacacacactatgtttttaatgtgatatgtttcttattataaaaagctctcaggcttgtccttaggcattagaacatttagaaacatctatctatctatcttatctatcatctatctaccttatctatctatctatctatctatctatctatctatctatctatcttccatctctatctgtcatctatctgcctatccatctatctatctatctatctatctatctatctatctatctatctatccatttaccttatctatctatctatctatctatctatctatctatcatctatccgtctacctaatatatcatctatctatgtatctatctatctaatctatcatctatatatctatctattatctatctatctatctatctatctatctatctatctatctatctatcatctatctatctgtctatcctactccctgccatggttggcccaagagcattttaaattatatagataatctttgctaatccttcctgcttttyccgataatkgtaggggaaaakggccaaggaggggccttcagtggatacatacataaaataatttaaaatgttgacaaaaggtaaattcccatgatctagagacagagtggttcttaatctagagagtggttctcaactcaggctgaacactgtaatgacccaaggaccttgaaaaataccgatgcttgggtctttcctgagagattttgatttaattggtctggttacatcctgagcatcaggagttttaaaagctctccaggtgattctaatgcggccaggcctgagaagcactgctctagggaggatactgacctctagagatggaagtgaaagaggtcattgtttatctctgacggatcatagacactcttgtcttcgtatgtttatttattcagcaatacagattttccatcagttttttttccatttaatagactttattttttaaagcagttttagttcacagcaaaagtgagaaggtacagagatttcccatatacccctctccctatccatgtatagcctcccctactatcgatggtccccaatagagtggtggtgcatttgttacaatcagtgaacctacactgacacgtcgctatcacccagagtccatagtttacattagggttcactcttggtgctttgtaaattctgtgggtttggacaaatgtataatgatatgcatacaccttatcacatcatgcagaatagtttcactgccttaaaaatcttctgtgctctgcccatttatccttctctctcttctggcccctggtaacaactgatttttttaatagtctccatagtttgccttttccagaatgtcatatggttgaaatcatactgtatgcagcctcttcagattggcttttttcacttagaaatgtgcatttaagtttccttcccatatttttgtagcttgttatctcatttcttgtcttttcagtgctgaataatattttcttgttttgaggtatcacagtttatccattcacctattgcttctaagtcttgacaattacgaataaagctgctataaacatctatgtgcagctgttgtgcggatctaacttttcagttcctttggaaagacaccaaggagtgtgattgctggatcatacggtaaaagtgtgtttagttttgtgcaaaactgccaaactgtcttccaaagtagctgcaccattttgcattcccaccagcagtgagtaaaagttcccgttgctccactttcccaccagcatttggtgttgtcagtgttctggattttgacctttctaataagtgtgtagtattattaactatttatttattatttgttggattttttaaacttttattttattcaggggtacatgtgcaggtttgttatagaggtgaattgcttgttgtaaggagttgctgtaaagattattttggctgggcgtggtggctcacgcctgtaatcccagcatgttgggaggctgaggcgggtggatcacgaggtcaggggttcgagaccagcctgaccaacatggtgaaaccccatctctactaaaaatacaaaaaaaaaaaaaaatagctgggcgtggtggcgggcgcctgtaatcccagctactcaggaggctgtggcaggagaattgccagtgagccgagatcacgccactgcactccagcctgggcgacagagcgagactccatctcaataaaaaaaaaaaaaaaaaagattatttcaccgcctaggtaataagcatggtacctgataggtagttttttgattgttaccctcctcccaccctccaccctcaagtaaggcccattgtctgttgttccctcctttgtgtccgtgtgtactcagtgttcagctcacacttgtaagtgagaacatgtggtatttggttttctgttcctgtgttagtttgctgagaataatgacctccagctccatccacgtcactgcaaaggacatgatccccttcttcttaaggctgcaaagtattccatggtgtatattatatgtaccacattttatttattcagtctaccattcatgggcatttacactgatttgattccatgtctttgctattgtgaatagtgcttcaatgatcgtatgtgtgcatgtgtctttatggtaraatgatttacattcctttgggtagatagccagtaatggcattgctgggccaaatggtaattctgttttaagttctttcgggggtcaccacattgctttccacaatggctgagctaatttacattcccaccagcagtgtttaatcattgttggatttaattcctacttaaaaagaatacatgctaaatgctctccagacttaagtagtgttgtgtttttggtattatttgtctttcgtctacgttttcacattaaaaaatgaagtatacatgaagcttgaaacaaccgcacagtttaatgaatcactgtaaggcgaatgcaggaaaccataacctggtcaaccagcacttagaagctcctttcatgcctcgcctgaaaaataactcctgattcttttgataatccatttcttgcctttagagttctgcctatgcatgtattcctaaacaatccagttgtttccttgtatttaaaaattgtttagctttgtagctatagtttactcattactgtaggatgttccattgcgtgaatataacataattgaccctctctattgttgatggacatttttgttgtttgcatctattggctattacgaatgatgtgttttgaacagtctcagtgatgtcccctgtgcccaaatgcactaatttccttggagcatatgttcctagtgtggcattgctggatgatgcatattttcgactttaatacaaaatataaatggatttccagattgattatactaacttagccccacaaacagtatatgagaggtctcgttgctttaaatattccatagcactggtatkcccagttccgtagtgtttaccagtatggtgcgtgggtaacagtgtttccttgaagttttaatttgagtttcctcaattaataaagagactcagaatatgcagcaaatgcttctgttgcactgtgttacatcgccttggctcaccatctgtttcttgggttttatttgctgttccttttcttactccttgaggtgtgttctcggcccattcatttcagcccttcttcctttctatctgtgtattcagggctgtgtgtttcttcctacacacagctttaactgcagcctacaagttttgacatgtagcatttccatacactttcagttaggtaatgtttattatctaactgatgataatttctcaggcacgtgcattagatcacatttgtttattcatgatattcatttttgctgtcttttggtctgcctgttctatcaattactgacagaaaaatgttaaaattgtcccataagtattgyggattttgcttcatatagtttgaagccaagttattggatatatagtaattaaaaagagttatatcaccttggtcatccgagcgttgcatcattgtgagtgacccattttaactcaagtaatgttttgtgccttccactcttgttgattttaatatatcagctttatctttcttgcttgttgcatgctgtctttttcccatccttcaatgttcaaccttagtatatccctatattttacatgtatcttttgtaaatagcttacagcgagatttttgtctaatccaacagtttttatgccttttagctggagtatttaatttatttacatttaatataattattgacatatttggattttccattattttgagctttgtatttgtattacctgttctgtttcctttttttctcccatcttgatttattttgggtttaattatttttttccctctaatagtttggaaattgtgaactctgattctattgctttagtggtcactctgaaaccacacagccatacttctttgataagaatctagaattartcaatgcctttatcctcttcttggataatacaaagagtttaaacatgttaattataattattctcctcctgacacgagttaatattgtcatatattataactctctcattttaacaccattaattgttattattattcttttataggtaatgtttacttatctttgcccatctcagaccttccatctggaattgttttccttctgcggaaagtacctccttgaaaattaatatagaattgggagttagcagttgttttcttttaggacattgaagatttcattccaaccaccctttggcttccattgttgctgctgagaaaccagctactggtctaactatcatttctttgctttaagattttttttccttgtctggtattctgcattttcactatagatatggatttatttttatttactctttgtgggaatcattggacttcttgaattgctgatacttccaaggctgtcttttataatttgaacttagggagcgtgggcgtcttggaatctgtatctgaagtcttgcgagtctgttttgtcatttgttattcttctccacagtgccttgtgaccttgtgtggttgacttcctttgaytgggcgctgatcattgctcttaaaattatttgtgggattccctgaggcctaggatgaaagtgcctgccttcagctctgaggtccactccctagacatgtaggtgcactaccttttggtacgcttcagcttcacagcttgaggtttcttggaatgctccagtgtggtggatctgggcttcaaatctgccaagcacctgcccacttttggacatattttctcctttcttgtttttttatattgcactaagcaccaaaggcagcattcttcacagctgtttgtgggtgagaggaaagaagcaggctcaccccagcccttattgtggagctgtgtatggttgcaatgaatgtgctaggagcctaaaagactcacaaactttggtgggtcctgagttttaatttctgtccctcccaactctgtgaatctatcaaaacacagcttaatcttgcaatctggactggctgaaggtaaaggggatcaagcatttcattgacttctctggggtcttgctttcctttaggtctaggcttggtcattcatcactatgttgtcaactcttcatgcgtataagaaaatgtaaaaaacatttagacagcattttaaattatttccagaagattattgatctcaacaatttagcccagtattgttcaagagtatgttctgtggggatggaaatgttctgtatttgagctttccaatatggtagccactgccttctgtggctattgagcaccaaaaatgtagatagcacacctgatgaattaaattttttattttacttgatttaaaatttacatagccacatgtgattgtggctaccatattggacagtgcagctctagtccataaacagttaccagaaacaagaatgcttttattctttagatttcctttggttgagcagataactgtctgcaatgcatctagcccagctcccagaatcttggtgaaacatagaggtatttttgggtttacttaaatttcctattcatatagtaaggctgtatactttatataaaacataaaatttttgttttattaaaaaattattaattagttaatttatttagagacatggtcttgctctgtcatccaggctggagtgcagtggcatggtcatagctcactgtacccttgaacttctgggatcaaatgatcctcccacctcagcctcccaaagcactgggggaaaaacgtcgttttaagtatcaccataatgagtaggtagaatgccgtttcttaagatgagtcacttaagcataggagagatacatactttatggatctttttggtcacaaactttaatacaataaactacagtttgcttgtcattccaaggccaacctcaacaacgtaagccctgtacttagtcttagagaaatatttatctagataaataaaaaaagcaaagcaacaaaaacatgaatggagtaattttccacctggctggctgcttccacacctctcacccgctgcaggcagcagtaggtgtgtggaggagggcgacgacatgtcccgcagcaagagtgtctacccctaatagtctcacaaaactctgttgcttcttgctgggagatgaaaacagcttgaggacagggtttttgtctcatgtgtttgttccactctgcagaaccaagcttcgaactgtacttcatgcactacgatggcacaraaaagattttctgggtgaaaccattttggtgccattgtcttgtaattattaggaaatcaaaaacagcacagaattattatttcctccagtattctggaggatcctacactttgcatcacagcagctggctttgtcttggctacagcctcctcccttcttgtttctctggtaacaaatgctcacctctgttgacagggtgatccagggctggccaatcagagtgcctcactcccggctccctgaccctggaattgttcatggatggcagcaagcccagatcagagtccttctttgaggctgttcttaccagaatctcaggaggccctacatgcgtctctcggggagccacaagagtgggggccagctgctttaccctgtagtccttgccatttggagaaggcctctcagtaggagragagaaggacaccaagcagggaggcgagaggtgtgggtgatggcagagggggtcccactggtgtctggtccccagttcccgtcgctgaggcccccggaactggccaggttctctagttcttccagctctttgaactctgctagtatcctttcaacaagttaattttctgttataaatgatccttaattgggtttctgccacttgcaacaaatatcttttatcctaaattgttaaaatgaaaagtgtgtgtgttgggggcacattttcaggggaaagaaaattcccaccagctttggaatcagctgaggtgggtaagtatattcttccccatgttcttccagcactattcttttgtccctctgtttcttcaatagtttttagtggacattatcctacaattcaaataccaaatgcatttctcatccaagatgagctgtgtcaccaatgaacaagaagagcaccagcattgtgattttttttttaaacagaactttcagggtacagaaaataacaccaccctgtccaaatttagggccacactgtcatcgagggataatcagtgtttttggttttttttttttttttttttttgagacggtgtctcgctctgttgcccaggctagagtgcagtggcrcgatcttggctcactgcaacgcactctgcctcccaagttcaagcaattcccctgcctcagcctcctgagtagctgagactacaggcatgggccaccacaactggctaatgtttgtatttttagtagagacggggtttcrccatgttggccaggctggtctcgaactcctggcttcgtgatccacccacctctgcctcccaaagtgctgcaattacaggcatgagccaccacacytggcctagttgttgttttcatttgcccaagacatactgttctgttcctcccctcagtccctctgtctgcaagtgaaacattgtctttttaacctaaatacaagaaacatgattagaactcaatatattgacatgttcaccaaaagttcatggcagcacatttcatactagccccaaatgggaaacaatccaaatgatataatggatatattgtcatttgttcagtgggataccacacggcaaagaaaaggaatgaaccagcatcacatacaccaacgtgggtgaatcccacaaacgtggttcagagtggaaaccaaacagagagaataaaatgtgtttacataaagtccccaaacaggcaaaactaatcaatggtattggaagtcttgactatggtcattgtccctaayctgtgagaggaagtgagttggaggaacttgcagggacgaggtggggagsagggcttctgggctgctgaccacgttccatgatgtgatctgggcagttacccacgtgtgattgcttagtaagaatatatcagtttgtgtgcttacaacttgtgaacttttctgcatgtgacttatgaataaaaaagtctgaaataaaaccaatactctggagggaaaaataccataaggaatgaggagtgcctgggaaaagctccctgtgaactactcagacattcgctaaggagaaagcaaatgcaagttggatgggatagtggctaaacggaactcataggggagaaattattggcattgagaggatgagttctttctctggactcccttggagctttgatattggcctgtcattagaatttgggtggcaagcctgccttatgataaagactgaagttcttcaaaggatctccatataactcagccttttgctaaacttctaaaaaatgaacaattaatcagttcatcaactctcagagatygtaaaagccaaaatgatttagataaagcaggaaaatcagagcagaggagacagttatggcatatgagaaacctgttcactactcaagttggccctgacatcaggccaggaatacagagcaaggttcgccattgttctgcccaccaaatgctcttttctagtcctaatgcaaamtgatggtctctacttagacctgaggcacaaagaaaacatttcagggctgggcagtggctcatgcctgtaatctagaactttgggaggctgagatgggtggattgcttgagcccaggagttcgagaccagcaatgggtcacatggaaaaatcccatctctacaaaaaaatacaaaaattagccaggcgggttggcacgcatctgtagtctcagctgcttggagggctgaggtgggagggtcacttgagcccaggaggtcgaggctgcagtgagctgtgattgtgctactgtactccggcctgggtaacagagcaagacccagtctcaaacaaacaaacagaatatttcagaagggtcttctactccctatgcaaactgctaagccagcaagtcccacaggggtacagatggaaggggcctytgctaatccctgagggaaatgtcagctggggtttttattacaaagttagcatatactggggagcttagaaacaagagaaacgtgtttctcacagttctggaggatggaagtccgagatcaggatgctggcatggtcaggttctgatgagggatttcttccaggttgcagactatcaccttcttgctgtagcttctcatggtggaaggggcaaggcagctttctgggggtcccctttatatggcgctaatcccatgcatgagggtttgaccctcatatcctagttacctcccataggccccacctcctaataccatcaacttggggactaggttttagcatctgaattaccggggagagcacacaaacattcagacctcaacaggaggcgagcctcttggcccccctgctagcatccatctgcagctgggcaccctgtctggttctccaacgtcacttgtacaaaatagcgcactccttccctccagcagctgctcctcttcttcctcagaccccccgcctcaaatcagggaatcctcaagattcatggaattgaccactgggttgcattgtcagctcctatctccctgtcctccacccaattagtcaccagactcacccctcgcctcatctcaggaatagtggttctcatcctcagcccatgctcaagcccctggagagctttggagtcacagacaccagagactctgttctggggggtgtagcatgggccttcataccttagacgtcctccaggtgattctgatgtgcagcccaggctgagaacctccactctgcaatcagcctctttcyctgcactgctgggctgatggtcctcatttcctccctcattctctctcctccacactacagtttcctaactgatctgcatatgtccagtctccctattcttgttcgcttgtcctgacctgttgatatcctaatttaaactctaaccctgatgttcaaaactttccaaaggtcagtttctgcccaccttctcaacctccccttgctctgcccaccccatgcacccacacctgtaggtacacaggtctgatcccctttcatcaacctgctgcaccttcctgttgaagctctcctctgtcgacacccagtcggatctccacacctctgggaaagcttcctggatcattcaattatgtaacaaatctcttccttctccacttccttacagcatgtgttaaaatttttttttttttagtatttaaaaaatagaggcagggtgtcactatgttgccttggcwggtctcaaactcctggggtcaagtgatcctcctgcctcccaaagtgctgggattacaagcatgagccatcacacctggccaaacacagcacattgctaatgtccaggaaatacagtctgccctgcgttccgtatatttatggatttgggccccatccactgcatatgataaacgaccttgcctcctctgaatctagaatggcaatgaaattccactcatgggagaattgagaagtagctgctcaaataatttctttattctgtagttcagatgaagaaccttttttttttttttttttaatggagtctccctccgttaccccggctggagtgcaccgccgcmatctaggctcactgcaacctccgcctcctgggttcaaacaattctcctacttcagcctcccatgtagctgggattacagrtgcatgccaccacgcagggataatttttgtatttttagaagagatggaagtctttctttattgtggatgtcctgtgactttgaaataaatgaaatagtctattctgaacctgaattctagaggcaatgggatttgaatcagtgttggaacattctttccatacccttttccccttttgttactccactctaaagactaccaggtaaaaatattccatttcaccagctcctttgcagctaaagggctcttcacacaattctggctgatgagatataggcagaagtccctgggggaggattctcctgtgcttttcctcttctgtcttcctgaaatgtagatgtaatagctggaggagcagcagtcatcttttcrcctttagaatcacatgacgatgatgatgatgaagctgaagacagtaaacaccttatgagcagctttgttggctttggacttttacccttaaactcgatgttatgtgagaaaattaaccttgttacttgttgaagctatcctttgtcaagttttytgtttttgcaaaaaaaaaaagaaagaaaaaaaagaaaagaaaaaagccttatatctttatatctccatactctctcacacacttgggagagtgttcttaaactagtctgctttaagttcatgcattagaaacaaaggtgcactcttaacagcaataagataattaacaagtcttttatttcctgcagctcattttccttttacctcttataaatctcttgcactcattaaaagaacctgctgagaacttattatcagctgagctctggacatagcatagtgagctggccacacagcatcactggcagtggtatgctgataaatgcttgagggtaaggagacctggtttgagcatttgtcaatttctgtgatgtaaacactcccaccatggttgagcctccaacagagacctcgctgaagggagatttaggaagagatgttctcaattggttcttgggagtcctgggagccggctgcactaccctctgaagacagtgccccaagagagcagaccagggcccttgctaaaatcattttcttaagggtaagccttagagtatagcttatctattgtatgttgcctttggctcttaaccattctccttgggatcttgattacactattaatttgcttagcaaacacttccctcagagtataacaaaatatactgtgagataaaagtcttytgatggctacatgcatctccagggcaaatagctaggaaggtgagcaggtttggtcataggtcagtgacttttctttcctttgaattccccaaaagtcttggcaagagctccatagctttcccattttctttttttgtgtgtgtrtaatgcaggttatgagacataccatcctcactctaatttatattttggggggaatttaatagatccattttctttttcatagagttatgtttgatcatcaatccagratcatcaatcctgggctgatctggtgtgttcagaattaagatgaattatttctaccattaatcagctattaataatataacatttccttttgctgaagtttgtataaagaattctcttaccagggagcatctgagccataagaagcctgccactcagtgttgccaaaggcagacttttagtgatgctaactagggtgcctcccctctgtgggtcttcaccttccccaatcccacccacctgcttgatatcttagaacttgcctatcctcatgggttgacctggtgagagcctgattatgctcacataaagtcacaacttcactaattaggccccaataactagagatttgttatacctcaatgtgtttagctcacgctttttgttatactctgagggaagtgtttgctaagcaaattaatagtgtaatcaagatcccagggagaatgcttaagagccaaaggcaacatacaatagaatataacatacaatagaatataattgatcatttagataaatagcataggatctttcctgagaaacatctttttaggcaaataatctcagatatttgatagacctagaaatcataaagaccttctttggtttgagttttgatataggttggatttgtgtccctgcccaaatatcatgtcaaattgtaatctccagtgtcggaggggagcctggtgggaggtgattggatcatgggagcagagttcccccttgctgttctcattgatagtgagtgtgttctcacaaaatctggctgtttaaaagtatgtagcacctccccatttgctctcttcctcctgccatgtaagatgtgcctgcttaccctttgacttctgccatggttgcaagtttcctgaggcctcctaagccatgcttcctgtacagcctgtggaactgtgagccaatcaaacctcttttctttataaattacccagtttcaagtatttctttatagtattgtgagaacagactaatacaaatgtgctcccccaaagtttatgtgttagaaacttaacccccaactgcaaagtgttgggagatggagcctaataagaggtgattaggtcctgagggatctgccctcatgagtggattaatgttgttatcatgagagtggttagttattgtgaaagtgggttgttataaaagcaagtttggcccccttccccctcttgctctcttgctctcaccctctcttgcccttctgtgtcccaccatgggatgacacagcacaaaggcccataccagatgatattgccatgtttttggacttcccagcctccagaaccataagccaaatacattattttccaggaattattatctttattcgacattttttgtttcaattttcttttttttcttttttattatactttaagttctgagatacatgtgcagaacatgcaggtttgttacataggtatacatgtgccatggtggtttgccgcacccatcaacccgtcatctccattaggtatttctcctaatgctatccctccccttgccctccatcacccgacaggccccagtgtgtgatgttccctccctgtgcccgtatgttctcattgttcaactcccacttatgagtgagaacatgtggtgtttggttttctgttcctgtgttagtttgctgagaatgatggtttccagcttcatccatgtccctgcaaaggacatgaactcattctttcttatagctgcatagtattccatggtgaatatgtgacacattttctttatccagtctatccttgcttggcatttggattggttctaagtctttgctattgtgagtagtgctgcaataaacatatgtgtgcatgtgtctttatagtagaatgatttataatcctttgggtatatacccagtaatgggattgctgggtcaaatggtatttctggttctagatccttgaggaatcgccacactgtcttccacaatggttgaactaatttacactcccaccaacagtgtaaaattgttcctatttctccacatcctctctagcatcttttgttcctgactttttaattattgccattctaactgggtgctgaacctaccacagcgcagcaaagccactgtagccagactgcctctctagattcctcgtctctgggcacggcatctctgaaagaaaggcagcagtccctacctggggaaggggcagctgtgggcgtagcttcagcagatttaaatgttcctgcctgctggctctgaagagagcagcagatctcccagcacagagctcgagttctgccaagggacagactgcctcctcaagtgggtctcagagccttgtgcctcctgacacctcccagcagtcgtcgacagacacatacaggacagctctggctggcatctggcgagtgcccctctgggacaaagcttccagaggaaggagcaggcagcaatctttgctgttctgcaacctcctctggtgatacccaggcaaacagggtctggggtggacctccagcaaactccagcagacctgcagaagaggggcctgactgttagacggaaacagaaagcaataggatcaacatcagcataaagggtgcccaggcaaaaaccccatcagaaggtcaccaacatcaaagaccaaaggtagataaacttctgttcatcaaaaattaccctgtctcaggtattctgttagagcagcagaaaatcaattctaacaaagctagacttcttttcggattattctataatccggattggtgtgacttcacccgaaattgtgtgaatgagaactatgagtatacttcaaaggatttttcagatgcagaattatattttataaagattttattagtttttaagtcttaaacaagatatataatcttttcagatgattccaacttaaatatgggtgacttgctaatcaattcacttctgttgtttagttttcttaaatttaaaaatagcatttatctgcccacataaagacttgaccatatgtgttcatagcagtttttatttacagttatccaaatcggaaacaatttaaatgtccatccacagaaaaataaagttttattatgttcacccaatgaaatgctgcttaccaatgcaaaatgaacaaactaatgatacaagcaacgtggataaatctcaaaaatattatgctaaccaaaagaagccagatataaaagtatccatgctatataatttcattaataagaatcctagaaaagtttaatcttaccctacagtggagtgggaagaggacagggtcccaagcagatgcccaggaagcaaaaaaaaaaaaaaaaaaaaggctctattaaactagacacattttgatgtgcagttccagaccttggtgcctaccctgatatcacatgaaatgctgaaatgctgtgcatgtgcatggaggtatgagcagtgatattctaaagcattatttttaatgataaaaacaggttttaaatgtccatcagtaggggaagactaaataccccagatattgtacatctgtgttgtggagccctctgcagtatttacaaagaattagatggaatgcccttgggagaaaaaaaatgtaagttgtaataaagctctatattttataaatttatctaaatgtggagggaatggtctgaagagaatcataccatgtgattattttaagtgaccctgtaaggaagggacaacgatttggggcaggagtcggggggtcaaatgtcttcttttgttaagacacagctattatgaatactgctgtgatgaaaatacaaatgcatgatgtctttttggtataacggtttattttcccattgggtacagatggacataaagatggcaacgtttgatactgaggactgtaaccacctgatgggatcttcctgcctgctgcataaagaaatgttagcagcagtgaatctgtatggttctgcagccacttcagttcttgactcctcagaagaaagaatttgactgaggggcataaggcagagggagagaccaaggcaagttttttagagcaggaatgaaagctcattaaacagttttagagcaggaatgaaaggaagtcaagtacacttggaagacaggcaaacaggtcacttgagaggtcaagtgcactgtttgacttttgacttggggttttataccttggcatgcttccagggtgttgtgtcccttctcccctagttcttcacttggggtgtgctgtccacatgagcagtggtctcccagcccttgggaggggctgtatttgcagtgtgtttactgaagtcgtacacatgttcacttgaggcatttttccctttgccagttgaatgttcgtagaggaaggtcatatagcaattaagctctgccatttttcctcttattgtgcatgcttgagcccacttgcccaactcctgagatcttactggggagctgctgatcaccagtttcaggtgtttctgttgggagactgcctttccctggtgccagttgtgactaattattatattattttagagagacagtttaacaaccacctaaccatcacctgatggtcacctgacattcttggttgtgggggccctctcctgccctgctcatgtgtgactaactacctaccataaaacatcccccccttaagagtccaagatcccaattctttgggggaaagatggttagtcttctataactgcttcctgctgacagaggactggtggtggttgttctgtaggtcttggcctcttgctagctgtcctcctgcatgctgaatcacttatgtgtgggggccacaggagtggggttggtgggtctaggtggtgtcatgggtgtcagacttgcaaaaaatctgaaaagatatctcaaaaggccaagctacaatagtgatgttatttgcaggagtaattgaggaagttgcatagtttctaacctctggaataatggctggtaatcgtttctgtctgtaccttagcaggtctcaggctcctttcctccccacagcctaatggcctgctattagctttacaaaagtgattgagttctgggcaaggcttcttatcatttaaatgatagcctaaatgtctttcaaagttagctcagcccagtagcccaggaataattaagggaaaggcaagatgggtggtgggttagctcagctcactgttataattgctctcctgatataatttttgcaaaggcagtttcaggactatttaggggggatggaggggagcaagggctcaaaagcaatcagctgctatgctcactacctgggtgataggatttgtgccccaaatgtcagcatcacacaatatacccatataacaaacctgcacatgtaccccctgcacctaaaataaaagttgaaattttttttttttgaaaaggacagtctttgtcataaacttcctggggctcaaatccaagctttgccttctactgtgtgacttcgtgcaagttatttcatttatttgggccttaaattcctcatctctaacataaggataaaataacattacctatgtgttataaaaccattgagcaaagtaaaaaaaaaaataatcagaaagtgcttctaggaggcttgcatagactaaaaactccacaaatgttagctattatattgtgagtggtgagcaaaaacgacttcagttttatgtaaagtgtctgaattttataccgtgagactgtattttcaatgtattataagtgtaattaataataataattttaaaaataaatagataaagtaacagaagtagaaatgcagatgactctgtcaagaagtttaaagaaaagaaggggaagaaaggcagctcagggaaaagaagtgaaacatctccatttaaacataatgtgcttcacacgwgttcacaagtmtgcactgtgggtttaagttytaagctcaataccagctagttgagtaacatcaacccttaaaactcactgctttactgataatgcaaatgacctggagagacataaaataggagcagaagtttaccttaaaaatcacaaattgatgtccatgtcttaagagaaatttatcaacataactagaaagcagttgaagccaagaactaaagtgccctgtgaaaaaaataaagcatgatttgcacagttcccaggttcagaatacatgggcaagctagatggcaagaccagggaaaactctggtggacactaaattaattgctggctggccacgcttctatgacaccaagagatatatctaagcccctaccacacatccacctgcagtgccaacagaggatgctgggtggcaggtggggttcgtagctaatgctgaaatttgcatcactttaagacaccagtgtcatcatagcccagtgtcatcataagtgcacatttagaattgaggtgtattcactcctgcattctaacgtagaaaaggtccacttcccatctggtgtctgtggccagatggaggtgtagggtcttaggaaagcaatatgtcttgaaatattcataatgaaataatgtcaattgaaataaaccacatcaacaaaacctagtagctgaccctactctttggttttcagtctttaaaaattcagaagggaaatgcatctaagcaattccaatgcacccagtttccccatttactagttgagtaatgtaaaggaaacaacttgacttttctaagcttatctattaatacaaaacaatgcaatgagcgttgccaggccctaaatattgggagcacttgccttgggccagaagctcagcatggggtcatggcttacacatggtgagtcctggctactccacagggtggctgacttccttccttgtctcttccatctacacaacctgtgaggaggaagtcacttgaccaaatgaaaaatctaaaactaggaagcctaaaagtgtggttcaaatctcacagtttactatgtttatcacgtttactctggcagagctcatcagcttgaaaacctcgtttctttaccagggaatccactctggggaagcaacagtccaagatgttactggaaaggagtcccaatccagatcccaagagaaggttcttggatctcgtgcaagaaggaattcagggcgagtccatgcagtaaagtgaaaggggctgctggttgcccatgtttatggttatttcttgatgatatgccaaacaaggggtgcattattcatgcctccccattttagaccatataggataactttttgacgttgccatgacatttgtaaactgtcatggtgctgatgggagtgtagcagtgaggacgaccagaggtctcttccgttgccatcttggttttggtgggtttggccagcttctttactgcaacctcttttatcagcaaggttgttatgacctatatcttctgctgacctcctatgtcatcctgtgactaagaatggcttaacctccggggaatgcagcccagtaggtctcatccttattttacccagcttctattcaagatggaggtgctctgcttcaaactcctctgacaaaaccatcagaaaccagagagaaggcagacgcctcaaggtgacgctggccaagacccagacaggcatcatgtgtcccagtggagactggctcgtgatgacacctgagccacagacgatccctctcacacytagatgctatctaaggccgatggcaaccggatgccaccctgagcatgaggtaggaggcaattaacccctggttggctgaattgacccagagaacggagttgaccttcarttatcaatgttgaacattcttctaagaagacgtgaggagagcttgagatagaaattaaattcagacatactcagcatgtaaaaataagggatgttccatctgttgcccacccgaggataatggattgacacttcagggactttagcaatatgccaggcactgtgctaagtaactgacactgattagaccgtttaataattacaactgaatgggtggttaatgattgttatttcattgttttagatgagaagctcagaaaagtcaagtagcttcgttaagattgcacaactagtaaatgagggaatcgggagtgctgggatttttaaggtgcrtttcccttctgaatggctgaaaactgcaaagtagagtcagttagacatccagctatcagctttatgcattgggtcctatggtagagagaatgtatctcaggtctgagcctgaactttcaccctcatgctccttcatagccccatgtctccagagtctgggcttcagrcattgccctgggtcaggattcccaggaaacagactctgagatggagatgtgcatgcaggtggtgactgggaatggctctgaggaacagcccctgtgtgggagggagggagcaggatgccgcaggagaaattaaagtgcaatagggatgcaactgaggcctcagctgatctcacggagagctttgaagcttgggtggcatttcagagatgccttgaattaaagttttgggactgggtctttgtatcctagcatcactggatgcagtcactggatgcaggctacccctggcgtctgaggaatgcgcaccctgaactgagggcaggagttggccaacataccacagaaccactgcagtccacctgcagcattccgccacgttccagaagctcgcttgatgtgggcagagctcgtctgggacttggttggtctcttcctggataaacctacaatggaaaggttattgagacaaactgatgtctctgtgctgaagtgatcttgggacaatgacagatactcatgacctcccgcatctactacccagtcttgattctcctcacccccagctagcactgctagacttagactttgatggtccagggtgggggctgcccagactctcatccctcggggtctccttcctctgctcaccataccttccttggttcacgactgaggtgccctccatttgttatcaatattcagtcagcaaggactaataaacacctccgtggatcatgtgggtgctgaaggtgttcttccttccttccatgtgcaacggcaggctcttttttttttttttttgagacgggtctcactctgtcgccaggctggagtgcagtggtgcgatctctcggctcactggaacttccacctcccggattcaagcgattctcctgtctcagtctcccgagtagctgggactttaggtgcgccccaccatgcccagctgatttttgtatttttagtagaggcagagtttcaccatgttggccaagatggtctcgatctctcgaccttgtgatctgcccacctcagtctcccaaagtgctgagattacaggcgtgagccactgcaccccaccagaagcctcttttttaatgattagggccaattaatcctttcagatggtgacaccttttcttgctgctggttgtatggcaaaagaagcctgaagtgtcagggaggcagtcccagcttaatgtgtaatgagactctcgctgtgtcccttagtgggaaaagtccccctctggggagctgcaacgatgggaagcacagttctctaagtgagccactgggagcaatcataagtagggcagcactccttccagccactgaatcccatactcatggtagaccttctggggacacaataccatgcctttgttattgatttcragagaatattgcatcttggagtgtagtgccccatccttgcaggagattatctccaagctgtatcctcaaagggtagcttctttgagctatcaggacagaagctccagggcagtgcgggatgtgataggactggtgaacccatgctcacttgcacgctgtcaaacttcttttgctgtgaagcgggtccctgggtccaaaggcaagtcgtgcaggattcacgtgggtggaccagacgttttgtaaaccctcggatagtgatggtgcctgaagttctgtggaaaggaaagccaaactcccaccaggatatgagttaattcctgtcaagcagaatcattcccttccagactggctggttggtctctgagtgattgtgccatactgggggctcagggttgttctctgtggcttgcaggttgggtatttagtagctagatcagccttggtgagttggagaccatgctgttgggtccatgcatagcctccttccctgtcaccacagctgcttcgttcatgggttcattgggccactactggagtgagcagtgagtgaggagggctgaacctcggctggctgagtcattctccctccttgttgtttgatgtctcttccacggtgaatgctgtcttggggaaactaacatagaacatgaccatctttatgtttaatgctcatcctgacaggaccattcacaggcctccttgtcccaaactttgaatttttcttcttgtaagtcactcaacaaccagccaagccattcaccactgccagtgaatctatatgtgttttaacctcgggccacttttgtttccgctccaagtagatgacattgggaagaagtccctmattacgtctttyaggggcaccctgaattatcaggggctgtagtgcaggaatagtccattttcagctagtaccatgtagcaagtttacccatctgccatctgtgaaccaagcatttccctccctgctcagcaggtaaaaagggacaagcccctttccctgccaccgtgtggtcacaggagttaactgaagggaaagcactggttagaagtggtggatgacaggcagggctgggtgtgggagagtgtctcggacacctgccactgcaacttacaagtgccttctggccctactggtgctccatcatgagaattatttgcagattgcttgtctgaccttatgagttagggggtcctgacctgaacccaggtcatggtgggctggctgcatggtccttgttgccatggttaggtagcaggacaaagcttttttcaaatagtgcatatttttctgctgctaatgatgtgagcttgctctagacctaagggtctgtgctgtgattctcctgttgagacttgtcttractgccacctggtgtcttttcccactagggcctgccgggctgtatgggcccaacagcagggacacttgcacctcagcctggacctgctgccctgctcttccttctctgggtctcatgcaaaactggcatctttcatgtcgcaggataagtgtgtttcagcaatgttcccaagggtgggaaatgctgcctccagaatccagagaagtctgctgggccttgtgcttccttcttaaaggtgggaggtgtaaggtgcaataattttatgttttactttagagggaatgtcccagcaagccccagaccactggatccttacaaacatactgatctatggggttcctgatcttcatagggtttctctcttatctttcttcccacctcctggcaacatacttgttgcattttgttcattcagccttaatgtgtccacatagtggaccaacatgatgcactgtggaatgtccacaaggtcccggtcttttcagcctgtatcctgacagagagctggagaattaacatcgccctgggaagagctgtgaatgagtactgctatccatcccacgtgagcgcgagctgctcctactcctctctgctgataaagaggagaaaccgcattcatcggttgcttggctgtgtgccttgtctatggtcactggctctagaaaaagttctacatgggctcagcagctgtgcttgggactacacttaggtgagtttgcagtacttcactttcaccttctaagatgtctgtggcttggaagcagcctgattagtgaatgaaaaagggatatgatggaatccattggccttgcttcccttgcatctactgtttcccttgggatacaatattgtttttgatttactgtcttggcctgaaggcaaacataagtttttgcttggcttaccccactgtgatagctcttactctgcagaacaaggaatctatacatggtgtatttgtttactagggctgacataataagtatcacacactgggtggcttaaacataagaaatgtattgtctcagtcctggaggccagaagcctgagggctggctcctctgaggtcacaagaggagatctactccaggctctcccacagcttctgctggttgctgcagctgctggtgagctttggcttatagaagcatcactggggtctgtgccttcttcttcacgtggtatccttcttgtgtgtgtgtgtctgtgtgtaaatttctgttttataaggacaccaggcacatgggttagggctcaccctagtgaccttatcttaactcattacatctgcaatgacccttttttcaaataagttcacattctgaggtactgaacatcaggactccgatatataattttgtttgggggaagactcaattcagcccataacttgtgggttctaccaactgtcaagtgtgcccaccccaattacacatggtggatggggaagcacccactgggtgagtctacgggcctgatgggcctgggccaggactcttccttccttccttccttcyttttttctccctttcctttccttttctttctttcgttctttctttcttttctttctttctcatctcccttcccttctcttcctttctttcttttcttttctttcttttgatatgaagtctcactctgtcacccaggctggaatgcagtggcgtcatctcagctaactgcaaactccacctccctggctcaggtgatcctcctgcctcagccttgcaagtagctgggactacaggtgcatgccaccatgcccagctaattttttgtatttttagtagagatggggtttcaccatgttgctcaggctggtcttggactcctgggctcaagtaatcctcctgcctcaagctcccaaagtgatgggattgtgggtatgagccaccatgaccagcccagttaataatttcttatgctataaaggcctctttctaaatgtaaatacatgcttttgttttcatctgagccatagcattccaacttagttttagtccaagttatggaggtccacgtatttattttcttaataatcatctctagcactccttcattccttcatccatttattttccattgagtgcttatccatgacaggtagtgtcctagattctgaggatacgttgtaaacaaataagaaaatagatccttgctcttgtatagtacacagagtgttatggctaattttagcttggattatggaagtataaatacaatttcattttatgcaagaagaaaatatggctggaagatgatcattcacgggctttataattagcataatttacagtcttcttccaactttagggtgagaattcaccggattactgagttacccaacctcactgaatcaaatgaaatgtgggtgtgtgtgggggggtggctggggagggaaccaacccggggatgttattaaagtaaaattttataggaagtctttctcattcagtatatcaccctgcagtgccacctggcggttacaatgaaggaaaccatttcaatccacactgataattgtaggaacctggaaactgtgggggctcccatgcactcatttcccaagagggtgtcaggagggtcgtgcactagagcccgcagtgagtacctgtctcagtgcttagttgcaccactgcggaggaggcatcatccagcctgaaagtgccctccctcatgactcgtccctcccctaatacaaacaccgcacaggtggggtccaaccataagtccccaccccttaccacagcttagactcatttgtttgtgtgatttattttattttcattttgttactagccactctaaaaacgagaatttttttttctttttttaaaaaaatttattttaggtttgggggtacatgtgaaggttttttacgtagataaacacgtgtcatgggggcttgttgtacctatttttacatcacccagatattaagcccagtacccaatagttatcttttctgctcctctctctcctcccaccctctccgctcaagyagaccccactgtctgctgtttccttctttgtgttcgtaagttcttatcatttagctcccgcttgtaagtgagaaaatgcagtatttggttttctgttcctgcattagtttgctaaggatgatagcctccagctccatctgtgttccagcgaaacacatgatcttgttcttctttatggttgcataatattctatggtgtatatgtaccacattttctttatccagtctgtcactgatgggcatttaggttgattctatgtctttgctatggtgaacagtgctgcaatgaacatttatgtgcatgcgtctttatggcagaattatttatattcctctgggtatttacccattaatgggattgcttggtcaaatgctagttctgcttttagctttttgaggaatcaccacactgcttttcacaatggttgaactaatttacactcccactaacagtgtataagaattcccttttctctgcaacctagccattatctgttatttttttgactttttagtaatagccattctgacttgtgtgagatggtatctcactgtggttttgatttgtatttctctcatgatcagtgatattgagctttttttcatatgcttcttggacgcaygtatgtcttctgttgagaagtgtctgtttatgtcttatgcccactttttaataggattgtttttctcttgtaaatttaagttccttacagatgctggatattagacctttgtcagatgcatagtttgcaaatagtttttcccattttgcaggctgtatgtttactctgttgatagtttcttttgctgtgcagaaggtcttaagtttaattagataccatttgtcaatttttgcatttgttgtgattgcttttggtgtctttgtcatgaaatctgcctgttcctaggtccaagatggtattgcctaggttgtcttccaaggttcttatagttttgggttttacatttaagtcttcaatccatcttgagctgatttgtgtatatggtgtaaggaaggggtccagcttcaatcttctgcatatggctagccagttgtcccagcaccacttattgagtagggagtcttttccgcattgcttgcttttgtcaactttgtcaaagatcagatggtcgtagatgtgcagccttatttctgggctctctattctgttccattggtctatatgcctgtttttgtaccagtaccatgctattttggacactgtagccttgtagtatagtttgaaatcaggtaacataattcctccagatttgttctttttgcttagattgccttgactatttgggctcttttttggttccatataagttttaaaatatttttttctagttctgtgaagaatgtcattggtacttttataggaataacattgaatctgtaaattgctttgggtggtatagccattttaatgatattgattcatctaatccatgagcatgcagtgttttyccatttgtttgtgtctgttctgatttctttgagcagtaattcttttataattctcattgtagagatctttcacatccctggttagctgtattcctgggtattttwtttttgtgtgtgtcacaattgagagtgggattgcctttctgatttggctctcagtttggttgttcctggtgtataggaatgctagtgatttttgtacattgattttatatcttgcaactttgctgaagttgtttatcagctgaagaagctttggggctgaaactatagggttttctatgtataaaaccatgtcatctacaaaaagagataagtttgacttcctctcttcctatttggataccctttctttctttctcttgactgattgctctggttaggacttccaatactatgctgaatggaagtggtgagagagggtattcttgtcttgtgctgattttcaaggggaatgcttccagcttttgcccattcggtataatgttggctgtgggtttgtcatagatggttcttattattttgaggtatattccttcaatacctcgtttattgagagtttttaacacaaatggatgttgaattttatcaaaagccttttctgcatttgttgagataatcatatggtttttgtctttagttctatttatgtgatgaatcacatttattgattttcatatgttgaaccaggcttgcatcctggggatgaagcctacttgtttgtggtggattaactttttgatgtgctgctggattcggtttgcaagtactttgttgaagatttttgcatggatgtttatcaagggtattggcctgaagttttctttttttgttgtgtctgtgccagattttggtatcaatatgatgctggcctcatagaatgagttggggagaaatcttcttcctcaattttttggaatagtttctgtaggagtggtaccagctcttctttgtacatctggtagaattgggctctgaattcatcacatcctgggctttttttgattagcaggctatttattactgattcagttttgcagctccttattggtctgttcccggaatccatttcttcctggcccaatcttgggagggtgtatgtgtccaggaatttatccatctcttctaggttttctagtttgtgtgcatagaggtcaaatgaaaatttctgtatttctttctttccttctttttgtgttgaaagaagctcttgctatgttgcccaggctggtcttgcactcctgggctcaagcaatccycctgcctcagcctcccgtgtagctggggctacaggtgtgtgctttttattgcacttttcttccacctgactgtaagctccatgagggcagaagccatgtctgtttcacatcctcaaggcaccaaaaccagtatctgatacatgatatgtgctctctgtgtgttgaaagagtgaatgggtgtagggggtgcctgtgttgtaaatcatgttctggaggtgacctcatttccttggaggcttcctctggrtcaggtcaggcatatgatgaatccctaggctctctttgccagcgtggtggcaggttctcttccaggtcttgttcaggctgataattgatcagcagtaattgatatgaggagagacagaagaaacagacaggaactagaatccatagattcctgtgcatgcaatatacaccaatacgacttaacactgctgcacatcacaccactctcactaagggtcactggtccctaaaatattttcctacaggtattacatgtagaccacataaaacaatctatttggcttggtgttcatgtgttcttcccgccatgccatagggcctgctctgtgctccagccactgaggttagtgaggctgatagggagtcatttccactggcaacaccctgggccaagcgttattctcatagtcacgaagcaatccttggcaattcgacatgtggaaacatcttcatgatttagcttttgattaaactttttttgtcttagactttttaaaaataacctttttcctttagaatagttttatacatacagaaacattgtgaatatagtatagatcagcagtccccaacctttttgacaccaggaatcattttcatggaagacaatttttccacagacctgaggtgagggagacggtttcaggataaaactgttccacctcagatcatcaggcactagattcttataagaagcacacaacctagatgcctctcacgcacagttcacaatagggttcacacttctatgagagtctgatgccaccactgatctgacaggaggctgagctcaggcagtaatgtgagcaatgtggagtggctataaatacagatgaagctttgcttattcaccagccactcacctcctgctgtgaagagcagttcctaacgggccacagaccaggaccagtttatggcccaggggttggggacccctggaatagaaggttcccatatactccatacccaatttcccccataattaacatcttacataagtatggtacgtgaaaaacatcagacaaatctcaattgagaaacattcaacaggaaacttgaccagtactgctcataactgtcctagtggccagaaacaaaaaggccagagaagttacagccaagtagagcataagaagacatgatgactagtctaatgtggtgtcctggatggaattcaagagaggaaaagggcattagggaaaaactgagcgaataaatctgaataaagtatggactttggttaatattcatgtgtcaatattggttctcatcaattgtgacatgtttaccatactaaggtaagatgttaataacaggggaactgtgagtgggggtacatgggaattctctgtatgatcatattactttttttrtgaatctaaaactactctaaaataattttatttaacaacaacaaaaaatcagatacttcaaaacaaaacaaacaaaaccaaccacagccacccaaagagaacacagccttatgtcacgtggctggtggattgaactgcaggtggaagtaacttaacctrtagaacgagacattttaaaccatatctttcattgaaagaaaagttttccaaatgggagattaaattagtgaagcatcttataaactttatcataaatatttgaattaaaagatgacacagtagagtgagaagaatacagggagactctgaagtcaatgttaaagacaaaactcgtggcctcccaatagcaatagcatgactcttggcaatatcgtgagatctttatagcytccgtttagtcccggtaaagtgagtataataatacccacctcttatcattgtaaggctgattgaatgagactgtaggtacagccccctacaaagtacctggcacaggaaagcaatcgttccacccaggcaattctgaaatctgtaaaacagaaaaccaagaaggggtgctggaactcggcaccagtgcaagttcaggcggaagtcctgctttttctgggaagcctcctttctgctcttaaagctgttcaactgattggatcaagcccactcagactatctggataatctcttttacttcaaatcaaattaatgttaatcacatctacagaatgccttcccagaaacacccttattagtgtttgattgaataattggggactagagcctggccatgatgacaccaaacctggccatctgtcccttccttccttccttccttccttccttccttccttccttccttccttccttccacccacccatccattcatttttccatttatcctttcttctttccatccatccttccattccacccatccacccatccatccatctacctgcctatttatcatgaacactgttctcctgtactataactgaatgaaaggtcatacccattaaaaaaattctgagttatatgggtcaaggtgagcacacttactttgtaaattgccaggtagtaaatattttcagctttgtggtccctttgtctccgtcacaactcctcagtacagttgttgagtacaaaagcagccacagacaatatgtgagtgagtaggcatgactctgtctgatggaactttacacaaaatggatgccaggtgggactttgcccatgggctgtggctagctgacttctgatatagatcagttgtaaagatatgtttttagaaagcactgactgagtggaaagggaagctagtgaaagaagcttgcctatggtaggtctacaaaaaagagacaaagggaagagcactttattagggctcagagcaaggcaggagtgtgagaccatgacaagtgctgtactcaatgcaccctcagtcatgctgtcaccaatcgtcgggttttcctccttccaggcacatgaccttctctgccccgttgaagtaagctgttgccatgtgatttgatttggacactgaaatatgagcagaaatattatgggggaaactttaagagcagcccatgtttgtcacatttctgtccctacagcagcagttttaggatgaagcttctaccaacctgagtgtctgagtaagatgagcagaattccctcacccaccaatgctatgtgagtaaaaaataaactttggttgtattaagcccccagtattttgggattgttaccaaacagaagctggcctatcctgtctgatatacctaacgacaccaacaatatttaactaaaatttcatcccttgtatcttttgtatgctaccttatctgtatgctacctctgtcttttgtatgctaccttatttgtcttcataacactttctaccaccttacatatatttatctattcatttacttgtctgttttctctgctagaatacaagcttccccaaagcagggacttctgataattgctcttaaagcttggaatgatttactatgtgacataatcaacatcaccaaaagcatcaacaacacaaataagcatatgtgtagtcctcacaaagctatgtgaggtagatagtattattaaccttgtttttccttataggtgaattattctcattttacctataaaaatgcattagttatctattgctatgtaacaaattgccgcaaaagcagcttaaaacatcacacgtttattaggtgtgagtcaggtgtctgggcacaacttgttggtcctttgttcagggtttcttgcgagacttcaatcaaggcactggtgagggctagggcctcatctgaaggctccactggggaaggataggactttgaagctcacatggctattggcaagcctttatttcttgcaggctgttggactgagggctgaagtttctagctggctgttcaggagagtctgccctcagtcttgwttgcttgccatgtgggtgtctccaacatgactatgtgcaccatccaagtgcacctgctgagaagggaatagagagattctgctagcaagatggaagckgcaatcccatggaatcacagaagtgacttttgctgcaatctgtgagttagagaagcaagtcagaagtcccagccccactcaaagggaggaaattacacagagtatgattactggaggcagggattactgagaccatctgagagtttgccttcaagaaggaacttggaattcagagaggtcacagagtgggtcagtggtacagatcgtgtcaccctgacctcactgagacctgacagaactataaaggttatgggtcaaaaggtagaatgtattccctaaagcaaggcacaagtattaattttgttccaattagggccagaatcaggatcttgagtacaaagttcacacatcttctttgtaaaaaaatatgaaatcagaaatgaatctttaagaaattagctgtkgattacatgaaattattaaacaaattgcttggatctaaaaaacctttgggcctggcatggtggctcatgcctgtaatcccaggactttgagaggctgaggcaggtggatcatttgaggtcaggagttcaagacaagcctggctaacatggtgaagccacatctcacttgagcctgggaggcaaaggttgtggtgagacaagattgcgccactgcactccagtctgggcaacagagtaagaccctgtctcaaaaaataaaataaaataaaataaaataaaataaaataaaataaaataaaataaaataaaataaaatgccttttgtttcttcaagtaatacaataaaattcttatctctgtattaataatagaattaagtggaaatattttcacttattcctctttatatgagtacttttatttggtgcaacaatgtacccagctaaaagaatacatttctcattttcctttgcaggaggtgtagacatttgactaaattctagctactgtgttatgtgggcttcttggaagattccttatagctcggtgatatggtttggctgtgtccccacccaaatctcatcttgaattcctacgtgttgtgggagggaccctgtgggaggtaattgaatcatgggggaggtctttcctgtgctgttcttgtgatagtgaataagtctcatgagatctgatggtttttaaatgaggagttcccctgcacaagctctctgtttttgcctgctgccatccatgtaagatgtgacttgctcttccttgccttccgccatgactgtgaggcttccccagccacatgaaagtgtaagtccaacaaatctctttcttttgtaaattgcccagtcttgtgtatgtcttttatcagcagcatgaacatggactaatacactgggtgatcagttggtcatcacattctttgtagatttccttcttcttgctgcagccaccagctgggcagggagaggatattgagaacaaatttcatgctgaggatggcagaggagaaagatgaaaggagtctaggcctgtacatctcaacttctttgtgcaggagagtaacgccttacatgcattaatctgttatttgaggtttcctttatatgcgtttggattgtctgtggctgcaacgaatcctgatacaatacaaagtatttacaccctagagagctgtgctaaagaacctatttgccatctcatcgtgctggcaaatgacacacaacgttcagtaaaactcaagcggatgctattctgttctctgctaaatgtgcctgatttatccattgtgatgtcctgccattccagatagagatcaggattcccttgccccatggctctgctacagagtctgccttgcccatctggcatgtaaaaccctgaaatgtaaaactctgctgtttgtaggagtgccaagatgtttaaacatattttagatattttttggaaagttgtaaaacgtggctaatgtaggaaatggtagcagttcataaacactacttattgttcatcacttcagatgtcactaggcttatgtaaatgaaaccgagatatttttcttttttctgtgtgaagtcaagcccattttttcttctaacattatagacatcccagagtggttatcagcatytgaaagcagcagggcctctttcttcttcttggatttggttaaaacaaaagggctayggacagtcttgaaatgtgaaccaaaaccccatgtttttaaacacctcagcaaatccgaatgaagacaagtttcctccttcagggacaaagcagggttcagtctataaaacctgactttgaagcagatgacaacttttcccacaggtggtgcacaagtacttctaggaaacacaaacacctaattttgatcttatttattaggattttattttaatgtggatctggaaaaaaaactagcacatcatgctcataattatacggatyttactgcttaggaggaggcctaattaattgtgtgcaattaacagccgttaattgtgttttagagatcaagttaaagaataatccttggtaaatcttggctgcgggtgactgatggaagtttcagaggctggactggaagatgaaactggggcaagatgttacacagcatggcctcaggaacctgagctccagcaacctgcgggtcccartggaggcgaagtcaaggagcgtctcagagagtggttgatgtgtgaagtctctgtctgcccatctgaataacaagagatggggcttgtgattttcctccacggtatgttgtctggttcctaatcccctctcattactgtcagttttaactgtgtgtgggtctatgtgtgttcacctctcatgggcagggtggcagaactcgctagggtaggaggagagaccacgaagtcagaccttgattcctgtgtggactttgaaagagttttctccatgatttagcctgtggatttcagcattttgaaaaattaaccagaaattcagaaattagatggagacctctagtggaggcctgggagaagaaagattggaagattggagtctacaaaggctgggatagtggcatgtggatgggctgcttggagtgcgcagaagacacgcaggcctctgtctcatgtcggggtccaccagggcctctgggtgccgcatccggtggtgttagctggcctctctcctcagtcaccagtgctcaggcagtggctgtggatggaggagccaagatggcagggcagggtggaggcggtgcatgcccctcaccaaggctgatgtagctgctgcctccactgtgtctgtcctacgcttctagccctgggggaccagcaaacacttgatagcaggttgattacatctggccccttcaattgcagctggaggtgattttcccttactggaattgacacctgctgctaatacagatttgccttttctgcctgttctcctgccagcacccctacctgagggcctccaggaggaatgacatctcaaacagaaacctgcataacatcagcccaaaccaaggacccattttatcatcaaagaggtgtgccatgaatgcrtgactgtgggatccactgctttgaccacatatggatgacttggaagctgccagcctacatgaacaatggaaaggccattgatggctcagcaaagttgccagctgagggccaatgctccccagggttggcctcgagggtggccacagtgctgtaacaacagccagtgtggtgctgaacctgcagcctacctatgatgctttgacaccaattgtcaggacacacgggtctggaaaccaaatcttggaagtaggattggttgctttccgtgtaactcctagtgacccactagtagaattttgcttcctatccctgagaacttatattccacaggactagagatcctggttcctgggatgaagcagggcagcttctgctgaggttcacagtaaaggttctgttgaacccaaatatgactatcactgggtccctttgggcccactagtggacgagcaggcaaagaaagaagttactccaccatcaggggacagataattccagctctcaatggggctatggttgctaccaggggactgaaacacagctgagactgaggagattgtcggtggcttcttctggtgcttccaagtctggggataatgatgactgggcagccatcagagcctgataaacacaaggcaaccaagagctcagaccctgagcggtgaaaaggccagccagtgctcaggcaggtcacccagaccatcataagcgctgatagaaatctaggacgtgcggtggaggagggagatgacacgtcccaaccatggtccctggttagctgcaggtggcgtgtccaccacgccttctctttggagtcatttggagatggtggctggccacgatcttgcaggcttagtgacagaacaatctgagaagaacgagggggggagctgctgcagacccatgtggtgctctgcctcaygccctctcagcctaacctctaatttcagcagagatggggtgtgtttctgttccgtggttaagtcgctgcatgctcacagaggcttacttcaagcacrggctgcaaggttttactttcttcatcaggattcctctcatgccacgaatggggaaagttcacagttgttggagctgatattcctagagaaaaatgctggtaagtaaaggctcatayctcctgtttttcttggggggactgttctagagccttctgtgcccttctcagtatgtctaagcagaatggagcgcccattgttcacagcagtttccttggcaatattgttgctttttcctccccagtctcactgttacaggttgaattgtgtccccaaaaagatatgttcacgtcccaacccttggtatctgggaatatgaccttatttgcaaatagggtctctgcagatgtaatcaacttaagctgaggttaggctggattagggtgggcccttaatccagtatgactggtgtccttataaaaagacaatgtgaagatatgttgggaaaagactgtgtgatggtcagacagagacagggattggagtgatgcagcttcaagccaaggagcgccaaggttgacaacaaatacctgagccaggaagaggccaggaaggattccctcctacatttttcagagggagcctggccttcccacatcttgatcttggactcccaacctccagaaatgtgagagaacaagtttctgttgtttgagctgcccagtggtggtcatggcagcctcaggagatgacgcactcgctctttctgcttcctctctcgtgctcccggggtgacctctccaataaactgcctggtcacaatccatttttccagagttttctttattagaaacccaagctaggataacctctacgctgtgcaaagagggagacactgctgtctaaatgagactttagtttttgaatgaactctttttttggtgatacagttaatcataattccatttaccattttctgaccgcctattatgtgcctggcactttacaaacatatcaagtctaatctagtatcatcccatgtggtagctgctattatcctattttatagaagggaaactgagtctgatggaggttgggagacttgcactatttgtgaccccaaatctacattctttctaaatacctaggacccaatctttgcccaataatttactttctctgtaggttccaacttttctttatgtatccacctggattagttgatatctaggtttggctgctgtgacaaagaccaaaatatgagtgacttraacaagatggacgtgtatttctctttacagaaagctacatatggggcagtcctgctcctcagggcccacagaagctcagattcctcctgtctacttgctctgccaagtgttgtttttggtggcttaacgccacttccactctccagccagtagaaaggtgagaaaagcgaaagagaagaacagaattctcttcactgcaggatctccttacatcccactgatcagaatttccaccatgaccatgcctagattcaaggggtgaggtgaggggaggagctgggaaatgcagtctgcattctgtgcccagctaaaatgtagggatgcggttgccatagaatcggggaaagtggatatgggggcatggcagctggtgctcacggggcactctttgcctttgacagtggatcaggcattatgcagagcacgaagaggagcacattgtagtctctgacttcagaagaagcagacagcaaaggtggtttccttcctggtggagattgccgattggactacagaatggcgagaatactgtgaaaggaggagcatagaaatccaagtgtgatcagtcagcaggtcttggccaggagcatacacagaataaacaaataaataagtaaagagaggaargggaagtaatgttaagactgttcaagacttggaatacagctctcctaaaaagcagtcctttgaagtcttgggatactacagaaagatcccaacaaccactgagcctggtttcgatttttggaggaaacacaccaggtgaataaagcagtgtgacgtgagagaaaagagggcggcaaaggtgaatgggatcccagcctttcaaggacttgggcagagcaactggaggaggtgtgagtccagccaacagtgtggatcagtttcctaggctgccataacaaagcaccataacctggtggcttagaacaatggaaaggcatttgctcacggttccagaagctgtaggttagaaactaagtgtggcagggtcatggcccctctgaaacctaggagggaaggatgcttccctgcttcttcctgcttctgctatcccctgatgttcctgggttagtggcagcataattctggcctctgcctctgtcttaacgtggtgttttttcctgtgtctcttcatattgccttttgtctctgtgcctctacctctgagtccaaattgcccctttttataaggacaatcacattgtccttagtcacattggattggattagggcccactatacagaccttgttttaacttgattcttctatcaagaccctgagaatctccaaataaggccacattctgaggaactgtgggtttggacttcaacatgtcttttttgggggccacaactcaacccataccagcttgcttgatggatattcayagctgatgtcaaagtaaatttaattctcatcctcagaagcaagaaagattccacgactaaggccaacaataacatccagggagttcgtttcttgagcaacgaccagctctttgcatagcacgaattgccaaaaaaggccagcgtagtcatttctcggccatgcacacctgtgatgtggcaagccatgttgacgtgccaaaaatgagaattctccagtaaaaataaaatagagtaaattagataataatgttccgaaggcaatttatacttttctgtgctttgggattcattttcaaaacatgtttcatttgtctttgaaaatcgaagttcacgttcaaggcccctttgagtttgctttttgtccaactattcgggcatgcaatagtcactaatgggaactcctggcttagagccaagaaaccaacaaaaggccccaaaatgaatgctttaaaagactgtgcatgttttaaaggcctctcgcctatcagcaagcaccactgtttctccatrgacaaaccagagtgtcctgacaaggtctcctgtcccctggcagacagctgacacccgaggcccatcaggctgggagcttgcttgtctggaatgtctttgaatgcatgggctatcctttcccactcccccatagcctcccmtatcagccaaagtaatttgaagatgtggtggtgttataagataatctaggataatctcccaattcttgcacacttctctgttgagaggtcggtttatcgcttcttgcacacttctctgttgagaggtcggtttatcgcagtttgtttttaggtctattaagaggtctaagtcccctctccctgaatctgaaccctgtgagtgcgtggctgatagagcaccttgggtgtggctgtggtataagtcctgaggatgcatgtccttccatattcccttctctttgagtgtgggagagtctgggaatgctgcgctattactcttgtgatttagagcaaaagggatatgatttgagtgggcctagtctaatcacatggactttttaaaagcagagtttttcctccggctagcagcaaacaaggaagtctgagatttgaagcaggaggagaatagggtgcattgttgctgcctttgaaaatggaggggccacatgccaaccagtgcaagtagcttttagaagctgagaagagcccctaagtgaattcagctcacaaactgaatgagcttggaagtggaatcgttctcagagcttccagaaaaggactcatctgtctaacaccttgatgttggccttatgagaccctacctaagaagasaacccagtcaaaccttcccaggcttttatggaactgagagataataaataggtatagttttaaggcatgaaatttgtaatagtttgttatttgccaatggaaaactaatagagtgacactgtgcccaattctaggttcgggctgcaaaagacttgtagcttttatttgtttcttggggcatttgctcccggaatccagcagccatgctgtgaggaarcccaagcagccccacagagaggtccatgtcaaagagagtaagaccctcagcccagccagaaccaagctcctagtcaatggccaggactgactttccagctttgtgaatgagccaccctgaaagtgaatcctatagccccagctgatctgttccagctgacccatgtgaagcaggacaggacattaccactgagccctgcccagattgcaaaataaatggttgttcttatttgaaatcactaatttttggggtggtttaaatagagggcamattttctgctgctcatcctcataccaaaattgctaattatgtctctagtaatatggttgatgtccaggataacttaaatgagaccattaagtgacaatgtgacattcctatccaaggggaaaaacagctcttgcaaccrtaagtacacattgttctaacctgctttcttcataggattttgtgaatcaaggactgcaatggacagagaatgttttgcaaattcttagatatagggggatttatcaactttgtacccaaatataccacccttatgaaaatgacaataagcattgctgttgaaggtgtgatgaaataagctatctctgacacaaaacrtgggattgtaaattggcatagttctggaaactaatttaactctatcaataattttaaagtgagaaatgttttgacatataattctaattaaaagagttaaagaatatagttaagatataattccaagccgggagtggtggctcatacctgtaatcccagcattttgggaggctgaagcaggtggattgcttgagctcaggagtctaagaccagcctgggtgacatggtgaaaccctgtctctactaaaaatacaaaaattagctgggtgtggtggcacgtgcctgtagtcgcagctacttgggagggtgaggtgggaggatcacttgagcctgggaggtcaaggctgcagtgaaccatgatcacaccactgcactctagcctaggtgacagagtgagaccctgtctcaaaataataataataaaattaaaaaaattaaaaagttaaaatgcagtatttgaaaaaagaaaaaaagatatagtaccaaagacaaaataaaagaaaacaataaccctctatgcatamataaattcatctcagtattatttgcaatattgaaaaatgrcaaacgacataatgcttaascacatgggtattcttatgatgtatttaaaatgattttatgttttgtatcataaatgtagcatattattatgaagccattaaagcaatgttcatgaatggtttttaatggatatgtaacaatgtttataatgtagtgttaaattaaaaaggatataaaattatatatacaaattatattctactatataatacatgaaagtacacataggtgtccaagtaaaatgcttctaatagcgaaagtggtgcaacttagtgtttaataatagttctttaaataattggcagtacatccataaaacataatattgtttagtgacttaaaattatttcataataatacagaaacttatggaaaaacatttaggctacttggttaagtggtcatattagcctcccagggctgcctgggaagagctccacaattagaaagcttaaaacaacagaaatgcmctctgccacagtactgggggtcagaagtcttgatttcagaagtctgatattgaagtattggcagagccatgttccctttgacggctctagggatgaatcttccttgcctcttcctggtttttggtggtggctggcaattcctggccttccctggccatcgttctaatctctgccttttttgttacacagccttctccctatgtgtcttcacaatgtctgccttccgtgagtgcctctgtgaccaaatttctctcttcttataaggatatcagtcatatcgaattcgggcccaccatcctccagtgtgatctcaccttcctttaatgaattacatctgcaatgaccctgtttccaaatcaagtcacatgctgaggttctgggtagacaagaattttgggtgaatactattcaacctagtggatgaagtgaaaaaatagattttcaatatgtaaaattacttwtactacttcaatacaaagttaaaaatgatgkctgtgtgcagtggctcacgcctgtaatcccagcactgtgggatgccaaggcaggtagatcacgaggtcaggagttcgagaccagcctggccaatatggtgaaaccccatctctactgaaaatacaaaaattagctaggcattgtggcacgtacctgtagtcccagctgctcggcaggctgaggcaggagaatcgcttgaacccgggaggcggaggttgtagtgagccgagatcatgccactgcactccagcctgggtgacagagcaagactctgtctcaaaaaaaaaaaaaaatacacacacacacacacacacacacacacacacactcattactcattataatatcatacagaatagttttgttgccctaaaaaatcctctgcgcttcacctatttatctctctctcctctagctcctgataaccactgatttttttaaactgactccatggtagcaattgcatttttcagaactaattctaagggattcattaggtgtatcctttttgattcagtgatgctggtattcgccaccaattgtaatggtagaaattgaaagcaactgaatttcgtctgtgggaagctacttgtaagtgatgttatcaaattgatgggattacacttagtcactaaacataatgtatttactgataggaagcaaaggtttctcatacattaagtcaataacatctggttgtcaaacagcaggtaaaatataatctttttttttttgagatatagtcttgctctgtcacccaggctggagtgcagcggcatgatcttaactcactgtaacctctgccttctgggttcaagcgattctcctgcttcagcctcccaagtagctgagattccaggtgtgtgccaccacacctggataatttttgtatttttagtagagatggggtttcagtatgttggccaggctggtctcgaactcctggcctcaagcagtgatccacttaccytggcctcccaaagtgctgagattacagatatgagccactgtacctggccaaaggataatcatttttaaaaaacaaatatatgctatgctggtaacagtgcttgtgtctgtacgatggtcttatgagtaatctgtcttaaaattttcctcctttttgctttcttttcctaatttttctataatgactgtgtatcacttttataataaagaaaatcataaaagttagtcattaaaaattcataacgcttaactatgggtgctactgaaattacaaatagttgttattttcttctttatgttgagtctaatagaaaactgctatttstatagattacaaaaagttaaatattggccctttaatttaacttacttttaaaaatattttctaaatattctacaggaatcatatgcctaaattcctcatatacctaaatttttgaaattcctcaaaagccttttgttaaaggattttaaaaaagataacatcatggttctcatacaaatctaaataaattcctgccaaggatttaagtcatgaatgaaggaatgggcaagatgttacaagagattcaatggagaactcaaagaacacgcatatatatgccatcatggacgctgaaaaatttacaaatagaagcaaaattggtcaatatctgcagggcaaaaatcgatgacttctcccccaaagttcacttgcatttccaggtatacaaactatctgcttgctctcatcttcctacagcttagagttgtaaatcccttaagagcagctcaggccctattaaatcagatcactccacaatcttcgcccatttcaacttctttttacaattttcctgatgttcctttttacacctgaagataaaaggcaaactcttgactgtgtgcttgggcctggcccctctgtgggctcgtctaagaccacccctcactctcacttccttgcattcagtatgtaccagcctcttttaacttcctaaggggtcccaggccccctggcacccaccctgctgcctcgatacccatcattctctctgccccaagaggtggtcctccccacgccccctcatcctacccacttaatgcctaaaatctgcccctcacctgagtacaaaccccctttcctcagggattcccagggcctctctccctccatcaacagttccttcagggccttgactgcaatttaaattacaacatgaatatgttttatgcaaatctaaactttgtgattttaaaatagcataggctaaaaatgttagtaaagtctctctttatgcttaaactttgaaataatgcaaatctcccaaattaccaaacaaaacaaaacaaaacaaaacacacacctcaaagcaaaagtctctcccaggactgtacatttttaaagctgcatttcaaaacctgcacgttgtgaacatgtaccctagaacttaaagtataatttaaaaaaaaaagctgcatttccaaagagtggtaaatagggcttcctctcttgccccagtgtggcctctctgtaactggtcaatagaaacagtcccggcccggggtcaccgggttggggaccctgtacttgctatggaacttccgagagtggctattactaaggcatatgcattgwtgttgtagcactcattgttatcataacttaacatcttccagaagctctaacaatattctccagtagtggtgctgaggctgaggctgaggccgggcatcttggtgaggggagtcagatgggatcagtgctttgctggccagccctcacaactcctggtgccgactgacgcatgatgacagaggccaagagattacaaagcacacagggcacaaatgcactaccctgacctcakatttctattcctatggcacattgttctggagttatttgaattatgacttatgctaggcctgcagagacatggcccatggataagatgctacaaccctgtgtatatttgtgagattattcggctaatatgttgtctccctgatctgtctgctttgttcaccatttttcttaccagctcctagtagaagggaaaaaaatatttcctcttgttcgtgtgaaaaaaaaaaaaacccctcaccactcaatgtgctttttcctgttctctcattcaacaccgtaacaactagcacaracttctgggtggggttggggttctccaacacaaattggcaggggtggggttctccccaccaccgagcaagcactcagctctgcactggacagtggctgggtgtcctgcaattccattctgacattttctacttggagacagctcagatcccacagggcgagggctctgttacacaagacagaccccctgtactttcccaccgatctgcatgtccaggcctccagaacttctgaccgaccggcttcaagctggagttcccacaatcccttcttttggtttaatccatttgctagaatgactctcaggaaaacacttgtttatgtttaccggcttatgataaaggatattgcaactcacaccatgaagatgcgcagggcgagggatgtgggaaggggggcggagcttccatgccttccctgggtgtgtggccccccaggaacctccatgtgttccggagacgtcattggatatgtatcgttgcagcgtggacaggtgtgttgaaatgagactgggcaaaaagggtttggtstaaacccagcagggcctgtctgttcacattcttttggcctctctctgcagcattccttcctccaagggatgcggcaggaccctttctggaatgagggccttatgacccacaaacaggctagagttcggctatgggaaggtgaaaggagagtgggagtaggtcagagagagagattctgtttactcaagagagtacgcagaagggtgatgggagttatgagccaggaaccatgggtggaaacctattgtgtgtatatatctatgtcatcgatatctatttctatctatatatcacacttctactctcttacattcagcagctgatgcattagtctgttttcatgctgctgataaggacatacccaaggctgggaagaaacagaggtttaatggactcacagttccaggkggctggggaggcctcataatcatgacagaaggcaaaggcacctctttcatggcagtagcaagaaagaatgagagaagtgaaagcggaaaccctttttaaaaccatcagatcttgtgagacttattcactaccatgagaacagtatgggggaaaccgcccarcagccgcttgattcaattagctccctctgggtccttcccacaatacgcaggaattaacggagctacagttcaagatgagatttaggtggggacacagagccaaaccatatcagctggcaactgwgaattaaagtgacaaaacatagagtcacaggagaaaaggcatacacattttacttgataatattttaatttttatgtgcgtggaggccttcaaagaaagtggagacccaaacaagtggttcgatttgggagcttagataccattttagcaaagggcaatacactgcggagaggtgacaaaggaaaaggggtttgggcttctaggggtggacactgggcgagtagacacacaggtgaaagttgtgaaagattgggtcattttgcaaggtttaatccatgcagactcatctcggtgctgtctccttctctggtgatagaggtcgttcttatctccctcataggagggatgagggtacatcttcacaagggaaatttatgccctcctctctggcagatacgaggagggcagaagctttttttttgttttgagacaggatctcactcttctcacctaggctggagtgcaatggtgcaatgttggctcactgcaacctccatctcccgggttcaagcaattctcctgcctcagcctccygagtagctgtgattacaggagcccgccaccacgcccagctaatttttgtattttttgtggagactgccgccacgcctggctaatttttgtatttttggtagagacggggttttgccatattggtcaggctgrtcttgaactcctgacctcaagtgatccrcccacttcgacctcccaaagtgctgggattacagtcatgagccattgagtcccgccctctttttctttttttcttctgcttttttttttttgcagttgaaagatttaatagagtgaaatagagtgaaaatagagctcccatacaaaaggaggagacccaaagggggttgccgttgctggctcgaatgcctgggtttatatcccaatcattgtccctctcactgttctctcaggcaacagatgattggttatttctttatctccgtttttgcctaattagcattttagtgagctctccttactatctggttgggtgtgagctaagttgcaagccccttgtttaaaggtggaagtggtcaccttcccagctaggcttagggattcttagtcagcctaggaaatccagctagtcctgtctgtcagtcctctctctcaacaggaaaacccaagtgctgttggggaggttggcgatgactgctctaactgcttcctgctggcctggggtgtagtaggggttgtgcagttgagatttcctcaggaggggtgccttcgatgtcgttaacattggagcatgggctgtcagggtggtccaggggtccgcggtagatcttagtcatggactgcatctggggctccatttgaagaatgatttgtagttttacagctttaattctggaagagacaaacttaacaaggaggttaaagatacagggattcaaatgtatggcctggggatacttctttggcacactttacaggccccaactatctgcttgagagttttgaaaagtcctggtccagtaaataacaatttggccatctgatgggtgctatcaatgcataagtgaaagttttggtgagtggttttaagtaatttccattggttagctgcaggcaaaggtatttttccttgttcggtggcttgccatcctgaggggagaaaactatgtcctcgtgagattccccattctatttcttcttctgaatactggggcttggtttcccagaggggattaccccatactaggggtccttctataagcatttctaatggagggtcctgccttgcagctcttttggcttcaatatctgcttggcggttcctttctatttccctttcctttcctttctgatgaccccggcagtgtaagactgccacctctttaggtttctgtacggccaataataattccctaatggcttcctgatgtttgataggtgttccctcagaagttaggaattccctttctctccatattactgcatgggcatggaggactaggtaagcatacttagagtctgtatatatatttaccctttttccttctcctaattctagtgcccgagtgagttttgccagctgagcactagttcctggagtgaggggattactttcaagtattccattatcactgactactgcataccccactttttgaagtcctttttctacaaaggatcttccatcagtatacaagttagggttgggatcagtcaagggaacctctaaatggtcccctcgagtggcataggtttgagcaattacttgttgacagttatgttctatcttttcttcattgtgtggaagaaatgtgtccaggttaagagctgcacaagtgcacagtcgcagcattggcccttcaagtaatagagcctgatatttaagtaaatggttgtctgacagccacaagtctcctttagcagtgagtatgccattcacatcatgagatgtccacacagtaagatttcttccctgtattattttaactgcttcagatactaagactgctactgccaccactacccgtaaacaatgaggctgaccctttgccactacatcaatttccttactcaggtatgccacgggttgcaaactcgtccctcagaccagcgcaaggactcttagagctattcatgtttttttttttctttgtttgtttgttttttgtgacatatgaggaaaagtcttgccccgttagcaagcttagcactggggcttgcattagggccttctttagggcrtggaaagctgcttctgcttcaggtgtccatcttactaaatgggtattggctttctgagtttccttaattagcgtatataacggtctggctattttgccgtacctgggaatccatattcggcagaaacctgttatgccaaggaaccctcttagttgctttagggttttgggatraggataagccagtataggctggatacgttcctcactgagggccctggtgactttggataattttagccctaagcatttaacctgctgtgagcagagctgagcctttggtttggaaaccttgtagccacaggtagtgaggaaatttaagagcgcttgggtggcttgatggcacaaggtttctgaacgggcagctaaaagtaaatcatccatgcactgaaggacaggagtgtccaggtatgagaactggctcaagtcttgggctaatgcctggccaaatagatggggactatccctgaacccttggggtaaaacagtccaggtgagttgagatgttgggtttgaaggatcttcaaatgcaaacaagaattgagagtcaggatgtacagggatgcagaaaaaggcatccttaagatccaggactgtaaaccactctgcttcctctggtatttgggaaagcagagtataagggctaggtatagctgggtatagaggaaaaacagcctcattgataatcctgagatcttgcactaacctccactgtcttttgggtttctgtactcctaaaattggagtattgcaggggctactgtatggttttactaggccttgggcttttaggtccttaacaatcttttggagtctttgttgggcctcgggtctgagggggtactgcctttgatagggaaaggaggtggaatcctttagtttaacttggacaaaatgggcattctttgcttgtccatattgtccttctgttgcccagacttcaggactaattccttcctcaarcaggagaygacaaatgggtgttccttctcctatgttcaggtgtataatggcccctgcttttactagaatctctctctctaacaagggagtgaggctttcaggcataattaggaaagcatgtgaaaagggtaaagctccccagtcacaacttagtggctggaagaagtatctagtgactggctgtcctaggacccctcggatagtgacagatctggaggacagttgtccgggacaggagagtaagactgagaaggccgcaccggcgtccaggagacagttaacctcttggcyctcaatggtcaagcatacctggggctctgtgagggtgatggcatgggctggcgcttgccctgggcaccctcagccctgctgctggatcatctggttagtgtcttctgactcagaggaccttcatcccctggggcagtgggccttccagtgattcccttgacataaggggcatggacaagagggcggcttacttctacttggacaatcttttttaaagtgtccttgtagaccgcactggaagtaagccctattaggcattcgatttgcccagcttttcccttttacagagcctccaaagtccacttgcctgagggccatgastaaagtgatggccttttttttatcctgtttgtcctgttctgcctgctcctcctgatctctattataaaaaagcgaggttgccaagttcaatagggtttctaagttttgctccaggcctaagacagacttttgaagttttttcctaatgtctgcagctgactgagtgataaacttatcctttaagattagttggccttcactagagtcaggtgacagggaggtatgcttcctcaatgcctcccttagtctctccagaaaggcagtaggattttcttcctttccctrtgctatagtgtacatcattgaataattcacagccttcttcctagttttccttagtccttctagcacacacgtgagcaaatgtctgcggcaccaatctccatgttctgattctgtgtgccagtgagggtctacactggggactgcctgctgccctgtggggaatcattctctttcttctgttgtcatcctgtcattgacctgactgagataccagagatcgccaaactctcaggctgcagtaatggtggcactttttcatttggggttagtgtctgatttagcagtaacattatatctctccatgtcagatcaaaggattgtcctaacccttgtaaaacatcaatatagccatcagggttatctgagaatttacctaggtctattttaatttgctttaagtctgagagagaaaaagttacatgcactctggctgggctgaattctcctcctcccgctgcttggagggggcataatcggggaatattggcactctttggttcattgtttacccctttgtctatctccttttggaccatttgggctgaagmgggggttcttattagttggggaaggagtcagggggatgttggggtagggaggtagattctgagggcttcctgtagggcataagtcatactttttgcataactgcgagttgtctcttaatgaaaagaaagtttgtacatatggcacttcactccatttgccttcttttctacaaaagaggtctagctgtaagatggtgttataatttatacttccctcaggaggccagctttcttccccttgaagagaatatcacggccaggcggtactgcagaagaatataagtcatttctttcttagcgtctgagggtcaaattggtcctaattctccagaatacatcttaggggcaattttgccttggggggaacgtttcccatctgaaaaaggaacatagggatgccagcatccctagtcattttcygatgagcattagtcctagagtgtcctctgtggtcctaatgcttattcctttccagggtgcrtaaccacccatggacctctgcttatcggattagttacactcaccgatgtagcastcctgcacctgttttccygcctttcttgaccacaargaaaggggtccgggctgctggattctagtggtcctttaccagcgtgcccaacattgcctttgcgctcaggrgtgagtcctagagctgggctgggttcctgagtatttcataacaacccagctgccccatcaagatgcattcccataaacaacagtttttatgcaaattcgtttcagagagggtgtagcgaaccttttgagtcaggattgagatagtcttttgattctgtaagtactttaaggcttggctgagtgcaaacagctcgcacatttgaggagaccaattattaggcaatttttctaactctgcttccacaagagtctccgtatcaattactgaatacccattgtgttttttwcctcaatcacctgggaggaaccatctatcatcctgtcctgaaggaagatcctcctaggtctggtcggacctttgtatggtaattaagatgtaaatcccctgttagaaaatctgctgggttaagggaattatcagyggttggagttacattacttttttctaacataatggccccatactttaagatttttgagttagtaagctacctytttgcttttttgacttagactaattctgaactggtgaggtgtgctcacagcgaagtttcctctaaaagttacttttctacttttagcaaagcagttgccgctaccaactgaatgcatttggytcatccgtgggttactgggttaaggattttagacaggaaggctatgggttgtcagtggcctcagtgctttcgggctacgcccttatttacactgacaacaaagtggcattggagtgttataggttcatagagaagatcttcaattatcaattatgggtttcaaatttaccctggcttttaaaggaatagggcacacttttttttttttaactatttctttttctttcttttactctttgacttccttggaatccgtgaggccaagaacctgcctctctgtctctctctctctcttcatctctctctctctctcyccatctctctctctccgtgtctctctcttagccattacaaacttggggccctggcaagggtggtggggaaygggtcctgcataactgctcatgtcaagagctgtatacctaaattaggagggacgccagggataagactccctgggctatagcctaggtgcctgaggacgcagcgtagrgcttccttagatccctttggagatacaacytgctagaggaaatgaaagtctgaaccattagtacctaggaggcagggatcagaggaartagattcagaggtaaggagaattttggggctatactttcaagaaagtcgtgttcgggacccaggaggtatgggtcagaaggaaaggtaagggcgcatgcgtgggcgactgttgagtagagacttctggctgagccatgatctcaatcagctactgctgggaggtygggacgacagctttctgcctctagttggcccttggtttccccaagaaaattgaaagtggaagctggctccaggcagaccaatgtccccaacaaccccagaagggttgggggttgttagaaagcccttccccagatagcctcacacctgagtcttaagtcaggcggccacgctaatcgtttttaactggccgacaggtgtccggtattttcctccacctctaaggaaggctaggacagtatagcaagcgaaagtggtccaatattactcactgctttggatgtcccttcgtggttgccaaaatgttacggggggtggggggtccttgctcccagagctcccaagatggtggtgrgccacttccaagatggcggcaagcctcgtgttctctgacctggggttcttggcctcacgaattccaaggaatggaatcttgggccatgcggtgagtgttatagctctattagaagctgtgggtcatgggagagaaccrtggaagccagtgactagtgtttagctcgattaggatgaacccaggcacttagccatgcaggaacaatggcgagcctttagcctgattggaagtggcaatgggcgcctcactggatcaggagcacagcagatactctgccggatctggaggaatggaagtcagcggcgggtctgcgatggtggcaaacagcagtggtggacggtgagtgaaagctcagctcgagccgtaacaaacacggaccagaagagtgcagttgcaagatttaatagagtgaaatagagtgaaaacagagctcccatacaaagggaggggtcccaaagggggttgctcccatccctctttttctatctctactttttctcaattatcttcagctcaaaataatttatatgccaaaatggcwtattttggggtggcatatcctaatccctttcagcatagaggtttatttttttgaatcaataactgaggaataattattcttactaaaacycaataattcaactcagaagggtcttccaaagaagktggtctcccagcatgctctgggttctgtttgcttgctgatggaacacagttaacagttaacayagctcacgggactcstgatgcttgcgtgctgtgaataataagacactttcggaatgggggctcagcacactgtcagggctctcagagtttgccattgttatcattattattattagctatcattgtttttattgcctactattacaatttctaacatgcctctattcrcccttcaagtgagtaaaacattcctcagracttgcctggcaaaagcaccttggagaarttcaggctgctggtgagggtctagggctgaccccagcaygccctaaggaaggtcagcccaagggcaggcacttggcttggttagttgctttctcctgcctaggctaagtgttaagtgctctctgaatagccactgcataaaattagtggataacacaactaacctggtgaattagtctgttttcacgctgctgaagtcatacccgagaccgggaagaaagagttttaatgaactcacagctccatgtggctggggaggcctcacaatcatggccgaaggtgaaaggcacttcttacatggcagcagcaagagcgaatcagagagccaagcaaaagggatttccccttataaaaccatcagaactcatgagacttattcactaccagagaacagtatggggaaactgccgccatgattcagttatctcccaccargtccctcccacaacaggtgggaattatgggaggacaattcaagatgagatttgggtggggwcacagccaaaccatatcacctggccacatggcctrgggggttccaggaacctggaagtggacttaactgtaataycaaagaagaagctcctctgccaacactgacttagcagaactgtttaatgaattarttacttaggaatgacgggagttacctccaagttaataaggatgatgaaaattcattatttacacaaggaaacccacagaaccaggcaagagaccacctaaaattttgttcacctaaaattctagagttctttgagcaaaccaaatgagtggttgtatcattttaaattmacaggaatagataggaagtctaggtcattaacataatttgtgctctcagttcatttttcaagtgggcttcctattgcatttttcttctgattcagttgagctagggtgacaactcctaaatgtgtgatattttcagctaagtgctagtgtccaaggacaaggcaactctggaaagaaaatggtttaagtgagcagtagccagagaaacagagtgcacatgaaaaactctggcaaaaaaaaaaamaaccgattcctgttaaaaatggcttttaacactgaagcactgaaggattaaatgttcataatttagaattgatgattataccagattttcagatatggccattttctgtggagggagaaacactactctctgtcagttttgactgctacaacagaatactagaagcagggtgggttaaatagcagacattcatttctcacagttccagaagctagaagtccaaggttaaggtgccagcagagtcagcgtcttggtgagggctctcttcctggcttgcaggtggcttcctttttgctgtgtcttcacatgacytttccttgaagtgtgcaagtgaagagaaaacaagatctttttttttttttttttttttttttttttttttttttgagacagcgtctctctctgtcacccaggctggagtgcagtggcgcaatctcggctcactgcaacctccacctcctgggttcaaacaattctcctgcctcagccactggagtagctgggactacaggcacgtgccatcacatccggctaakttttgtgttattagtagagacagggtttcaccatattggccaggctggtctggaactcctgacctcatgatctgcctaccttggcctctcaagagaacgagatcttataaggacmtgagtcccatyacgagggctccattttgaggaccttatgacctttcaaaggcttcatctctaaataccatgacattgggagtgagggcttcaacatagcaatttcgggggaacacaattccgtttatagaagctagaaaataatgtgctagttgtgraaaggaatgattttcacactataatttttttattttaatggagtggttgtggtcaactgaagttccaccagaagtaaggaaaacagccagtgaggttagmagtaagcctcagcactcactgaattgtgacgtgcagctgaagtcatcctgagaaagttgcattggatgacaaaaaggayacaaatgagacaagtgtctggttattgtataacacacacaaaaattaacttttctgctaycttcttaggttcagcaccaggcgcctgyggaagaaacataaaagacaaattaacgggagaaaaaaaatgtttatgccttatgcatatgggagccaacaaaggaagtagctggctcattaatagagttaaagagttaaaaggcttatatatctaacgttgtaggrgaggagaagkggggagaaaggcttcctatagaaagaacaaataggtttcttttggaaagacaaataggttttttttttttttttgaaacagaatctcrccatgtcacccaggctggagtgcagtggcacgatctccactcactgcaacctccgcctcctgggctcaagtgattctcctgcctcagcctcccgagtagctggaattacaggtccacatcaccacgcccggctaattattgtatttttagtagagacagaatttcgccacattggccaggctggtctcgtactcctgacctcaggtgatctgcctgccttggcctcccaaagtgctgggattacaggcatgagccaccgtgcccagccggtctcaatcaatttagaaagcttattttgccaaggttaaggacgcacctgtgacacagcctcaggaggccctgaaaacatgtgcccaaagtggtcagggcacagcttggttttatacattttgtggaggcatgagacatcaatcagtaagtgtaatgtgtacattggttcggtctggaaaggtgggacaattccaagtgggggcttccaagttgtaggtagacaagagacacaaggttgatcagcctctcactgaatacacaatttacatgtgagagaggggtagaggaataggcagttatgccttgtctgactcaatgaatctgtatttttactaagcaatacggcagagaaagcaatcagatacacatttgtctcaggtaagcagagagatgactttgagttctggcctttgctccgcacctgtgaagatcagctacaatttacattgccagggtgaaattcaacggaactgtttttaaggtaaagatcttgaggcccacaagggaatttttctcatgggcaaattgtgaaggaggtatgcagctttttcatctttatagctatcttatttaggaataaaatgggaggcaggtctgcctgatacagttcccagcttgactttctccctttggcttagtgattttggggtcccgtgatttattttcctttcacaccttcaactggaaggaagagcattctycgcctcccctggccccatttacttgcttcttggtctttaaatatgttagctatatcttccattggtgcctattacatgcagaaatccttgattctgagttccctgacaagattatcaaaaaggaccattaaaaaagcagacctttsactgggtgtggtggctcccacctgtaatcccggcactttggaaggctgaggctggaggactgcttgagcctaggagttcaaggttgcagtgacctatgatcgtgccactgcactccagcctgggtaacagagcaagacactgtctccaraaaaaaaaaaaaaaaaagcagttcagtatggtgctgaacatcaggttcttgggacacagtcttccagaactgtcacagtgctctgcaaagccacgttcctgtgttcatctcctagcacttgrgggtggggggttggagctctgccctatccaccagtcctccagcaaatgccatggaagccacacttactcctaatggctrtctcatccagaggacgcaccctcgggacttttttctttcttaagaggatttgttcttgtggatgtcaaggtgcctggctgggagaaggagccagttccaccagccgctgggcctttgctggaggcaaggtcagtcagccaggcagcatgttttgggcaggaaggatctgtcagcctccagctggtggaagaggaccagggcgggagctgagcagtgccttgactccgaaggacttggaagaggagggagakggagtggaggccggagtggagaggatasactggccctgaggcctctgcgttcccagcccggggcctggacttcctgtgtttggctgctgtttggagcttgstgatgattaatgaggaaatacgcactctgaagagcttatacctccctggastgtgaggccacatctgcatttataacacagtctgtgatgtgacagagccatttcttgaggaactttggttctggtgaggcagcatcaggactctctagaggccagacaagagtgtgtttctacatttgtatggagagaggacaagagccacgaagaggcctttaggaaatgaagcacccttgctgaagccctccaaagggtttacctgtcatctggggtaagacaactccagtttgtggctcccctgtgacaggtgtttgycaagtgagtttctccatagggcccctcaagccccgcacaggccgttatctgggtttcccaggaaagtkctggacatttgcacacatgatcttcgctttccaacttccacagagttaaaaactacaagcgtgggcttctctgagaagttcagaatttctggatggtttctamtcagtgagtgtcgctttcacagtgaactgttcttgggatgggttgaaagctgagacttggctgaaatttgatgggctgggtggggtggggtcaggattcaattaatagaaagtttttaaaaaaacttttaccgacttcgagggtacaaatgcagttttgttacatggagatattgtgcagtggggaagtctgggcttttggaaaggactgactcatgacgtctgccattcattggacaagcttgtaaatgccttttccaccctctaatgagaagccttagggaaagtagaattstcccaaagtctctggaggttctgagaaggccgaccctgaatgcaagatgctcagagctggagtcttccgagtgcaggagaaatgccagcacctttttattgagccgtggcggtgtccaggttgctccttagtcccttgcrtggtttttgttacagctatttctttcttctttttttctttacttttaaaaaatttcaatagtttttggggtactggtggtttttggttacatgaataagttcttaaatggtgatttctgagacgttagtgcacctgtcacccgagcagtgtacactgtgcctaatatgtagtcttttatccctcaccccgttcctccctgagtccccaaagtccattgtgtcattcttgtgcctttgcatcctcatagcttagctcccacttataagtgagaacatatgatgtttggttttccattcctgagttacttcacttagaataatggcctccagctccatccaaggtgctgcaaaatatgttattttattcctttttttttatgactaagtagtagtccatggtgtatatataccgcattttctttatctactcattggctgctgggcatttaggttggtttcatattgttgcaattgcaattgtgctgctataaacatgcatgtgcaagcgtctttttcatgtaacgacttcttttcctttgggtagatacccagtaatgggattgctggatcagatggtagttttacttttagttctttaaggaacctcctactgtttttcatagtggttgtataatttacattcccagcagtgtaaaagtattccctttcaccacatccacaccaacatttatggctttgtcttttatgataattcttgcaggagtaaggcagcatctcattgtggttttaacttgcacttccctgattagtgatgttgagtatttttcatatgtttgttggctgtttgtatatcttcttttgagaattgtctattcatgttctttgcccactttttgatagacttattcttttttttttcttgctgatttgttttagttccttgtagattctggatactagtcctttgttggaggcatagtttgcaaatatttccccccactctgtgggttgtgtgtttactctgctgattayttcttttgctgtgcagaagctttttagtttaactaggtcctatttatttaktttttgcatttgcttttgaggtcttagtcattaattctttgcctaagctartgtccaggcattttttctgatgccattttctagaattcttagagtttyggrtcatagatttaagtctttcatctatcttgagttagtttttgtataaggtgagagatggggatccagtttcattcttctatgtgtggcttgccaattaccccaggatcatttatttaatagggtgtcctctcctcaatttattttttttgtatgctcggttgaagatcagttggctgtaagtatttggctttatttctgagttctctattttgttccattagtctatgtgcctatttttataccagtaccaagctgttttggtaagtatagccttgtagtataatttgaagtcaggtaatgtgaagcctccagatttatactctacagttgttgggaagaatgttctgtaaatatctgtaagttccatttgttctagggtatagtttatgtccattgtttctttgttgactttctgccttgatgatctgtctagtgttatcactggggtattgaagtcccccactattattgtgttgctgtctrtctaatattgtaggtctagtagtaattgtttttaaaatctgggtgctccattgttaggtgcatataaatttaggattgtaatatcttcttgttggattaattcttttatcactatataatgcccttctttgtcttttttttttaactgttgttgctttaaagtctgttttgtcygaaataagaatagctacttttgcttgcttttggtttccatttgtgtgaaatatctttctccaacctttcaccttgagtttatgtgagtgcttaggtgttagctgaatctcttgaagacagtagatatttggttggtgttttttttgtttttttttagtccwttctgccatttttaatcttttaagtggaacatttaggccatttacattaggtcaatattaagatgtgaggtactgttgtattcatcatgttagttgttacctagatacttctatttttaattgtgttattgttttatagaccctgtgagatttatgctttaagcaggttctatttgggtgcatatcaaacttctgtttcaagatttagaactccttttagcatttcttgtagtgctggtttggtagtggcaaatgcctttagcattttttgtctgaaaaagactttatctctcatttatgaagcttagttttgctgggtataagattcttgactgacaatcattttgtttaaagaggctaaagataggacttcaatcccttctggcttataaggcttctgctgaggaatctgtatggctatttcccaccaaccttgagcaggcacttgccccctgttgtttgtttttgagcttcttgccrttgccccaaacatgacattttctgccacttttgaagaytccattatcaagccrtttccaataatccaaaaataaggggctgagtgcgatctcaaaagcaccaatkttctttctgagaggactagcttggtgagtcctggctgatcttctgagtgtgtttgcctctcgtcaggacagggaggaattggtgggtggctaaatcctgtctatttaatacagtttaataagactaaagactttaagaataaaagatttttcaactaagtgtaggtaattcaagtctgctataatgaaatgaaagacaagttaaatctcaagtcctgttcagactaccccayagggatattcatgaacaatacccggcatatgtctttaattaaarcagcttgtctgatttcagttaaacttgaaatcagctttatgacagtgttccaactgcatacacccttcaaatgctatcccctctcaaatccatatctgtagcagcctcactgcttggttcctggagctctgagggtgtttttgcactgcctgccctgtgattctgctagactcctctttcatacagagatgaaatgtggatgacatgtgagggtgttggcagaatggagtgttgagtaagttaagcaatctrttcttagtctgttgcctgactctacctgcttgtcggggactagaagtctttcctaacagaccttaatctattgctgtgtcrttttctgtaacactgggttcacacttggcagtgactgcttttggtaaaatatgtaattttttayaactggacgactcaatttctccttcatcctctgctagagcctgrcattccagatgactacttgtggagttgtgttaatcgaaccttaaaaattattaaatgatgacctggtgcggtggctcatgcctgtaatcccagcactttgggaggctgaggcgggcggatcacaaggtcaggagatcgagaccatcctggctaacacggtgaaaccctgtctctactgaaaatacaaaaaaattagccgagcatggtggcrggtgcctgtagtcccagctacycaggaggctgaggcaggagartggcatgaacctgggaggtggagcttgcagtgagccaagatcgcaccattgcactccagactgggtgacagagcgagactccatctcaaaaaaaaaaaaaaaaattagtaaatgatttatttgacacttcataattctggattttggatcaatctgggaaggctgtgatttcattttggtttgtgyacagctgttgtacaacttgctactgaggcatatgtgtagggatttgctgagtctattgtagattattgcaaggggctgggtcccacagtgaaatggtgctgcagcacaggtatttcaaaccttatattaaattacgggctgggagtggtggctcatgcctgtaatctcagcactttgggaggccaaagcaggcggatcacctgaggtcaggagtttgagaccagcctggccaacatggtgaaactccatgctctactaaaaatacaaaaaaaaaaaattagccgggcatacttccagctacttgggaggctgaggcaggagagttgcttgaacccgggaggcggaggttgcagtgagccgagatcgtgccattgcactccagcctgggcaacagagcgggactcggtctcaaacaaacaaacaaacaaacaaacaaacgaaagaattacagacacaagtagttatagtttagtgcacacgttgaattttgctttctaaagacctcagagaaacaaaggggtggaaaccccacattctttctcgaggctgtgaatacccagtaatgcacttaaatgctaaatgcaggtcatgggcctgagaatctttgctgtcyttcacgctgacactgtgggtttcattcagtaacttggatgagatgtccgcagatcaaggtgtggtagttgttttcccatcacagtttcaattcttgtatttttgcttctgggttggctgtggggtctgccttctagggcctgtcagaaaagaaaggagactggagccctggatgtgcgttgtcagcacattataaagtctctcctcaaagtccctgatgggacctgtcacctcatattctggagggacgggtggacgagactcgcagggctgtggaatgtgtgtagatgccaaagctgaaatgagaaccgtccrggtcactggactccactcattggtgctgtggaggaatgtttgcaataaagagaccctttcctgaggctaaggagtrttgttttgcgggtggttcatgacatgttcagcacataggtgatctaaccctgaatcttccaggaggatacatcagtactggggagtgtcttggataagcctctcctaggggagagaaaaaagcaaaaaggaaaaaatgcaagggtrgagggtgaccaagagggcatcaaagaacaaagggggttggaaggaargaacaagaggtatacatggcagaatcctyatgtgctgtcaatggtctggccaggcyttaccccatctatcctggcctccctgaactctgacctcaccccttccacccacccctgtctgccacagagccttctctgcagttcatcaagcacagcaggcacagtcccccccgagagccttagtacctgctttttcctctgctgggaaagttcttcctgcaggtgtccaatgcggcggctgttgtctcacctcattcgctgtgcatggtgcaccttcccgggggcttttctctgactaccctgtttgaagtggtagctggtccccctccttgccctgtttctccccacacctattgccaccttctaataggccatatcatctatttattcattcggttgcctttccttttgagaatgtgagctcatgagggcaggagttttttctcagtgattagtgattgaaacgaatgtaataagcccatgatctgcatttggtcagkcattcagaggtgaggctacaccatctgcatcccttcatgatgcaggtgggctggcgggtggtgtaagacgatttcaaccagtgattctcaaatttgaccaggcaccagaatcacctggagggcttctttaaatccaaaattctgggcccacaccaggggtttctgtttcaggaggtctgaggtggactcagaaatgtgcattctttttttttttttttttttaagagtctcgctctgtcacccaggttggagtgcaatgacgtgatctctgctcactgcaacctgcgcctcccgggttcaagcgattctcctgcctcagcctcctgagtacctgggattacaggtgcataccaccacacctggctaatttttgtattttccatagagatggggtttcgccatgttggccaggctgatctcgaactcctgacctcaaacgatccacctgccttggcctcccaaagtgttggaattacaggcgtgagccaccgcgcccagactgtgctttctaacacttcccagatgaggctgcccctgtccacactgagatgcgctgatccaatgtgtccacgggcacacaccagctgcggggggtggaggtggcggtgggcacagaagacttctraacggtagatgcttgtcagtgatgggttgttgcctgcttgctttattttcccrgggccaggaagaacatatggaggtgcagggctgagggaaagctgtcctgactgtgctggtcgtcctggcacrtagggatcgcctgagcttggtgggctgttcaccaacgtccacttggagtgtagggggaagacaagggccacaggaggccgctggaacacacaactgccagaagggtctttctcagcctcttcccactgcatcccttcccatggtgacctcttctgtggggcccatttcctcctgcattgactcgactcccagaacggtccttcaggtgcaggggatctcccccatcctcaccagggccatcactgtcctgggagtctgcattaggttccttcccacaagttgttgcacctgctgaaatgtcccttcccctccctcgtttctcacctcttcaatttctatctgggcttcgaggaagacctgactcagaaatcacctcctccctgaagcctcctaamccttgccattttcagggcgagaatctcagtttccatttactgacagggtaagggttctgttgtgtgtgacacttcctyttcctcaccaccccagygctctccaacggtgtcagctggagtgaactcctgtgtgtgcaaggcctgggtctcctggtcagactactttctatgsgaaaggcatagtgtatagtctatayactatacataggggtgctgggaggaactggggttttcacagccagctttggttttcattaggtttgtttagtttccattgcttcaggggtgttagttttgtgttcccaactagattataaactcctcttgcattcctgatggcagtgacttgaaggcatttatttgaagaataatagacatacagaaaggggcrcatgtcataaaggtacagctggacgacttttcacaaagtgagcacatttgtatgatcgatgttgagaccaagagcattcagtggacaactcctttccagttactccaccccactcccagtgaccatcattctgacttctaactgtgtagacatgttttgcttgttttgtactttacaaacatatctactctattttaggtggctagacaatgtgttttacaatgctggccatgacagtgtttgaaagaataaaatggaatcaaatagaatgggcagtatcagagtgtgttgcctgcctaagaaatgttttgtgacattttggctttgggtctatttacacattaaatctaagagcaccagaatgtggtgtcaaaatgtgtttggggatgaagatattctaaagwcctgtagtaagcaatgcaaarcgttctggaggtgtttattaaacatttgtttgtagaatggagaggaagacaaggtccctgcttgtgtagagcttagggactgactgtagggttaacaaaccacccttaatgtacatcttaggcatatggcactgtatgggcctatttcagccgtggttacaaaaaactcttcyaaaggtttggtgggcagtggatgaactctgggtctagtgtttctgagwtactttttcctgaaaaagctgaggcaggctgggtgtggtggctcacgcctgtaatcccagcactatgggaggctgaggcaggcagatcatgaggtcaggagattgagaccatcctggctaacatggcgaaaccctatctctactaaaaaatacaaaaaattagcagggtgtggtggcacgcaactgtagtcccagctactcgggaggctgaggcaggagaattgcttggacccaggaggcagaggttacagtgagccgagattgtgacactgccctccagcttgggtgacagagcaagactccgtctcaaaaaaaaaaaaaaaaaagctgaggcatacgtgctgtcttgagggtatggaggatctgggttgaggcctggaggtggctatttcaggagaggagagtatatatgggctaattctagagctcctgagggtccatcccaaaatttgtaatgaaygcaaatttgtaatgaataccaaagcgttcaaatgcttcatgttggaaagtcttatgggtggagtcattttcatttgtagatatggctctgaatatccattatcaacctgtgtgtgcacccataagtctcttcccagacctctccttgccaccattcctactgtataatgggttatatagaactcagccaccatgtttattcactcagtacatattcactgagtagttgttayggatcacttctttgtaggcactgggatgtaagattgagcaaaaccaggcattgttcttgttgacatagaacttagagcccagtagggaaaacaggcattaattgtgagcaaaagtaaatacaaaacaactactgtgacaattgtaacccccgaacaatcaggccagggsttagagactgcattgcaggcyggtcactgcacatgtgagagccctgaggccagaaagagttgatgaggttgataaattaaaggaggtctggtgatcrgagggtgaagtttgggaaaaattgtagctggagagagagttgatgtgggactaagtcaggtcttttttttttttagacggagtctcactctgtcgtcaggctggagttcagtgaygtgatctcggctcactgcaacctccgcctcacatgttaaagcgattctcctgcytcagcctccygagtagctgggactacaaatgcatgccaccacgcccagctaattttttgtattttgagtagagacggggtttcactatgttggccaggatggtctcgatctcttgacctcatgatccgcccacctcggcctaccaaagtgctgggattacaggcatgagccaccttacctggctgtcaagtcttaaaatatgataatgttaaggattatctgtttttatcctaaatgatggaaatctttcaaacaaagtctgggcaatccttagcaaaaagagcaaagctggaagcatcacattacccaacttcagcctatacaacaaggctacagtaatcaaaacagcatgacactggtacaaaaacagacacatagaccaatggaacagaatagagaaccctaaaataaacccatacacctacaaccatctgacctttgacaaaatcaacaaaagtaaacaatggggaaagaactgcctattcaataaatggtgctrggataaccagctagccaaatgcagaagaataaaactaggcccttacctctcaccattcaaaaattaactcaagatggactaaagatttaaatgtaaaacttcaaactatgaaaatcctagaagaaaacctaggaattatccttcttgacattggctttggcgaaraatttatggctaagtctccaaaagcaattgcaacaaaaccaaaaattgacaagtggtatccaattaagctaaagagcttccatgcrgcaagagaaattgccaacagagtaaatggatagcctacagaatgggagaaaatattcacatattcacaaactatgcatctgacaaaggtctaatatccagaatctgcaaggaacttaaatcaacaagcacaaatcaaataatccaattaaaaaatgggcaaaggacatgaacagatacttctcaaaagaagatgtacaagatgatggcatgaataggagaaagggaatctttcctttccttttctttttttgagacagagtcttgctctgtcgcccaggctggagtttagtggtgtagtcatagcttgcggcagactcaacttcctggccttaagcaatcctcctgtcttggcctcccaaatatctaggaccacaggcacatgctaccacacactgctatttttaatttttttgtagagatgggatattgttatgttttccaggatggtcttgaactcctggcctcaagtgatcctcctgccttgacctcccaaagtgctaagattacaggtgtgagccactgcatccagctgaaagggaatcttttcaatggtgggtggcaaccagttgtttactcggagatgcctggtaggacaggagagaaagcaagagggcagggctcgagatrtggatttgagaactggagagagttggcataaataagaatcttccaagtggataaactcctataargaaatcgtgtagccagcagaggccaggatgttgtgttgggtgactgtggacaaaaagagtcaaacttcgtaaagtgtttgaagagatttatcctgagtcaaatatgagtggccaatggtgcgtgacaaagccctcaggagatcctgaggacagtgcccaaggtgatcaggattacaacttagttttayacattttagggagacatgagacatcaatcaaatacatgtaagatgtacatccaggtcataggtagattcaaagattttctaattggcaattggtttaaagagttaaataaacgcctaaggacctggaaacaatagtggggaatgtctgggttaagataaggggttgtggcgaccagggttccgattatgcagaggaagtctccaggttgcaggcacagagagaatagatcataaatgttcttatcagagttgatcctctcctggatcaggaaaaagtaaggaaaaggaagaggattctcttcagaaggtaatttaccccatgagtcagctttgcaggcctatttcaagatayggcaaataaaacatattgggggttaaatattttgatttccttctttacctgtcatgtgatgctatgccagagtcaggttggaaagcagcccscaytatatagtgttcaatgaaacccctctgatgagggtttgtagggtggactccccagtcccttagataagaatttgggcaagagaagaaaaagatcagccattggtccttagtgacaaccawagctagtggccacagggaggttctygggygggaggagacattgatctttcccagtgctctgccccccatctggctgtttgctctataaagcaaaagggagagcaaagaggaaagggaggttttaagtgaggcaggtgactgtgggattcagggtcttctttacagttttctcctattctgtacaggggaaggttactgctgataagacacagctgagagagggacgagctcccgggacctaaagtgaccagaaatacagctcctgagtcttgaggcacagctgcggcgtggtttacttagggtttgttctagcaaggacattaacygtcctccagtgtttattctgaagaaatgtttggttggccttcctcatctcactgcctgaccttgcagtatagaaaaatactgatcatcttggctcttaaacaggtggaactaaatgcctagctcaacacaggtaacacagtcagggaaagttggtgtttagggttggatgcctcctgtttcatctgaaartcaaatcaaggycaagaagtttccatttggtgtagctccctcctccctccttttcatctcccagctgcagaatagggttatttggcctgcacagattgtatgattccgtagtgacacgtgtggcctccggggtacataaagactggccttggagtgaaataatctcagcacttcgcacaaggcactggaaggaactggggtttcagagggatgcttgttctgttggcattgtgtggcccggacttctcacagggtgaggctggggctcacccaccccatcatccccacactcaccctgctgggctctgtccacttgactgccattgacccgaggtgggagtgcaggaggagtgtggttattacatcacggaccctcggggcgcagactcggctgttttctcttcttcttaacaagcaattcagagttcatggaaagggcattgcggcttccctgggggaactgttttcaaattccatttctcacgcttaaaacaaaaatcaaagttcaaagagatcttggatcagagagatttgccttgaggtcagggagaatacctaatctgagttgtgttttagagtcatactttctttctgttttttttaatgatgtccagggacaaaacaaagagtagtaatcatgtttatccaaatgctggcttagccttagwgaactctcaccttcttcagttctgcctctcccgggacctaaagccagtgggcccctcctccaccctggcatcctcgcctcctggtcctgcttatggaggggactgttcctggtggcggcttactccttccctttcacgtgttgttcttgcaggggcagtttagcccccacaatgtgcctgggtacacaggtgaagtgctaatgtgctactgtgtgtccaacggtgtgattcctccccagaaacctttagggctataatgagattcttttagaacctgccttgccatttttttagacagagtcttgctctgttgcccaggctctagtgcggtggcgtgatctcggctcactgcaacctctgcctcctgggttcaagtgattctctgcctcagcctctcragtagctgggcttacagggatccacaaccacgcctggctaatttttgtattttcagtagagatggggtttcaccatgttagccaggctggtcttgaactcttgacttcaggtgatccgccctcttcggcctcccaaagtgctgggattacaggtgtgaaccactgcacctggcctaccttgccatttgactttacaaggcagaaggaaagggaggagctgcagtttttggggctacccagtgtatatgttggcagrccacctggttcacccacagggatcccacaacaccagaaggtagtaggacatgttgcagtgtcaytgatggggtgggcacaaactaggagaagccayggtatgtggtctgccagggtgtcttcttgctataaactctgaatgacatcagaagggaaaagagtacgaaattcagagtgaaaggcctgagtttgggtcccagccccactgctgtgaatgcaaatcytgggatgttgccagctggcagagttggttttttatggaggctctgagggaaggtcttccatgcctcttccttagcttctgatgttgctccaatccttgccattccttggcttgtagatgcatcactccagtctctgcatccgtcctcacatgatgttcttctctgcaggcctctgtgtctcaaatctcactctgcatttctcttatagggacacctgtgagtggatttagggcccattctaaacccaggttgatttcatcttgagatccttacctaattacatctgcaaagaccctattttcaaaggttccattctgaggatccggtggacatgtgttttgaggaatrctattcaacccaatacagctgtagagttagrgggtaragtggaaaggagggcatggcagtggcttccaccggaagcacctgatctgccagggagagctggtgttcggattcaaaagacacagtctgagtcactggatggacamcctgggggttaccactggtaaatacagaaaggttacagcacacagttgatttayggagatccattcatttaacaacttgaaaaattggctaccttccaggttctgggtctggtaatgaagtcatagaaggcccccaraatgcaasagtcctgaagggctcccaggctcgcttcaactgcaccgtctcccagggctggaagstcatcatgtgggctctcagtgacatggtggtgctaagcgtcaggcccatggagcccatcatcaccaatgaccgcttcacctctcagaggtacgaccagggcgggaacttcacctcggagatgatcatccacaatgtggagcccagtgattcggggaacatcagatgcagcctccagaacagtcgcctgcatggatctgcttaccttaccgtccaaggtgtgtatgcaggtggcttctgaagtccatcaggttaaatgtcagagggcaggaaggaccttctaaagttcatgccgcgtatgatggcagacgtggtctaccttcagttggtgttgacctacaattattctgaactgatgaatgttttgcgatttatttgtcgcctccttcctccctcatgctctccctacctcctcacttcttcttcccttctccccctctcttccttcctgtgtgctctagccttcagttggcaataggcttagaattattctggatggactaatgtttattgtttcgttgatttatcccccttcttcctcacttcctcccatctttccctttttcctgcttcattctctttctccttccatctttgctttccttttttctggttaagactgatagagacagattttatcacttcccctttgaatccattttagtatttaacagcctttctggaaacgtatcctggaattcttctagggccagttgcagtcatttttctttgatttagagacagttgtcaatcactgccctttctctagtttttccatatacatgactatatttctctgcttgcatcatttatcaactctgaagcatgctttaactctttcctctttccagcagaatccccccaacttatttctctaccctgcctccaactacagtgggatagtcattatagtcaaagttgtgtgttcaccaaatatatcaagtcattgagagaaaagaaaagaataaacaaaatttataataatagcttatttttcattttagaggtaatttggaggtgctgaagataatgttacacagtaaaaaagtaaaaggatgctttacaaagatttggaatagtcttaccaaaatttaatcactttgcattctttaaaagtgtatttatactctatttaaagatatagagtgcctgatttccatggcagcatttcttataagagaatatattatatcttataaattatttcttatctctatatatttacttgtctggaagaaattcccaaagattttgttcatatttatgttgctattaaatcagatttgatagcctttggtggagacatgtctacctatttctatttgtgttttaaaaaatgttttttattttagaaatttagctaaattggtgtgtcttacttttgtgtgtttttaattttgtgtagtttaattaggggcacaattctattttctaaataagtgattttataaggctatttaggactgttggcctatgttgcataaccagattcttattatgataatttgtgatataagagaaagaacagaggaaaaaagaatcaaagatataaattctggttttggcttcatcagttatctatcagagagacccctgagatggctcaatttcttcatctttaacctggagatgaatcttcccggcccacctcatgggtttgttgtgtggatcaggtgaaaaaatggctaaagatggtttgatgactccaaagtcctgtctgattcaattccctgcacattaagttgggagccagagtggtctagtggtcaggagtgcagacttggggcttggctgcctgggtccatgttactgctttatgacaatgtgtgacctgggacacaattacttaatgactttgagtcctagtgtcctcatcatagggctgccgtggtgtcaaatgagtaggtctatgtaaagcctttaccacacctggctcatagcaatcactgtatggccatttgctattatttattgtgctcccaataaaagcatgccattgtgttggttatttargagtgactcaaagaggaatagaataagacacagtttctttctttagaacctcacaagaagagtggataatgcaagttgcacaaataatagggatgccagccacccagatgctggcaagtgagatggaagggaggcaagctcaggttccagtcgggaggggagctgacagagtcaataaagccttcatggatgatttcatggagaaggtgccattggagatgtgccttccaggtctgtagatggtagacagaatgggaaagcaagagaggaggagggcatccctggagcagggaaacacaggatcacaggcatggcttattactgctgtacttatgacacatcacattcagaaaccatgtggttttgtagcatcttttcccaaagtcacaagtctacaaatttgtctgaatcccgctgactttttatatattggtaattatggtagtttttggttttaatacagatgaaagagcaagcrtctagagaaggcaaagacttctccaagatattgcgagaggaacccatagagcttggcctgaacttcatccctttatcctcatctcattgctctgaatggcacttagttcctagaggascaaatgttctctgagcaacagggtcyccctcaagggagaaagaatyttgaaaaaagaggaaayaaccatgaattattctatgattttttcacctccttatatgtcaacaaaatagagatgacataactccaaattgagtcatctgaaatccatgtgaatattctagtatcacttttgtataaagggtttgtcatgctactggctaacctttgtgaaagccagtgggggaaagtggaatcccaaktgtatacagaaaaaggaaatccttcagatcgctgagttggyccacttgctgccttatccaccaatcaatcacacaccaaactctagacctcttatgttttgagggctgcaaggacttgagttcaagarcttctgttattaactgagacaatatcattcctcccagttctgtcatcttaaaccgtctctctgtcaaacaaaacaaacacaaaaccctttagactcaagggacaaaccctttctccactccttgttgcatttacagtagcccttgaattagcaaaagtgcctttcttattccaagggaatattcaggaaggaataattgggaagctaacatttcagagcaaaaagatctttcagagccgacccagttcactgtagtctagggactccttgatgtaccctgagatcctttcagggtggtctatgaagtcatgattgttttcataataatatgaagattcctattattgttgcctttttcacccttcttctcacaagtgcacaggagagctttccactatacattgggaaggtctgcatgcctcagaattttccagatgactgaagtgtaacaaaatcatgcaaggataaaaggtccattcaaagtgccagatagtgcaatgggtttcaacataacagaaaatgaaagttccttgatagagtttcagattccactgtgtaacaaacatttaagaaacctcagccgggaatggtggctcatgcctgtaatcccagcattttgggaggcccaggcgggcagctcacttgagcccaggagtttgagaccagcctgggcagcatggtgaaattccatctcttaaaaaaagtgctgggcgcggtggcttatgcctgtaatcccagctactcgggaggctgaggcaggagaatagcttgaacttgggaggcggaggttgccgtgagccaacatggcaccattgcactccagcctgggcaacaagagtgaaagtctgtctcaaaaaaaaaaaaaaaaaaaaaaaagagaaaagtaagttttggtacagtattcaagaatatccacaattatctgaaaaagctattaaatactcctcactgttccaactacatatctgtatgaagtcaggttttctttacatccttcaaacaaagcagtatattgcaacagactgaatgaagagacagctatgagaatccagccagacattacagagatttatataagtataaaacaatgtcactcatcttattaatttttttagtttaaaaatgtgattcgtttccatgaaaatatgttaatcaaaattaacatgtaataaattattattttaaaatatatgtttaaaataattgtttaactttaatttcaaatatgataaatattggtagataaaacccacacaaatgaaaggtctttggagtcctcaatgcttttgaagagtgtaaaaggtactgaraccaaagtgtttgagaagtgctgatctggtcaaactatctcattcagtaagtacaacaaagagagccaaaaaaattcagtgacttgcccaaagtgatgacaattttctggcagaaccaagattgggaacaaattttttcattcttagttcagtattctttccattatgttgtgtagtccagagtttcagcatgtttttcttggacatatatgtatacacatttcactaaggctgtgtctttactggggccaatcctcaggttgttttagtcacacttgtgaaaacaagtactattttcatatgggttgtttgcagtatgaatgctgacctatgcragagtgttcttaataaaaaaawaacttatctaagttattctggcacatgatttgggttagttatttctgtaaatattagattggaattcgatttaatttgtaatgagaaacctatgttaaggcaataccctaggaagttatgtttaagaccatatgaccctagaaataaataaaaatgtatctgattgaccaaaactccaggggagacttgcgtctgaccctgggctgtgtcctcgtcacagtgagaagaaggtgaagctcgtttctctttttccctttgctccctcgacagcccaagataattctgtagctcacttcagggattgtataacccccctatggcatgcacttttctttcccacataattatttccccctggtttctgacttttatgaagcattttctrtgtaactttgctttcttgtgagcaacctcaccttcttcagagacyctggcaggtgtacaaaaaagacccagataaaatctgagttaagatttcctagtagagacacagcctctttgggcttgggaaaataggtctcacaaaatgtartttgaagcaaaacttaaaaaaaaaaagaaaaaraaaaagaaaacttagaagcgagaggcayggtcatgtcttcaatgtgtttctctcttttcttctttagttatgggagagctgttcattcccagtgttaatcttgtagtcgctgagaawgaaccttgtgaagttacttgtctaccctcacactggaccyggctcccrgatatttcctgggagctyggtctcctggtcagccattcaagctattattttgttccggagcccagcgaccttcaaagtgcagtgagcatcctggctctgaccccacagagcaatgggactttgacttgcgtggctacctggaagagcctgaaggcccgcaagtctgcaactgtaaatctcactgtgattcggtgtccccaaggtaagtgaagacattctgctttatatgaaatgaatgattatttcatgcttcaatattacgtagaatgctccttcatccacgatgcctggaaaaatcatatggcgaccttgattttgggtggggatgataaggccaatcacatctgctgtcagcttaataatcttataccctcgtctgctttttaaattccatcttaaagttttttttctcctattacatttgaaaaccatttagaatcttgccaattatttatcatcaaagagcatcaagtttggagacaaatgcttgaattaaacatttgtgtttctagcttttacctaccactgtttcagtttgatcccaccccctgagccagtatgaagcaggtcttcatactggaggagggtgttcaggtctccctggatttcttccaatcttagtggaattataatgcttcattttcttccccaccaaatctacaatgtgtttgaaagtgtcaagtctatatgtatatagtttaacttgactaaatgacagaactttaaagtttagatccccctaaagaatctcctgtggggtttttggtgtaccagacactctaaccacattccttgaaggggcccatagcgcctgtgagctttgagtcagcctggacagggtgggcccgggatgctggagattgactttaacttaacattttacaaaaaaggaagtgaggcccggagaaagtctgtgctttcatccgggtcacacagccaaagtggcagagctgggcctagaagctgagaagagcttttcttttcgtgtctaaagcttttccsaccatgaaaacacctttacctgagatcttccaaagttcagaacaaagccatagccaaagccaawtaatgatggtaacgataataaacagcaccctatagctcttaccaagttatcaggcactattctgagcacttctcaggtattcacagaattaaccggccctacagccgtatgagtgttgctgttattcctattgtaaaggcaaggtgaccgggacagtgctgttgggattgtgcacacgtctgtagagtgagtaaatgacagggcaacctgtactcacctgtagagtgagtaaatgacaggcagtctgtctccagaaactgctcacctggcaactctgcccaccgtgtgagcagccacttggagggtataagaggtcccatggctgccgtaacggaggaccacaggcttggtggcttaaacaacagaaatggattttctcacagtcctggaggttggaagtgtcatcagggctggttcctcctgagggctgggagggagcctctgttccttacctctccccttgttccttgtggttgctggccatcttccttagcttgtagaaacatcaccctcctctctgccttcatctttacttggtgttgtcccattttttatggtcttttctgagataaacacttttgaacggtacaggttatttttgcaagatgcctctcaatttgggtcartttggatcaatttggatcaatttggatttgtctaaaatttttcatcatactttgacttaggttacatatttttggcaagatataggtaatgtaatgtggtcacaggatgacaatttccattggcgtaagtttgaccgtttggtgaaggtggcataccctgaatttatccaacataaaagtaccttttttgactttataattaatatgtagccaatagatattgtgggaatatcctgtttacccacaacctttcacctaatacaattttttaaaaaaacttttattttaggttcagggttacacatactggtttgttgtataggcaaactcatgtcacaggggattgttgtacaaattattttatgacctatgtactaagcctagtacccattagttatttttcctgcttctctccctcctcccaccctccaccctcagatagaccccagtgtgtgttgttcccctctatgtatccttgtgttctcatcattcarctcccacttataagtgagaacatgcggtatttggttttctgttcctacrttagtttgctaaggataatgacctccagctccatccacgtccttgcaaaggagatgattttgttctttttttacctactaacttttacattcattgataaatcattgcctgaatcaattacttctatggtgattgtaaagagtgatttcctgcttccattattctttccatatctcttaattggctttcttttgttaaacaaaagacttccctcccctttcttccttttctttttttttccttttttcctcacagttttagtagggactcaattttgtccaatacattctaatctattcctgtcatttttcgttttgacacccagattgctccagacttggtcagttggtgtccctccaagctggtgctggtgtccttccgacatccccctattagtttttgagcacctggaccagtaaggtgttccagtctcactttgcacttccctgtctccacctggaatcagtcatttctccagrgaaccaaccttaaatatcataagttagtctacttaaatatgataaagtatggtccaaactttgaaagagaagattttaaaaaaatccattagcaccaaatggaataaaatggactggttaaagcatatatcttaacgaggtaacgatgcagcaggagctctggcctgattgatggtaccttagagagatagattttagagactggcttgcttgcaaatgttttcttttgtagtggaagggaaagagagcacttaatttcccttggtcaggttaaattcactgaattcttcttagtccagaactagtgccttaacgatggtagctggaggcatggctgctggagagggaggctcagtgggtgcttgcaatgagtctagctttattggattcatttggaamagggtaatttgtttctaaattatycatcaagatccagtgcagctggtggctggctgcatgttgtgtgttttaggtaagttttattagctgaagacctcattgcagccttggttggcggagctggtgaccagacgaggctgtaaggagaacagccaggtttccagagagccaagtgttaatggggctgtgcccattcaggcttcttcaggaatcatataaacatccatttttccacccatttcctaaaagtgcaaagcatttgttttcatttctgaaatgatccctgcaagtcgttgaaacaggaatgacgtcagctttggaagcttatccagtcagggcaagtcacagggttgtatgaagtacttcctggtttatagttcaaaaggtttctttagagaaaaacatactgggagggctgacattcatttcagatctgttttttagaaattgattttcttaactacagaaatgatacaaayctcgagcattgcagacgtatccaaaactggagagtgaggccgtctcaccctgtcttgggagaagcactgtcagagccatctgcccctcggggtggttttctttgtgcacttatttgtgtgtaggttgtgaaatggttaaaatgaagtaatgtttttaggacacatgagcaccttgtggaatgtagtgattcctggttataaccttactgttttgagaaatggcaattttgggtgcagagaagagtagtagaagtgacagtcctaggcctttgccctggcactgatggtgcaactttgggcaagtcagcaamcttcagggctcagttttctcacctgtaaagtgggtaggagaagaatagagaagtcctctctcccggctgtggatcagagacagcwgaggagccttctttataaatatgctgaggctcagcctcctcctgggggttttgtttcattggtttttgtggagcctgggaattgcaattgtaaaaaaagttcccaagttaytctaatgggcagccaggattgggggctactgaactgaaaaaaaaaatctctaaggcctagccttcccctccagcccgatcaagtgctatgtctacacagacttggacattagacagcctgggttccaatcccagctcacacaatcactagccgtgtgtcttctgggcaaattacttaccctctctgagcctcagttttagaacggtccttgctccagagcacataggactggaaagggagtgattgtcattcacactattgattcggagatctcttgtgtcgcctctagtgggcacagggatatgctttgcacatgatagtggtgacatttggtattaatatgtacttggcacgtgttggtggtgacattttrtattaatccatttggtttyaagaaattctatacctttttaaaactctatgcattcctttgagagcatctgggaaatgctattttccttttcttcacagatgggaaaaggacaatctccaagtggaggttaaagcacatggtaaagtcagtaatgaggccctaacaagcacacagtggtgtgaaggagtgcagggagaaaggcaagcagtgttgaccttggagctaatcttccttagtcactatgtgtgggttactcaggtatagtatactcatcctctccagcaaacctgccattcacctgagccagacacacccacaccctccatagggtacaaggcacagaccagcaccccactgtagactttatgcaaatacatttatgtcatacctgggccatattttcctcagaaggattattctacattggagacaacacatggcaggatggaaagatatgagccagtggccctgtggcttcctgttctgggctccctgtgccatttacttagtcactctgtcctgagcgtcttgtctgcatgatgaaaagattggattatggatgacatcattccaagagtctgtgttttctgtccactgtcagatttttggtttgtcaataatatatggctatgatctatttttcagtatacagtaaatgcactctttttaaaaaaattagcyccatactaaacaaaaatatacatgcatgtgtgtatacctatgtgtatagatatatataaaatatatattatatatgataaattttaaatggttatgaaaataagaaaggtctatctttgtagccccagcactaaatcatgcctcttgctgactygtacactacactttgagctccagtggattaaagggagacttcagcttaagtctcacccaggcataaaacttggaacatttgccttccaatggagcatggtcacaacaaataggaagtgaaagaataagtgatgtggttcctaataccagttccattttkgtcagagtttgggtcttttaactgaatgcaggcatcactttctgaactttgtggttaaattaagggacaaaagagtgtttaaagtccctctggccctcagtctctcccttgactcagtcaccattcccagcaaagtgtcccttcccttctgttaaacatgcattcyctraaaataaggcaggccctctctgtcctagattaaggcaggctctctctgggctagattagaggaaatgttatgtccagattcaggaagtttggcacactcgtatttctgtctagtaggggaaggaaagtactgatagagagtgtgtgagtaagttaacaagcatcctgtcttatgccagtgagaatttcaagcctgtctcttaaatcttgagccagacctcattggttaaccccagccagctcccttattaagaaaacttgttatatatgcaaacttcagttmgtaagagtccgttaaactggaaataggatgaccactgccatcttgagcctgtgcactgtagcttacagcattctcagaactttcacacacacccctgaacagcctggtgggacaggagttgttattggtaagtgagccagaagccaaagttaatgcagcaagaaatgctggtcatgagatttcactggttccatccacaggaaacctaaagttctcgctcagtcacaaagctcccacacagtggtccaaccttcaactcaagactgtgaagatcatggatccaactctggacttcaccattttattatcacatctgtgggagggggagtgtgagagcatcctgtcatgtcgtgggtagcttgggcagtgtttacattgtggctgcgtacaagggattcccaaaatgtgggtcaccaactatctgcatcagaatcacttggggtatcattcgggatatcctgactctgtgatcctggaggygggctttgaatctgcatgtgcaatgatattccaggtgacgcttgggattctgctgtctgtggagcaaggggataaatgtgctctctgcatgtgaagggtctgccttgtgttagtgcttcagctccggggctgggaaggtgtggaatgggaagggtgtaatctgttccttccatcttcaccatttttgggagagccytttacaagtctctatctattccagctcatctcggatggtgggagatgtggagatagacagcattaggaaagtagtttgacttccttataatcctacagttctgctctgggcatcttactatggggagaaaggtgatccctagacctggttcagctgcagctgactgcctggtgcatagacttctattctccatgcagagtcatttaacattgacacaggaatagcaaactactattgcaaggtcaattttccaggaaaattctaaggaagaacatctaagagctgtttttgaactccagtctgtggttccaaagtggtggatgsccattgatttcaaagcaaaccccatgttccttcataggaagtctactgtttcagtattttctaaagactagtatctaacaaaatagcatgcatttacattaagataccacccaagcacrcagggttgagtgacagccttttgttgaataacaattcacaattaaacagatcaacttaaatgtgtgtggtttgacttcagcgtggtgcgctagggagaagtgaagggctggatgaaaactctcttgggaacatcaatgtagttcccatactgtccctttctgtgacgataaaaacgttctacatctgtggtgactgagcacttgaaatgtggctagtgcaactgaggcactgaatatttaatgactcatacttttaattaacttaaatttgaatttggatgatcatgtgaagccacaacagctctgcttaagacatggtggaaaagaatcaaaatggctttttcctctctccttctctccctacctccctcttgcttcctgattgctctgcctcaccttacccttttttcctcccacctccatgactactaggtaaaataagagggcaacatacacactaaggaaggtgtctcctgaaaagctatggaaaaagcaattgctgtgtgaggaattaatttgaggatcggggagctggatgcggctagggtgcaagccatgcacctaagttcctttagaagtgactgtccctcagaatattctggtttcctctgggcgctggactctcaatgagtggggacatggaagggagaacaaaatgtctttattccagtcttgtccagcagtagtgctcaaaaagtatttcttgattaaataaaggatgtcaaacgtgaccatcactatgccaacctcaggggactgtcagcccagccctgccttatctacttctcagggatattagagacattaaacaagcaacacctgaactgggttactaagaagttgtttactggcagaaataagtattgtgatggaaggtactgtagagtaytgaataattaaacacattgaaagaaacttggcctatgacgcctagccatagcaggctgaatagttataatattactagaaaacataatgcaacttataatggggcagaatctgtgattctaggcagtgcaagtatcactaaaatatattwttttcttctttagacactggaggtggtattaatattccaggtgtattatcaagtttaccgagtttaggtttttcattgcctacttggggcaaagttggacttggactagcaggcaccatgcttctgacgccgacgtgtactcttacaatacgctgctgctgctgccgccgtcgttgttgtggctgcaactgctgctgccgttgttgtttctgctgtagaagaaaaagaggtaatttttttgttcatttacatttgtacatacttctgaacttttggtacaagcagttgaagttaatgaactcatcagctctttcaaaagatagattaactacaatatcactttacctctattagaaactgtggttgcacactgttggtgggatgtaaattgttacagcctttatggaaacagtatggaggttcccccaaaaattaaaatagagctrtcctataatccagcaatcccattcctgggtctatatccaaaagaaatgacatcttcatattgaagagatatctgcatttccacgttcattacatcactcttcacaatagcaaagatatggaatcaacctatgtacatcaatagatgaatggataaagaaaatgtggtatatagacacaatggaacactagacagccttcaaaaagaagaaaatcttgtcctttgctacaccctggagagacctaaaggatattatgctaagtgaaataagccagacacagaaaggcaaatattgtatgatctctattataggtggaatctaaaaaagccaagctcatggaaacaggaggtagaatggtgggtgttaccagggagtgggaatgggggttggggagatgttggtcgaagggtacaaagtttcaattagacaggaaagataaattctgtagatctactgtacagcatgatgactgtaattaattatcatgtattgtgtacttgaaaattgctaagagaacaggtcttagatattctcaccacaaaatagcgatgaatatgtgagatgatggttatatgaattagcttgatttaatcatttcacaatatgtacatagctcaaaatatcacagcgtacactgtaaatacacataatttttatttgtctgtgtgttttamtaaagctcagacaataacaataaaataaaaaccacaatgaaagacacattggctttaagagtccttgaaagaaacggtggcaaattcttggagaagaaaaggactttcttaaggaaggaagctgtttctttggggcctgatgcaaccccttaggaagaccaagatcttcatgctcttgaaaargtgattgaagcagtgcctttctcaccaaagacactgattattggatttttgtgcttatttgtaaggatatatagctattataatgtcatttagatgctatggttttttagaatcatatctacatatctgaacatattaaatggttgtttcctattctgaagaattttaaatctccctttgtaggtgaatgttaatagagtggtagaaagaaaaaataagatcttctgttaataaaaaatagtatcaatacaattaataaaaataattacgtgtttctttagaatgaaattctctgagatactcccacatcgtatgaaagcagtagccttgcttgsggttgggatcartggtgaggtgggcacataaacactaggtgggcttgtcgtagcattaggcagtttgtggcttcagaagcctacggatgctttatcatgagaatgctccaggactttccatgtgctgaatgtgtgtttgtccttacctttcttccttttgttaaaaacttcatgtactcctgtttgaacattttgtacagttaaattatttttctaaagatcggagttttgatgttagcttgcatgtcagttgaactacattttaagttttattaacactaactgccactcaatgaacacttagtgtgtgtgtgccaggcactgtgctaactcttttacatggagtatctcactaaaatgcatggactagccttaactaaactaaaggtctagtcttagttcctygatgaatttggtttgtgattgggcaattcactctgtagtataacttaaaaaaatttcagacacgtgaatattttcttatattctcttccttcttacatgaagggcagtacactatagatattcttttgcattttactttttttcccttacartatatcctggaaatcaatccatgtcagttcattgagatttccttcctttcttattacagctatatggttatccattgtgtagatgtaccatggtttattcaaccattctccaatatataagcatttaggtcatttctggtattttgcaattacaagcaatgttgcaatgaataatgttgtgtatgttcatatttatggaggtgtagcttttgggtaaattctcagaagtaggattgctaggtcaaaagctacgtgtgtatgtagttttgtcacggattgccaaatttccctccagcaaggttgtacaatttgcatgcttaccagcaacacatgagagttcccgtttccccacagcctggccaacagggtgtcatcatactgtttagtttatgccaacctggaaagtaagtaaataagaaatggtatctcagcatagttttgattctatcttattataagtgaggttgaactactgttccatctttttgtatgattgagaacaatttttatawgtttttataacttgtcattctatatcttttgctcattattttctctctcagatttttgggctttttactccttctaattttaagaattcttttgatgttaggacygatggccccctttatctgcgttttgagtcataggaagtatttccttatatggaagtttttttctggtgcttatatcttatatggtttcatttatttgtctttctaggttttattcattcttctgtgtgatatgttgtatgcatctaatttttatcttcttccaaataactaagcagttgtcccrgcagcattgactgaaatctctgtctttggcctggtggtttgagatgccacctttatcawacactgatttccatatgcacttaggtctctttctgggctctctattctgttccattggtccgtttgcctattcatgcacttacactgtactgttttaattatagaagttttatagtatgttttaatgtctccttgggtgagtctgcctygtagctttccgttttagtgttcttctggctagttttgcatgtttattgttaaaacttgtttattttaaaaaattgtggcaaaatctacataaaattttccattttaaccatttttgagtgtacagttcagtagcattaaatacatttacacttttatgcaaccatcactaccatccatctacagatctaggttcatcttgcaaaataaacactgtacctatcaaacaataactccctattcccgcttccccccagtccctggcaaccacgattctactttctatcaatttgactactctaagtatcttatataagtggaatcatgcagtatttgtctttttaaaaatggcatacagagtgatattttgatatgtgtgtacaatgtataatgatcaaatcagggtaattagcwtatccatcatctcaaacatttatcatttctttgtgtggtgaacatttaaaaatcttctcttccagacttttgaaaacacagcaccttatagttaaccatattcactttacagtgctgcagaacactgaaacttttcctcttatctagcygtaactttgtgttcattaaccaagctgtccctagcttcccccgactacctccccttcccagcctctgatccccacaattataatctctgcttcaatgtgctcaattttttttttagctcctagcatatgagtgagaacatgtggtatttatctttctgtgcctgacttatttcacttaacacaatgccctccaggctcatccatgtgctgtggatttcattctgttttacggtggaatagtattccattgcgtacacgtgccacattttctttatccactcatctattaatagatatttagattgatttcatatcttagctattgtgaatagtgctgcaataaatgtgggggtgcagatatctctttgacatactgatttcaattctttgagatacccagattgcctgattgtatgatagctctatttttagtttttttgaaaaaccttcatactgttttccataatgactgtactaatttacattcccaccaatagagtatgagagtttccatttctgttcattctcaccagcatttttattttttgtctttttgataatagccattctaastagggtgagatgatatctcattgtggttttgatttgcatttccctgagaattagtgatgttgaatgttttttcatacatttgttgaccatttacatgtctaagaagacatctaaattgagaaatgtctgttcagaccattaactcattttaacattgsattgtttttttgctgtcgagatgtttgagttccttatatagtctggatattaatcccctgttggatgaatagtttgcaaatatttcctcccattctgtaggttataattttgctgttgattgtttcttttgctgtgcagaagcttttcagtttaatatagtcccatttgtctatttttatttttgttgcctgtgattttgaagacttagccataaaatctttgtctaggccaatgtcctgaaggatttatcctatgttttcttctagtagttttatggtttggtgtcttatatttaattctttaagtttgagtttattttgtgtccactttgagtttattttgtatatggtaagagataggggcctaatttcattcttttgtatatggatatccagttttctcagcaccgtgtattgaagaggcagcctttccccagtgtatgttcttggcacctttgccaaaaatcagttagctgtaaatacgtggatttatttctgggttctcagtattgttccatctgtgatatacctttattctctgggaagcagaaattgaaaggcagtraactcctgttggacctaaattagaagggaaattgtttttacctgggaattattccatatgccccagatgggttactcaaatggaagacactggattttaaaggaaaaccactaaatgacttagattttaatagagatgtgactacagattgttcagtaccttcagaacattatttctaacatgagctatgtggagtagttggagaaattctggttatttgtacatcctggttcccttcagcttttgtctgttctatactcatctcataagaagattaaccgatggttgttggcccacacaggatatgcagaaggtgatttttagtttcttcatctacagaatgggaataaatactatcctatagattggtagtaataattaaataagtatattaaaagtttctgtgatccatcctagatttaatcttttctttaactttgagatgaaaagcctttrtaagagtgaactgtcaccccacccctgcccaccccattcacagtaagtccagataaggctacaracaggtctgccacagcctacttacaatgcccaccttgccccaccaggtgtgattcatagtggaaattatgctatacctttacataagtgtgaaagatgagtaaaggtctggatttctctatgatgattatttcaatgcttaaaaaacattaaacatcaaaaattttcagaaagtattttctggttctctgctgctatccagagatttctcagtaagccgacggattaactgaccacataggaatggctgagcttctgctcagcctggcctgggggctttgggatggcagcattctagagggtccccaggctcctttctttttttttttttcctttaacttataagattatttatttagctatcagaaatacaasattgttcccttttcttttttttaaattatactttaagttttagggtacatgtgcacaatgkgcaggtttgttacatatatatatacatgtgccatgttggtgtgctgcacccattaactcgtcatttaatgttaggtatatctcctaatgctatctctcccccctcccccmaccccacaaaaccctagaagaaaacctaggcaataccattcaggacataggcatgggcaaggactttatgtctaaaacaccaaaaacaatggcagcaccatttattaaatagggaatcctttccccattgcttgtttttgtcaggtttgtcaaagatcagatagttgtagatatgcggtgttatttctgagggctctgttctgttccattgacctatatctctgttttggtaccagtaccatgctgttttggttactgtagccttgtagtatagtttgaagtcaggtagtgtgatgcctccacctttgttcttttggcttaggattgatttggcgatgtgggctcttttttggttccatatgaactttaaagtagttttttccaattcagtgaagaaagtcattggtagcttgatggggatggcattgaatctgtaaattaccttgggcagtatggccattttcatgatattgattcttcctacccatgagcatggaatgttcttccatttgtttgtatcctcttttatttcsttgagcagtggtttgtagttctccttgaagaggtccttcacatcccttgtaagctggattcctaggtattttattctctttgaagcaattgtgaatgggagttcactcatgatttggctctctgtttgtctgttgttggtgtataagaatgcttggaaaactggctagccatatatagaaagctgaaactggatcccttccttacaccttacacaaaaatcaattcaagatggattaaagacttaaacgttagacctaaaaccataaaaaccctagaagaaaacctaggcattaccattcagaacataggcatgggcaaggacttcatgtctaaaacaccaaaagcaatggcaacaaaagccaaaattgacaaatgggatctaattaaactaaagagcttctgcacagcaaaagaaactaccatcagagtgaacaggcaacctacaaaatgggagaaaatttttgcaacctgctcatctgacaaagggctaatatccagaatctacaatgaactcaaacaaatttacaagaaaaaaacaaacaaccctatcaaaaagtgggcaaaggacatgaacagacacttctcaaaagaagacatttatgcagccaaaaaacacatgaaaaaatgctcaccatcactggccatcagagaaatgcaaatcaaaaccacaatgagataccatctcacaccagttagaatggcaatcattaaaaagtcaggaaacaacaggtgctggagaggatgtggagaaataggaacacttttacactgttggtgggactgtaaactagttcaaccattgtggaagtcrgtgtggcgattcctcagggatctagaactagaaataccatttgacccagccatcccattactgggtatatacccaaaggactataaatcatgctgctataaagacacatgcacacgtatgtttattgtggcattattcacaatagcaaagacttggaaccaacccacatgtccaacaacgatagactggattaagaaaatgtggcacatattcaccatggaatactatgcagccataaaaaatgrtgagttcatgtcctttgtagggacatggatgaaattggaaatcatcattctcagtaaactatcgcaagaacaaaaaaccaaacactgtgtattctcactcrtaggtgggaaytgaacaatgagaacacatggayacagraaggggaacatcatactctggggactgttgtggggtagggggaagggggagggatagcactgggagatatacstattgctagatggtgagttagtgggtgtagcgcaccagcatgtcacatgtatacatatgtaactaacctgcacattgtgcacatgtacccgaaaacttaaagtattaaaaaaaaaatgcaatggcaacaaaagccaaaattgacaaatgggatctaattaagatcctttcttacaaactgtgcttacgctggtggcgttggaggcattcccctgttgctggagggcattcatctcttacctgatagtctcttttctgcaatccagatagaattgttttagtttgggatgtaaattggcaggtgttattagaattgaaaatacctgagaacgttatctaaaaactaaggaaaatgagtatttaaaaaatcttaatcaagcttgatatatagaaggcctggacagtaaagctcggttgtaaagatcacaggcttttgggacaaaaggttggggacttgatctgtggctttttactccccaccttcaaatcctagattccttttaatcagtctatggatccactgactaaaaacattagcaatttaatgacagtgttttttttttttttttttttggtggggtgggggcacaactgtatcaattgataccattggtacatattgattgaaaatgtatctttgaattaaagaaatatggtaatattaatataatagtgtctagtctgttaaaaatataataacagtaacacctacttttgagttattataacagttaaatgagctagtactttgcacagagcccgtttggtgctggcacatggtaaaaattgaatgaaaagcagcagtgattgataacacagaacatctcttcttggtattatggagtctgtatagtctcactcatcaaattcaatagtcacaaagtaataagtaaatacccctgggtgactgaaatatartaagtactatacagtctgtatttcaggtacctaggarttatttatttttctaatagttaacagtgaattctactttcctatgctgggaagtcatttgataatttggtatgggaaaacttaataatgctccttgsgtcacaaatactaatgttgggtctgttaaaataagggagtgtataaaaattaatgagactcgatttttagaataagtatcccgatttttccaatgtaattttgttcttttttgcaggatttcgtattcaatttcaaaagtaagtttgaaaccacatctattttctgaaaacaaaacaaaaaaaattgaacaacaacaataataacaacaataygtacacacaactgcgggatttttggatttatgttatccagaattaagtacyrgaggtagacaatgctgaaaaacacgtatgccgatcacaaactcatagggcaacatgaactgtgggatgaaacagatgggttgccactgcctacctttgacttgctctggttcccttagggaaatggagattttcttagtgtctggcatttgcagctctttccacaagaggacactgtgcaccatgactatcatcccgcctgctgtgggcggaggccagggccaccggcagaggtcctgctggaatttctgggatagtggagagcagtgagccaagccggatgcctgcaagtcacgtgaaactgtccaggcagacaaattaggcagtgttcggtgctcattcagccgtggggagcggacrggacggaaaaattcctttcattcccargctgcccagaagtagctgcaagcacttttaaggtaactgtgtcaaggacttacaataagtagccagtaacccttttaaatgtctgcaatgttaacatagccatatgtgcaccaaggggagggttttttagacagacgttgtttgttgtgggtaatataacaacacatgtagttatcagtattttattagaatatttacatttttaagtgctgagattctaaaataccttttggctacattctgtgaatgaatatggacaatcaccatgtggcaaaggttatcccttctccctctgacccctggcaattgygaagtttggagagaggacaccaccaagcagcagtctgaaaatatttctcctttgaggcctgacttagggcaagggaagaggaagaaaaatagaccctgataattattctggcatttctcttgattgctactaccagcggaatggaagcctggactctcggttcaccattgttgactgtgccaacatcttccatttctgttctctggggtcttaggtgatttgaaagcacagtaaagtgatcaatagctactcaggataatgggtagaggataacaacaactatagaatatgacactgggagcatgagaaaagctagtatatcttgagtgcctgatgtacatgccaggtactcactgttgcatgctttgtagaattttttgtctgaatgtgaactggacgggcccacctcagggcttgggcacctttgtytcygtgcagcccttgaacttaggtgagactgcattaagctccagagggataatgggggttgcccactgaataatccaaccccacttgctttcccctttcacgatgtccatggtgctcactccagctgcttgaggacttcttttgcattaaaataattaaaattatatgtatatmgttgtatgtttattatggaaaaaaatcaatgcatgtttatttttagaaaaaataaatataaagataggcacaagaaatagtttaaaaaaatcacccacacttctatagttccraagtaattattgttaactaactatgtatgtacctatgtactcaaatgttcatgtatatacccatagatatgcacasaaagcattttgtgaaatttggattatagtaaccattaattcatagcttgctcttttcactttgcacattctgaagattatttctgttaacaaatacttgcccacagcatttttgyagtatttgtttgctagttttagatagatacttttaagtacagaaaagtgcacacgttacaggtgtgtagcttgatcaggtttcacaaaaagcacaaatgcctgggcttgatggcagaaattcacagctagaacatcctcagcatccccaaagccccctagacyccggtcaaattgctgcctacccctcctccccaaaggtgacattcttctgacatctttcccacatccccagagattaggtgcatgcatcaatggcgtcattttgtgtatactcatttatgtctgccttcttgagcctctcactgtgagactgatccataccgtggcacgtgagtgtcagtggctcattattatgtaatattacattctgggcacatatgcaatttatttttaccttttgctttaaatgggtgtttgaatagttttcaggttgggaccattacaaacactactgctctggccaggcgtggtggctcactcctgtagtcccagcgctttgggaggccaaagcagtggatcccttgagcccaggagtttgagaccagcatggacaacatggaaaaaccccatctccacaaaaagtacaaaattagctgggcatgttggtgctttcctgtagtcccagatactcaggaggctgacttgggaggatcctttgagcccaggaggcagaagttacagtgagccgagatcacaccactgcactccaacctgggtgacagagtgagaccttgtcaccaagaaacaacaacaacaacgtcaaaaaacaactactctgagtactattgtaggagtcttttggtgaacataagtactcatttctgtttggttctgtggggaaatacagctgatyctctttatctgcaggttccacatcctctgattcaaccaacaatggatcaaaaatatttgaaaaaatatacaacagtaaaaagtaatacaaaataaagaagcagtacagtataacaactatttgcatagcatttacattgtattaggtattataaataatctgggcataatttaaaatatatgggaggatgtgtgtatgttatatgcatatgcaaatcctacaccattttatatcagagacttgagcatttgcaaattttggtatctgcaggggtcctggaatcaatctctaacaaataccaagggagactgtatctagtcctaaaagctgggccagaaggtagcgtatcttcagctttagacagtgccacatttttccaaagaaggtgtacaggcttacactcccgctagcagtgtgtgagagctctcatatgtaataattttgacagatgccatggaattccattttagagaaccatcatcatttattttactagtcctccctgattgggcactcggttgtttgcagtttgcytttataaatagctcatgaatcaacattctttcaagtacatatttatacatatccttgattgtttccctagcatacatccttagaggtcaagtgtgactatttaaaattctttggcgttccattgccagacttccttccagcctccaaaccctaggaggctgcaccaacttttgctttatttcaggagttggcacattttttccataaaaggccctgtagtaaatakttttagttttgccagccatatggtctctgtcatgaggactcaactctgctgttataacatgagtatggctacatgtttaggtagccrtagacaatatgtgagctgatagatgtaaccgtgttccaatgaaactttatttacaaaaacaaggagtgggtcagatttggcctgtgggtcatagcttgctgactcttgttttatttggtgaatggtttctgagagttgagtaacaactggggagtagagtccatggaccaggataaactttcatctctccccataatgggaatgtgtgagtaggcaggcgtgcatacctgcaacgcagcggcaaagctatggacttcctgtgttaagttcaatgtgtaagcatactcttgagagtaaccacgtgaactacgtaggtatccattgccaattaacatttggcaatgttaatgccaacaattaacatgaacataaaatggtctaattgtaggaaatctgaaaaagagaagacaaacaaagaaactgagacagaaagtggaaatgaaaactccggctacaattcagatgaacaaaagaccacaggtgagtagacaagaggggtggtgaaaagacctgggaaagagagagctggaagaagggctggcttgctagataccagctgcacagggaggctaacttggcaatggtggttattattttttggataaattttagaagaagaaattctagaacttggaatactctaggagtaggttaacagtaaaaatccacctatttgtctaatgcttaaaataaagtgaggaagaaccctgagagctttaaaaaactttgtttttttccatcacacactggggcctgccatagggtggggggaagggggaaggatagcattaggagatatacctaatgtaaatgacaagttaacgggtgcagcacaccaacaaggcacatgtatacatatgtaacaaacatgcacgttgtgcacatgtaccctagaacttaaagtataataaaaaaaattgtttttttccccatgctttcttttttgtttaaagccctctacattaaaacatgtggggaggtattttaatacattgggggtaacttcctcccaatttcaagtagagtcaagtaagagatctcttccccttgaatgtaacagggagttgggaatgctggaaaactagacctacttttggagagtcttgctgtagtatctcattttcttgctatgagacaatacagagtgataatgcagtgagggcatctctaagacaacatcaccaggaagcagcagcagttgagtattgaaggccgatgagaggggaaggctgaacccactcctcctctgcaggatgaacaggacacctgccctcacaggctgctgggaacaccaaattccatgggaaggttttcagccaatcagtccttgctgaggggcctaaacacctgcgttttccacaaaaattggagctctattttcagcagccccattttttttgattttaccatggctgcctcccatgtgtattccagattgcatctttcagattgaaaaaaattccagagagcatggactgtttcctttgataatctgaccacagcttcttgcaggttcctgtgagtgaatatttattcattagtattttgagcaattgactatcttgacaaaaatcatggcccaaatcaaacatctctatctcttttatctccatttgtctggcatttattttccttgatcagctgttgaagctttggatcatttagtgtctgggtgaaactaatgtgtcgagaaagaaatggattttgagttagttttccatatttttatttctttaaagaaataacattctaaagagatgggatctcaagggaatttaaaaaaagtgttcatggttaaggattatgccagcggtactacataaaagcaaatgtgtttctttataaatcagaattgttagagcacacagcttggtttttgccacttaatgactctaaaattgttcttctgttgcagacaccgcttctctccctcccaaatcctgtgaatccagtgatcctgaacaaagaaacagtagctgtggccctcctcaccaggtagtttagaccattttccccctttttggacttttttggctatttaaaaattcttaccttgttgtgggtgattataaaatggtgcgcgttgtgtattcatgatggtggcatgttgcctttcctcccctccatatcaactggtcagcatggagagatggggctgagacgtggactgtttcttgccctcagtagcagttgctctaagatcaaggctggttctgggtaacagctctgggttcacattttgggaggatgcgacttgatttgggacgtatccgcctgagttggcataagagtgagcagcatatataatgtgccatttgttctctttgagccatattctcccaggactcaagtccattctgctctcctggttacccgctcccacgtgctcatctgtacttggacccttggggcctttggactcatggaaggatgcactgggtttgaggatcaggacagagaaaatgtagtttgctctgcatgcaagttctatgctgataagcttgagggctgaaaaaatcctgtcggggttagaattttagaggagagaggaggagtccttgatgattaaggattatggccagaacggctaagaggctggagttgccattaacgtagataaggaatgttatgggtggagcagtttagggggaaagattagacatctaattggagcttgtagattctgaaggtctctgttagatgtccacatggagatgctgaaggtgtagttaaattcaccagtctgcagttccagggagaggtactagctgtagatactggttggttggttggcaatgtttcgatgggagctgtcttttcacaggatggttcacttaagtaaacggtcaactggcagcactgagaacatagtatgttaatttgctgatatagagtcagcattggttatcatacatgaatgaatgagagttcattttctatcccgaatcataaattaggtagaatatatataaccaacacccttttctgacctgtacaaatgcaacttcagacaagaagtatttcaatgcgattctgtgattgtgtccccaataagtgtagatgttatcttcttttagcttttggaaaaggtaaacttgcaggctgggttttggatagcacactgggccagatgggttgggtttgttctgctaggagctgctttacctgaggcgacggtgcccagcaggtgcctgtgtggcccctgatcattctttcttggcacaggtatttacctgagtttccagggagctctgggcaataatattcctccctgcaattgggattcagctcagtaacctacatcttgccagtgatgtgtgtttttcaggcctgtaggggggaagggagtgctgattgatgctcagtcatgtattgggaaaacctaagtgatactattaatattagtgtcaacacaggtagccagacaacaagacatatgaggggcctggggcataaaggcaactgtgcctgagtaacaaatcgttagctcctagtacaagttccagtgactttcctcaggccgggtgtcaggaaaatggagaggtaatgttttttccatcagggccgctctctttggcacatacatcttttgatgcatttaatttggagctggaagggacgatgatgcaacaggtttcctttagaaggaccagtctctgagtgaaaggtggcagtggaagggagtgattgttgggctgtggggtggctggctgaggggctcgctcccaccccagctccaagcacggacagccaatagcacatttaagccaaccatgatttccacagcccttccgtggttatctttgtctatcaagtgtgtttctatcagacaagccaaagtgttcaggtctggcgttgtggggagggtataagctgggaggagattcagaatagggtcatgccacataattctcttcaaaatacatctagtatgaatgaggaggaaggggaatgtgaggtgcatttggatacctgagtggagaatgacgttttggagctcggagtggatgcttcttgatgtttgtagtgttctttttgaatatacacagggagagaaacttaagagttttctgctactgaaacatgtacccagctaaataatcaatcggtggaaaaagaacagtgaccctcgaggtgctgagccctggggactggtaacgtagtctcgtgtttcttatttcctgaagggtttgtcgtcttctaggggagccgggcacctcatcagagagcaccaaggcccttaagaaacaaatcaggactctaggaagttgaattatctttggctgggctagaaactaatgagggttattaaataactggatctttctactcatcatggggggactttaggacaaagtcctaaagaagaggtctatctttgattatgaccaaagaaggactttgccgtcatgggcccaggcacggcctccacgttgcccatttggagagcctggatgcaggatgtaccatgggccgtgtttcctgggaagcacttagaggaggaatgagcaaaatgggccacagtggaaaggctgggcctggggacacagccgttcccttccatttccttggtccagagaagacatagaccttgttgtggtcaactggccacttgagagctgccagaatagtgaagctacagcttgtagaagcagtcagggtgacgctggtacagaggttccttttaagaacttccccagaccaggccccgtagccctgcagccctgccaggcctatgtcaccaggttcgtgctgtgtggggtgatgaggacctctgaattccgaatgccttggtccaaggtgtgaaaacaatgcagtcgtgccttcttttctcaaaactttctccattctgcaataagccttagttccttatagagcccaggagagacagctgagagctattcagagtcccgtctcagttttcctttcatcctcctctccgcatgcctcagtatgactccaatttgtcagagcctcctgagctgctgccgcatgttttgcgcacacaggcctcccaggcccagagctggggcccagcagggctcctgcccgagaagctggcttgttagagttcagggttgttgactacagattgcactattttgcagaaaccccgcatgaagctcaggtcctgaaaagcctgtagattagactgaaagatcccaagctgtgagccagcctgaagcaaacacttttccgatcgtggttgctgaagagctagttgggtcagaaaaatggcctatccatggagatgcggcaggcacaacagcaactaaagctcctgctttgtcttaatagatcgcagaacaggatagttttggttttgtgaacaggacggcaactgctgaccacatacactcgctctctgctcatgctgcatcctcctctgctgaaactggtgatctgttaacactcggcaatttcaggaggacttaactaatggatgactgttgactacacacaggctagtccagcatttctaggtcctcaataaacagttactcattaaagtggagaataccttccatgcccagcattatgctgtcacaagcaaggtactataaggtgtgtgcatgtgcagatagacaaagctcctttgctttttttttttttttttttgagatggagttttgctctgtcacccaagctagagtgcagtggtgtgatcttggctcaccgcaacctctgcctcccaggttcaagcgattctcctgccccagcctcctgagtagctgggattataggcgtctgccaccatgcccagctaatttttgtatttttagtagagacagcatttcaccatgttggccaggctgggctcgaactcctgacctcaggtgacctgcccacctcagcctcccaaagtgctggtattacaggcgtgagacagcttgcccggcctttaaaaattttttttgagacatggtcttgctttgttgcccaggctggattgcagtggcacgatcatagctcactgtaacctcgtactcctgggctcaagggatcctcctgcctcagccttccggagagctaggactacgggcacttgctgccatgcctagctaattttaaacatttttttttgtaggaatgggggtctcactatttgcccaggctgttcttaaactcttggcctgaagcgattctcccacatgggcctcccaaagcattgggattataagcatgagccactgcacctgacccctacttcctttgctgttaatcccaatcagttatgacaaaaatatgattagatcactatagatgaatatacaacctaaaaataacatcacgttttgggtcatttagaaaagttaaataatttcatatcaaactgcctttccacgcctttgtgatcggcggcactttgttttcttcaggggcccattgcttaaatatgcccccaggacggggaaatttgatgtgccagggttggcccacaggtcactgatgaggcccttgggaagttcagatttatggtcttcacctctagacatcaggactcagagggctgaggaggtgtttaagcagctctgctttttaggagaactcaatgtggctaggcttaagggttattggttaccttatagcaagaggggaatcaggagttttggaaagggaagagtggcaggtccccaagcaccaatctgcctcctccataacttcaccctgcacgatgggtactcagcaattctgctttgcccagcatcctgaggccttcataatggcctgtgcttgcccacctggagtgggttctactggggttggtagtgccatgctctttctccctctgccgggagtcagctgtatttccgcaagtagaggagtgtctggacactgaatccggagtctgggaaggcacccagctcagggcggtgtatggcgttaggaggagcagcaggtttccaggttacttgtgcccccatcttcaatgtcacaactctcaatctctcttccctgagttgtacacatctgtgtctacatctcaaggctgccgtgggtctctgaatacgtcatctttgtcatgaatcacccagctcaattttaataacatccaacagttagtaaaacaggaaactagaactttaatattttaggaaatggcagaatttgctgctgcaccagcctcccataactcctgcccctttggcatcctttcagttaaggtccagcatgccaaaggcacacactgccacggagatgagcaagacaagatgcagtggtgaaacctttttttcaaaccgttagttatcccctgatgctttcagtgctgggaatcctttgaaaatttcagaaaagtgggggcatgtctcaggagcagtgtcatgggggacaggctggggctggagttttgaccaccaaaggccagacactgtggccaggagctacaggcacaatggctgacttaggccaggtcctcagggggacgctgggttgtagacaatgggaagaggcaccagttcctagacctcttggtccccaggctgcctggagctcccccttttgctcatctccacctctaagcaccctctcctgccaatttcttccctgaacatgagacttcctgctcaagagatggggcagtccttgttcttgccaccacctggcagaaatggtggatgtatttccggaattctctattccggttttcctaaagaatgcttgctgaacacggaggtgcacccagcgcctataaataccgctgccttggtaccctgctggcgtagcagcagctctcagtacagccctgtgccaggaacacactgggttcttgttaaaatgcacactcttgggcctccgccaggcttgctggatcagaatgtctgggagatagggccaaagaatcagtatttttatcattctccaggtgatctgctttgaggaatttttttttttttgtcccagtgtgaaaactccacagacatgtatagcattgtttctaagggagggtgctctctgatttctagaagtcttcctacaactgtgcatttagaattacttgtacctcgtgtccctgctccaccggccttgctgcaaagcacagagaagagtttgagatgctcacggtggtgccatgatgaatgccaagtgaaaggtcttgacaccaaagactccactgtccacctggcatcctaccagggacactcttaattaacccttccatattttagatgggtcctaaagcacattgcattcaacataaatgaaaaaatagaaacctagactgtagagatctcaatcatggattaaattgtaagaagggtcagaaggaaaaaagagattcattttcaaaactgtcatatacaatatgacaattttcttctctgattatttctctgatgactgaatctacagttagaatatgtagtactgacatggttttctagacaagagtttccctgttggtgaaacagaatgaatttgggtgcaactgcagctgaaacacattagggtaaaagtaataagtaaaattagaaattcctactaaaataaccaattactgggaaaggcatgcttttttatttcaatatgaagccaggggatttgcaaatgttttttattttggcgaatatttaaaacaaagaatcctccttttcctctctttgtcctgtgccttaactcactgtcagtgcattttcctggttgttttaggaaattctctgtctctgtcattttcagaagatgggcatataaacaacttgagacctggatcaagccttccccacaaatcaccccctcattgagacaaacagaaatacatacttgataaatttagaaaacagcgatgtttgcacaacccagcagtgaaaacaaaagcaaacgacagtaggaatctctagcatattagcagcagaaggcacatgtcttaaagcactgctgacatagttccatccgctgtccagttttccctgtgttattgggagtcaacaaattaagagcgtgagccagagtaattctatcctcaagacttgctagcattccatcacattgtgaataatttatcatgcccagttacattatttaagatgttaagtgcagctattgtgccctggaacctgagctgccattctcaggactggcaggaaaaaagtgttgcacacattttaataaggcaatattatgagacaggcattggccactctggaggattaaatggtttgtttgggattacatttctgaatgagaacagggaagactatgtttctccctgatagggaaaagagacaggtgggtgatctatctggagtcagttcttcaattttgtccccctgttctagaaacaatgcacgctctttaagaagtttagaaatattttatattttcataaaaaatctagccagtaaagcaagaacttccttaggaaaattgaaacacaaaacaaaacaatgagtcgtggtaatttgccttagtcaaaacaaatactgattcttggaattggattgccctttagggcctgaacttggaaaacttctatattgtgtgttaccagaaataatgcaagaaaggaagagcttattttaacatttttgttcctctccgtaccttaattttatcttaacagatgagtgaagctctcttttcaagtttgcattttacagtgatctcaacccattaaattgacttttttcctcctctgttgccagcgggctgatcaacgtccacccaggccagcaagtcatccacaggcttcttttaatctggccagtcctgagaaggtcagtaatacaactgtagtatagcaaagccttccccaagctccactgagcacttggctgacaattcaaaacacggcgatggcatccttcctttccatcctaagactggcctgcagctttgccaacattacctgaagaggagatgtcggagtcatcagaactgatacttgacagtgagagaaggaatcgattttcccagagttcaaagtagaatgtgacttttaagaggtttcatggtttttgtgaattccatgaagttactaagtaaaagctgcaaattcatcataatttttctcaacattcaacactcctacttgttaatccaacaaatggtagataaaagtctgtattctaccatgcctttcaaaagtttttattatctgaaagcatatgaagatgatatttatgtatatttaatatgtaggggtattattacatattatcagtgaaatacgagtataaaaattagggtcaaccagaaatctgcaattgactgtcaaaactgagctcagttaaagtaagattcaattctaacatggatgtgcacgttcctaaatatcttatgattgaatatttacatgaaggcattcatttttatctgcccctttatcagacctatttgcatctcctcaaatgaattagatgtggcctatgctttgcagaggatggacctcacctactccgcacaccgtgaaaaaactggaaatgggcattgtagtctttaattaataaaaacaccaaaaatgtgtattgcctttcttaactcttcactattcagttggtcatttaaagaatcatagtattcgggaatcaagccttttccgagaaggaaaacaagagccttctgcaaaaatccatcacatcttcacaattatctttgctgactgtacattcacttcatttaaagttaacatgaatgttgttatgaagaataaattgctgcctttccccagtatttttctttttccatgtagatacagtcagtgaatttaactgcccattccaccccttcatatttaacctaggggcaagactgtgatttgaccgtactctgaactggttggtgcagatttctatgctggttataattagcaactgctttgagtccctcaagctcaaccatgctattgctaaagcagaatttgacttttaaaatatgtcaggattttagtgaattccttacggatacttagtaatagatgcaaatttgtcatggtgtttctaatcactcactcctgcttgctaatccaacaaatggtagagaagtcttacactaccatgatgtataaaatacttttataatcttaaatcacattcagccctaccctggaccgtcctataaaccagcaactaactgaaggggtgtattagtctgttctcacactgctaacaaaaacacacctcagactgaataattttataaagaaaaagaggtttaatggactcatagtttcatatggctgaggaggtctcacaattattgtgaaaggcggaggaggagcaaaggtacatcttacatggaggcaggcaagagggaagtgccctttacaaaaccatcagctctcatgagacttattcactatcatgagaacagcccaggaagaacccacccctataattcaattacctcccaccatgtccctcccacaacgtgtggggattatggaagctacaattcacgatgagatttgggcggggacacagccaaaccatatcaaagggtatttcctggtaccatttggagccaggcatgtgttttgattggctgatgctcatactgtatccattctgattggtcagtgcccatacaatatctattctaattgggcagtgttcatgccttactggttgtcatctattttgaatatcatctctgcttagaggatcctgaaaaaaaaaaaaaaggtaatctctcctaggaccatgtccctaacgtgagaaaattggctggctagattttagggagtagaactgaaatgcaaaatttcaaaaacccataaatattgctatatcatattcccaagagtcttttcgagggaaacaattgccaattcaactggataaaaatgagactcatttattatactaatttttttattccctgccaatgtggttctgtctttccactaccgtccttgaatggctacaaggagaagagaaagacaagaaggttcttgaatctctttaggcagagctaaatgggtgaatgccatactcttcacttaatagtttactctccttaaacaaccacagaattcagatcctaagataaggcaaatgccatgttatttatgccttttgtaacttttacagcacctgatatactgtaaatgttcagtaaatattgaaatcaaacaggtcaatattaagaaagcctatatattaaatacaagaaatatttatcatttgcttgctataagaataatattttgtggcaattttgagagtcaagggggttgcatataaaatataattgaaatttaagttttgaaatctggaggacaatggtaaataatttccatagaagtttctccaacttactacacgcttgttgagtcacactcaaaatatttttttcatttatcagattatgggattttttttttgtggtgtcacttataaataggctcttcttacagaatcttactccaggagtaaggtttctcagagggatcctctggccagtttttatttcacattaggtagatgcattacttgaatagaactatctagagctatactgtccaatactgtagccacatggggctatttaaatttaagttatttaaactaaataaaatataagattcattttatcggttgcactggtcacattgcaagggttcaatagctacgtgtgaccagtggctactctactggacaatgcgcatggtaggtttccattattgcagcaagttctgtaggagtgctcatctagagatagctacttggaaatgaccttgatgtgtcatatcatcttcatatgctttatccttttacacaaacacacaatctgtgttttcttcagcattatgtctgtgcactcagccagtttctatttaggaatcctgcaacacccaaggcagctctcaaccgaaaatggtgttttgctgatgtggtaaattcctatctcacttccacagtgcagagagctgtggcaggctcaagggggtggaatgagaggagtcaatcaaagcaaaacttcatggtcaaggttatttctcgggaagatgcagctctctgctaatgaatggccgatgagggctgcaaatttatttaaacaaatacccctcaaaattttatgccataaaaccctaaccagggaaaccatacctgtccatccctcccagtggtcttttactttggtttgtctgtcagattccaagcaggacccatgcaatcaaggctcttccatattactcagggtaaggacctaagtggtaatgccaatacctcgaagataactggagagcttgagagcttcctctgctctgtgtggccctgaccttggaaaactgttagggacactaaagttggttgcacgttcctaagagtttaatgacataaaaggtcaatagatgaggccggatgcagtggctcatgcctgtaatcccagcactttgggaagctgaggcaagcggatcgcttgaagccgggaggtggacaccagcctgggcaacatggtgaaacccatctctactaaaaatacaaaaagtagccaactatgcctgtagtcccagctactcgggaggctgaggcacaagaagtttttgaacctgggatgtggaggttgcagtgagccgagatcgcactattgcactccagcctgggtgacagagtgagactccatctcaaaaaaattaaaaaaaaggtcaatagatgcttcagagcaaacaagagatgccatgccagtacctgaaccccccctgttaaagtgcttgttgatgtctttgggaagaacaccatcctgtgtgaagatgaaggatggtctgctccgtgggacacatgaaaacttgaagagttcagagatgggagaatcaggtggagagcaggacaggaagcaagggttcaggggaaggtagtatgaggtgaaggtcttgacaggcaggtggtccagcaggccgggagccatgcctgtgggcctgaggaactgttaccatccactggaccaagggagcagggagaggatgatgggccggtgtggagagggcctctgactgctgctgtggccacaccatggaaatatggcagagagggagtcagagtgacagggttctggccatccactctctcttttcagtctcttgcttgtgcctccccctgatcacgcccaaccagagccagaggtcctggagaccatcagtgtagtccgtatgggtcagtcccctgggaggactgtgctggatacagaaggtgggaaatggatgtggagggcaggcagagcatttagcaaggagaaattgctgaatggagaatataaaggggatgggaggagaatgaatgatccatgtaaagtcagaaggaagggccttttgcctggtagtgtgctccactgcttaccttccttagggatgaagccatttactgagaaaggtgtaggggctaagagctcagctcactgaaagtttgctgaaagtccttgatacgttgcagatgggtaggagaaaaggcatacaaatttatttaatgtgtgtacaagggagccttcagaatgaagacccaaagatgcaggggaaattgtctgtttctatgcttaggcttaacaaagtatggactgccatgtaaaaatatgattggacaaaaagggtaagatctaatgctgataaactgagtggggaaatccagaatgacctgtctgcctagattcttcttggcctctctgagtatcattccttcctgctgggtgtgggcaggactcactctggaatgggagtctttttttttttttttattattatactttaagttctagggtacatgtgcacaacgtgcaggtttgttacatatgtatacatgtgccatgttggtgtgctgcactcattaactcatcatttacattaggtatatctcctaatgctatccctccccacttcccccaccccatgacagtccccggtgtgtgatgttccccttcctgtgtccaagtgttctcattgttcagttcccacctatgagtgagaacatgcggtgtttggttttttgtccctgtgatagttttctgagaatgatggtttccagcttcatccatgtccctacaaaggacatgaactcgtccttttttatggctgcatagtgttccatggtgtatatgtgccacattttcttaatccagtctatcattgatggaaattagggttggttccaagtctttgctgttgtgaatagtgccgcaataaacatacatgtgcatgtgtctttatagcagcatgatttataatcttttgggtatatacccagtaataggatggctgggtcaaatggtatttctagttctagatccttgaggaatggccacattgtcttccacaatggttgaaccagtttacagtcccaccaagagtgtaaaagtgtggaatgggagccttatgacctgcagtcaagcaagataggtcccataatttcttcatggccagtttttacatagaatatgtttaagttttatggctggctttagagaaaaggagttctggtttctatggcctgccttgggaaagagggattgtcgttttagctcgccttgggaaagaatgagactgagagacaagagggcaggagaaggtcaaataaaaacttttgcttctgaggccttcactttagggtattgttttctgaggcccaacagagcatcattgggaggaaaggaattcggctgcattgaacttgggtagctcccatctttgttgcccacttccatctcaggagaacaaggggattggatgatgggcccttgaagtcctttctggcacttatcttcatagagatgttcacacacacacacacacacacacacacacacacacacacgcacacacactcatcctcacctgacatgacccagctgttaggactgaggctgcgctgtctgaatgcgtgcaagcatc

SEQ ID NO: 96725 - DNA, 17966 bp, Homo sapiens
agcccactgtatgaatataccacacgattatccatttgtcagttgatggacattgggttgtttccactttttggctattgtgaatagcactgttgtgaacattggtgtatgagtgtctgatgacttgttttcagttattttgggcatatgccgaggaatggaattgtagttttataccataactccatgttttgactttttgaggaacctacaaattttccacagtggatgcaccactttacacccaccagcagcacaccagggttactgcttctccatatccttgtgaacacttgttcctttccttttcttgtattatagccatcctagtgttttgtcatcctagtgggtatgaagtggcgtgtcattgtggttttgttttgcattttcctagtcattaatgacattgaccatctttccacaggcttactggccattggtatacattctttggagaatgtcgatttaagttcttcacccattttttattttttattttttatttttttttgagatggagtttcgctcttgtgcccaggctggagtgcagtggtgcgatcttggctcactgcaacctctgcctcctgggttcaagcagttctcctgcctcagcctcccaagtagctggaattacaggcatctgcctccacacccagctaatttgtttagtatttttagtaaagacggggtttcaccatgttggccaggctggtctcaaactcgtgacctcaggtgatctaccagcctcggcctcccaaagtgctaggattaacaggcaggagccatcacacctggtctcttcccccatttttaaattgtgttgtctgtctttgttgttgagttgtaggagttcttaatagtttctggatatcagatgcctttgtggttttcacatctctgcaggcaactgtgtgtctcaaaagcaaactgcaggattgggctgcaccatggactgggccaggcatctgagatcagacagacccaggctcagctcccacttcctggcctcttctgccaccctgggtgtgcagcctcatccttggagccccagttgcctcatccgtaatggggtgtccttgttcatattgaggctctctagtgaaggcttacggtcaggcacgactgcaaattaaagcttcacaaatcaaacctgttggaatttctaagtctctctcgatggcccactcaggttagcagcatgcagctcattctaccccgtcaacgttgactggaagggtttttagtccctgtgttgagccacatctgcagcttgtgcaatgcaaaaccaaggaaaagaaaatggaccccccccgccccccccttgatggatctagctgagactaggcactggccaggctgtcacctacagtggtttcaacctcctgctgccagcaagacagcatctcctgtcctttttgtgcaggaaccatagctctgttgggttaagtgttttcctctaccaagcagctaacctggccttgaaacctaatctctgatgccatgtccccccaagccccatcagagttttgtaaaaagcccctccctgctctccacaccaatgctgagagcccatggggtaactggaggcttccctgccatcttggcaaagaagcctggctgacgtcctgcacatgcttccccaggtgattgcttgcacttaacagcagaggaaacgagaccaccccacacaacttgtagcagttgaggagtctctgcctgatcccaccccggatacttagagcatccagaattaaaaataagccttgtcaccaacatccggctcccccactccccagagccaggctcaatgtgcccaacagcgctggggcccgcacctggaggcactggcttttgagacactgggcagagaccccactgccctttgggatgaattcaccacctgcctcttacagaatccggccgaagacctgggatgttcacattcagctggatctctaggtttcttggactggaacacaggtggccccagctcaatatgctcaccagggtgttgccactcacctgttgaccgtccctaccagggacagatctgtgcaccccatccccaccttagaccaccagctcacacacaggtggtgttggtgcagtggttaatgttaggtgtcaacttcactagattaagggatgccgagatggctggtattttttctgggtgtctgtaagggtgttgccagaggagagtgacatgactcggtggactgagaaaggaagacccaccctcaatgtgggtgggtaccatccaatcagctgccagcacggccagaacaacaggtggaagaagggggatgagcaccttgctgagtcttctccagccctctccctcttccgtgccagatgcttgcttcctcttctctgctgttggacatcagactccaggttcttcggcatttggactctgggacttgcaccagcagcttcctggagccttctgccacagactgaaggctgcactgtgggctttctggttttgaggcttttggacttggactcagctatgctaccggcttctttccacagcttgtagatggcctattctgggacttcaccttgtaatcctgtgagccacttctccctaattaactcgctttctatatattacatacagcctattggttctgtccctctggaaaacactaatatagagtcagggtctggcctgcagtctgaacctgaaaggttccttctgaaacccacgcaagcgagccccagtggcctccctgcctgccagaggccgcagcccactgaactgattggtcttatcgtctcaggaattcggcaagcaatgcagagatgacccagtgcaggtcaccagagtcaccggtgtttgtctttggaacacacctgggttttctccactacaaccttagctttctcaaggaattaagattatatatatatcctgattacaaaagaaaagtgtcattaaaaacgcaaatgttggccgggcacaagtggctgacacctgtaatcccaacacttcgggaggctgaggcaggcagatcatttgaggtcaggagttcgagaccagcccaggcaacatggcgaaaccgtctctactaaaaatgcaaaaatcagccgagtgtggtggtgcatgcctgcaaacccggctacccaagaggctgagaggcaggagaattgcttgaaccagggaggtggagattatagtgaacagagattgggccactgtactccagtctgagtgacagagcaagactccgtttcaaaaaaaaaaaaaaagcaaatgttggctacacacagtggctcacgcctataatcccagtacttagggtggccgagctgggaggactgcttgaagccaggagtttgagaccagcttgtaatcccaggggtaatcatggctcactgcagcctcgccctgctagactcaagccatcctcccacctcagcctcctgaatagctgggcccataggtatataccacacctggctaattattttttgtagagatgaggtctatgttgcccctgctggtctcgaacccctggcctcaggcagtcctcccgcttcaacctccaaaacgctgggattacaagcataagccactgtacctggcctgtttttttgtttgcttttttaaatattagcagatacggaaacgagctgaacaggtcagctctacgggaataaatggtccccctttgaggacaatcccacagctaagtattcctgaagagaagtgcgtacaagtggatttacaaaaaggaaatgctatttggtcaaatttattacagttagtggtagaggatctatgggtgacattttcaaaggactacatttagattctccatttttggagtcctttttttttttctaaaatcttccctagcgacccttgcattctgagcaggggtagtcactgccttaccagagtcatcaaggatcctggctctgggttacttggtgaaggtaaaacaaggaatttcagtcaccacagtgttaagacactgaggcctaggcaagcccataccgtgctcccaggcaggcagggcagaggctgtccttgcctcgcggggaggggagtgggtgggatttcacagcccatcaggacagcccaggacccggcagccctgggagtgggtgggatttcacagcccatcaggacagcccaggacccggcagcctagggcgtgaggtcatgcaaagctcctagcaaaacagtgatttgtttccagttctctggctagaaacggaagacccagacattaaccttggctaggtgatgaaaccacgaacacttttaactcatcctggattttttttttttaagccatggtatgagacagtacatttagagctacctgaagcaagtggcttctacatcaggcttgtgttggggtctggtcgtcgaaggagtggcactctagactgagcttgcttcctggacagctgcgctctgaccaggggctggagtggcatctgggagcaccttgctgtgctggggcttggatgtggctggagggtggggcacagctaggcccaccagtcctcgttcccaggcattatgttaagcactgcccaccccagttaatcgtcacaagcacctggggttgggtattacatgaccctccccagttaagagatgagaagactgaggcacaggctctgccccagactgttcccttgctgccccaacaccgccaaggaaactgctcaaagctctccagcatcaaggcatcaagtgattggaatggacctcagccaagtgtctcccaccttggacccttataatatcctctacaaggagccctcgtgcccgcctcttgccctacacccaacacctagaggcctacaccactattccatttgcttggcacagtcctgcttcccttgggtcctgcagtcacagctggaaggggtaggggagtcccctcaggacataagtcggggaaggaccagcagggtgcgagtggcacagctaggctggaagcagccctgcacgcagaccagagccctccccagcccacatgtgtcatctggtgataggaagtgagccctggctttggctcttgcgggtgagagggttaagatgccctggcctctcacctgcacaaggcggggcaagtttcctccccacttgtgcagccacaaagaggtgcaagggaggtagagaacacacatttctggccgggtgcggtggcccatgcctgtaatcccagcactttgggaggccaaggcaggcagatcacaaggtcaagagatcaagaccatcctggccaacatggtgaaaatccatctctactaaaaatacaaaaattagccgagcgtggtagcgcgcacttgtagtcccagctactcgggaggctgaggcagaagaattgctttaacccgggaggcagaggttgcagtgagccgagatcgcaccactgcactccagcctgggcgacagagtgatactcactctcaaaagaaaaaaaacacaggtttctaaaaaatgatgagcatggctgaagggctgtcaacagcccactaattacagaaagtatggtgcagggctcagcagttcagccttgcgggaagaaacatcccaaactggctggttcccattactaaagcaacaccaagcttttcatcttttccttccacttaccttacttgtcacggacagaaagtctgtgtccccttcaacttgtatgctgaaatcctaacccccaaggcactgctaacaggagatggggtctttgggaagtgattcgatcatgaatgtgggcccccaccccatgggtgggcttagtttccttataagagaccctaggagagcatttccccccttcctccacatgaggacagctagatggggacacctatgaaccaggatgtgggctctcaaccaaacatggaatctgtgactcactcttggatttctagcctccaaaatggtaagacataaatttctgatgtttataagccacctagtctatggcattttgttatcacagcccaaacagactgagatgctaatttattattactattattattttattttattttattttgagacagagtttcactcttgttgcctaggctggagtgcactggcacgatctcagctcaccacaacctccgcctcccgggttcaagcaattctcctgcctcagcctcccaagtagctgggattacaggcatgtgccaccatgcccagctaatttttttgaatttttaccagagatggagtttctccacgttggtcagcctggtcttgaattcccaacctcaggtgatctaccggcctcggcttcccaaagtgctgggattataggcgtgagccacagcgcggggccaagatgcttatttatttatttttttgagacagagtcttgctctgtcgccagtctggagtgcagtggtgcaatttcagctcattgcaacctctacctcccgggttcaagcaattctcctgcctcggcctcccgagtagctgggactataggtgcgtgccaccacgcccagctaatttttgtctttttagtagagttggggtttcatcatgttggtcaggatggtctcgatctcttgacctcgtgatccgcccgcctcggcctcccgatgtgctgggattacagatgcgagccaccacacccggccaagatgctactttttaaagtaaactctaccacctccaattgacctcaagcactcttgccaaagtgccaggacaagccacaggacttacagaaaaccctcaacagctgcgtatgaaagcaccaagactcccttatccagcctgagttatatatacattagaattttttccttttattcttgttcacatcttcgaagctgagcttcgtttcaaaaggaaggataccagaggcaggaggagggtcacttgggaggggaggtggaatctccctcctctagcccccttgctacctcttaacaggcttcaaagtcagaatacagccatcagctgagagcagttcattttggcacactgggaggccggctgtgcacaccggacctctctagtgggggatcaggtcctctgctctccagtggggcctggaacagctccagtgagatgccccagctgtgggctgggggtgcagcacagagcctcagctcccccaggaccctcagctgcctgaagaaaacactcacctggctggagggaaaaagggccttgccctgaggtatcaggtgggtggcaagtcatactgagctcccgctcagcaagaaaactaaacgcacagaagacagcaggaaaatgccatcctttaacagccaaaaatctgtccttcaggggcaccaggtgactccagcccctgggggacagaacaaacacaccatacctaccatcaggcaccagacgcctcaaaacgcctggagctagggccggaaaaggcgttaagtcaccttctctcagcagaaatgtgaagctggccttcagcttctgcccaggatggcagaaaccacattctgttggtggattggttgctggtgatggacagagccaaaggtcctggggttggccccaagagctgaaacggtgcttgcaggaatggctggcactccaagctgcctgaggcagcccagctgcactcaggtgacagtgacccaagctctctgggctcagggtttatggccaccatagcccaagcacatcctgatgccctgggtttaagtaatgtaccctcctttgttctggcaaaaagctagagaaaaaccactattcaaatccctggaagggaggtgggtgcagctccccagcattagaaaacatggcaaccacccgtttccacccacctagagcagcccctcgggctcctgtaggccactgtatagcgcatagccaatgtcgtcaatctcctcctcacgcaagctgctgaagaggttcacgctggggttgaagtggcagggcaggctggcctgctccaggctgccgatgagcagctccagggcttgcaggaagcgctcacccaaggcctcctccgtccaatccacgttgtcctcccccagacgcaggaccacctgggtcaggtgaccccggcctagctgccccagagccgagcaaccacggcagacagcacacagcagcagcagcagccgccggcgagtcccagcgtcatggtcgtccagggctcgcagcctagcagcctccactggatacaggtcctgcagccagaggttccccgccagcycctccaggggccaggccaagaggaggcggtcgtcagcatcgaccccagggactgccacaagcacagccacagtgagctccaggcgttcgtgctgcacctcgagcagcagctcctccgaggccatgctgggccggatcaggcacccgagaaggctgccaatggccggccagttgacagargcagccagcgccttgcggagtagctccagcaggacgcgggaggagaggtagcccccgaccaggaagcggtcccaggggctgctcccacgggggcagaactcaagctgmgtcctgcgcacggcccagcagcgagggtccctcgccacagtgtccacgcccggcaccaggctccacaggcccggctccagcaccagtggcaccaggagacgcacatggtccgcagcccccgcctgcagcccgtcgtagagcggccccccaggcacgaatgccccaaagggcagttccgggaacttgctccgaaagtaggcctgcagctccagggcgatgtcgccagccagctgtttggccaaagccacctgggctgctgggatggtcacacggtcccgctcgaaggccagcagcctctcctgcagtgtcagacacagcggtgctggggagctgagctgtggtgtcacctcaggatcagtttctgcaggcccttctgcagagtgaaggggcggggaacatgtcggaacagcctgtgattagttaagaaaacgccaccgagaactagctgtgtgatgtcccagggcctcacttttctcacctgcagtggcacctgagaaggcactcagttcagatcctcacatatagtgagctcttggtgacgagttctcattgccccagagtccaacaccctggcgacaacagcttcatgcagagtaggtaggtatgtcacgcccctctggacctcagtttccccatctaaagctccycaccatcacaacgctaccaccttgctccaggaacagggcaaagaaacaccacccccattaaatatctgaggagcccacaaccgagagagaagcagggactcgcgcagggtcacacagtcagtcagggcaaagcctgggctgcgtctcttgaatgtgacaccaaaagaggggaaggagtgccactcacctggggcagacgacgagggggccaagggcaacrctggctggctaagggcagcaggtggaggccggggctgcaggtgtggtgtggccttgagcaggctcagttccttccagctgtctgccttggtgtcatcctcatcccgcgggctagtggccctgtcaatgaactgcaagcacagtcacacagatcagtgtatatgaaatctgggcagtcatagcaaagcccagggcaaagcagaccagcgtgctgggtggagaagcaggtgccctgggctcccatgaaggccttgggcagtccccacccctccccagggcccctctgaaaagcccaaccctgttgtcctcctctaggagcttcaggcatgacccgcccacttggccttacccgcttcacggccagggtggcaatgcccagcacagcagccccgcccacgcccagcaccaggcgggcattggccaggaggaagtccaccatgctgcccagcccttcgtcgctacgccgcttcccccgtttctgggagaactctgccatggtctgcctgtaagagagccaggggtgaaggggcagctcaggtgcaggtggccaggctgggagaggggctgctgtggacaggtgctctagctgtccttatgctgggtaacagagctgagcccatgaggggggctttctgagaatttctcagagaaaggggccacccatccacaggggaggacaccgaggccctgggaaatcacgtaaagtacctgagaaagggcagggatgggatatgagcttgggttttggggtcccaagcccccatctctcatgaggagatgagggagctgccaagccccttctcccaaagctgcctggaaagaagctcacaaaggccctgaggcttgtgcaggtataggaaggggcctctctccctggagcccaccctccaggacctctgacatcaccagggtgtcatcatcactacccctatgttacagagctacaggctgccagctcacaagtgagtggtaaggtctccaacccatgactgcaaggcctccagactctcatccgcccacagagtctgacggattctccctgtgccaggtgcccaggtcctcagcagcagcctcatctgaaggttcctacccagagggcacagcagccctctatgataacctcttcagaagagcccaaagtccagagaagaccaacaatttggggccccagccagtctgggggaccactgggaccagttacccccaaatcttgacagggtagcccaagaggcagagctaccaagtcagagcacgggcagagtaagacggcccaagctgcccaggcaggccaatgcagatgtgcttgtcagggttgaagcccctttggcagggcagaaagggctgcccagtgcctctgtacagggggctctctgggcctctcagtcttgggacaatgtgtaggtagtggtgggtgatgcttctcaactgccggaaggccaagcaacacagaaagtaaggtgaaggcctgggccccagcctgtttgctcacctgtaagatggcataggcagcagtgaggggcagatgtgggcagccttgaagtgtgtggctgggtgggggccagcacttgggaagtggaggcaaagatctcctagggcccagtccacattcctcacgttctgcgagggggacactgccctcaggccctgggagctgagaagggctgggaccttaggacatcagttagacaccaagcagaactctcccggggaggcctgagcagatgaccatgaggtcacagcctgcccgggcaccaaggacttctacctgccctgccagagtgtgggtgccaggggcccagttgccaggtgaccagatgcctggagtagctgaagcctgaagcgctgtgtgactcagccccgtacacccgcccattcgcyccagactawaaataagacggtctctggggcgatcccaggccaaccgggtgacccgycacggccccagggccggtttcaatctcctcatcggtgactcggggatcaatactgccacccgcccccagagagaccaggaatctactttgcaaactgtaaagcgctttaaatactcccaacctgtctaaattgggactcagccccatctctggcggggtcgcgcaggcctcagtccacagccttccagctccragaagcaggaaagggcacgggtggctgaaaataacccaagtttgcgcagcggggccctggaggccgtttggccttccctcctccgccaaacctgcctgccctgggcccgggcggagcaggccgcgcagcagccctaggtgggcgggtgacgccccgttcgcaggrtaaaccaagagaccgagaggggaagggggctgggctaggattcgaacgctgcccttggtcccccaaaggtcccctccccgccttccccagmggtgatcgcgggccacgcccccgatctgcgttccgtcgcgcgccaagccccgagcccggtgaccctgggggccgccccgccgcgctccagctgtacctgcgtcgcagcttccgcacgacgaccggaggaggcagcgggaccacggccccggagctcagaccagcctgggaatggaacgtgaaggaccctggaacccaacgactagggccccgggggcagccgcggacttcgcagcacgcagacaagcaggccctaactccaatcggagcgctcgagtccagcgcacaggtgccaaaatactgcgcggttcagccaatgaagggcaggtcccgccccccagccgacagccgcactccctctggggcgggactccctgacgcagtctggatttaaaggtgcagggctgcattccgagaccgcgaacaggtgacgtgacaggcgaccctccaggacgtctgtgcgttgtaatgtgagcctccggtgtggaggaagctgtctgggccccgttccttctggggaccaggtagagaggctgcacatggctagaggcccggcacatccaacctcttaggtcacctctgcgagagagtgtcttggtggcctcattcttacctgtgggcctgaggggcacagcgcctacccctgccacctgctctgtgcgagcttgtgtgggccattctccacctgggcatcagtttttctcctgtaaaatggggacactagaccccctcctcccctgcgaaggatggttgggcatataacagctgtggctcatttattggggtcctgctatgtgtcagccagggcgagcccccttgaacagcaaggaccaagacggatgcttctcttctggagcctccctttgtaggggggtacgagcacaggggtgctgacactaagtgggaataataacctggcgcacaaaacaacaaaacggaataataacctgccactcactgagcgcctgctgtatgctgcgagctacacgtgcattctttgttaatttgctcatggtgacaaccttagaaagtattttacaaatgaggaaactgggtagggcgcggtggctcacgcctgtcatcccaacactctgagaagctgataccagaggatcacttgaggccaggagatcaagaccagcctgggcaacatagcaagcaccccgtgtctacaaaaagtataaataaggccgggcgcggtggctcacgcctgtaatcccagcactttgggaggccgaggcggttggatcacgaggtcagaagatcgagaccatcctggctaacacggtgaaaccccgtctctactaaaaatacaaaaaaaaaaaaaaaaaaaaaaaattagccgggcgtagtggcgggtgcctgtagtcccagctacccgggaggctgaggcaggagaatggcgtgaacccgggaggcggaggttgcagtgagccgagactgcgccactgcactccagcctgggcgacagagcgagactctgtctcaaaaaaaataaaaaataaataaaataaataaatttagccaggtgtggtggcctgcgcctataatcccaggtagtcgggaggctgagcccaggagttcgaggctgcagtgagctatgatcacaccactgcactccagcctgggcagcagagcaagaagaccctgtctcaacaaaacaaaaacaacacatgaggaaactaagtccagaagcaggagagctaggacccgaggatccaggtgtctcactaccaccggtcagccaagtacaggcacttcctgggcctctgcgccccggggccgaggtttagaatctctctgaggtcagggccagcttcatgtgctgcagcagcgcaggtgacggtgcctcgaccagcggccgttacggcccctgccctggggcgctgggacttaagcctggagatcgtggaagcctccaactccagcacagggggggcccgcactccttggtgcctccgcagtcttcgaacagacggggaaactgaggccctaagaggcctaaagcctacacttccccgcggaatgcggcgggcgcgggcgggttaaaggggcggggccggcgctggcccagcccgcggctccccccagcgccctcgccccggcgctccctagcccggcgcggcccggcagcgagagcggcgccatggaggccaccggggtgctgccgttcgtgcgtggcgtggacctcagcggcaacgacttcaaggtgagccgggccgggcgcgtgccgggcctccctgcaggccttctcttccgcccggcccgcttggcctccgcttcctgtcccgctcggctccaggccctgcgtgtcccagggactgcggccggggcggggtggggctctcccctggccaggaatggacctccgaggcctccgcccagtgcctgtacggggagaccgaggctgggcaggccggggacggacgcttgggctcggagtcccgccgggggcccggccgggagcccccaccccgcgtccgtgttctcggtctaggctggatggtggcctggggatcgggcgagcctccccgcccctctgaggtcacacgcccaagccaggccctgactcagggatggctgcccggctgcccaggggcgggtgtggagccgactcatcactgccctctccccgccaccgccacccgccatactgtgtgatcctgggcctctcagatcacttcccctctcagagcctaggctttctcagccggtgaaggggcttaaaagtctcctccttggacgcaaggagtatagtgagatttgttggtgtggagagtgtgtcaggccggtgtgccaggtgctgggtggcagttgtctgagcagctgctggactgagagaaaagggaccggagcccagccctccgcagccagtgggtggggcggcggggtggttccaggactcaagaatgagacaggcattgcctgaccaaaggggaagcagagaaagagagggagggagagctggctggagggtcagcctcaccttcagggtgggtgactggcagggtcggcctgggttgttggtctggggctggggccgaggaggcaggtttttcctgcgtttacctgcctgtgtacacacctttgaccccaagtacaagtggctacaccacttttccctgaccccatccccaccaccctaacctggggtccccgttcctctttgctgaactgggagagtccgagtcaccagctgggaatgtggcgctagggggaaaggaatatcagccgcaggcactgaaggcacctactgccccagacttggtgccacaagggctggaggtgccgaggtgggcgttcacacaccaggggagtgcagtgatgctggcctgccctgcagggtggggagccacggtctccgcaagcaagggtttgaccctggccgtgagttgccagtgtgctgatggcaggatgagggcacaggtggcgcctttgcaaaggcttggaagggggatcccccaccccaggcagccagtcagagtgtggaatgctaggtgaaggaatttgagccgagctaaccacagagccggatgctgggctttcacctgaaacaagccagttttgtcctggccctcctggggcccagaatccagtaggagagacaaatcttaggccaacacttttgtcacgggggggcttaaaattcccattctatgggtgaagaaattgaggcacaatgatgaaatgacttgtctgtgttctcacagatggtgagagttggttctgtggctccccaaaggctcccatgggctggaggagccatagaaggtggtgagcaggggctctgtgcttcaccttgacatccttcccccagggcggctacttccctgagaatgtcaaggccatgaccagcctgcggtggctgaagctgaaccgcactggcctctgctacctgcccgaggagctggccgccctgcagaagctggtaagggggtttgggcgggcaggggagggtccctgtggatgagccaggtgggcagagcctgtggagaaggcagacaacttctccagagagaggaacaccgacagctatgagcagagctggaagaaagggagtgggcaccctgtccagggaggtgtgcaagaagaggccgggtgagtgagggagggaagctgcaggggtagttgggccagtgtggctgaggccttcctggatggtgcagagttgtggaggcaggcagggactctggacaccccacccaccctgctgagcctgtgctccccattccggcccaggaacacttgtctgtgagccacaacaacctgaccacgcttcatggggagctgtccagcctgccatcgctgcgcgtgagtgctggccgggaggccaccgagcttggggttggggccaaggtccggtcagggacgtgaagcctgggctagacaccaagctgggccagcatttctgcccacctccgtgtcaggctcagaggctcaggtgtcacagaggggccctctcattagaggttacagcagtgccctgtgtaaagtaacccatgtggatcagagaattccatcaggaaaaaggtaaagaaatccaaaatcttaccagccgttatggacaataactacagtaataatagccaagactggctgagcaatgttcccactattctgttaggattttttcatatgctctagccctccactaatgttgcagaagagaaacttggccaccaaggcagattacttgccccaggtcacagagccaggcagtggtagagctggtgttgagtggggtttggccgggagcaccgtgtaccttctacccaagacttgaacgtcccagaacatcaggcccttggccagaccctgtaggcctcaacgagggccatcccatctgaagtcagagccctggagatgtttagggcacagcttctgacttggactctctgagttcaaagctgggctttgccacttcctggtgatgtgactttgtacaaatcgcttctaccttctgggcctcctctgcaagtgcagtggttgggaggggcagcagtgaccccgtgaagcagcagcagggtgccgcacaggcattcagactggagaagtggcggggcagctccggtgactcccgttgtcacttggagtcacgacaccattctctggccctgttccctcatgctcaagctttctgcatgtctgtaaggtatgaggaggtgtcagtcttaagttagggagagaaagcagacttcctctccatccagattctgatttctctgtggtccacttctctccctctgttctgaaaaccctgactcagaccttacccctatctcaccttctggaattaagaagaagagaaatggtttgaacagaaaaggttccctgagggccctgtgctggggctccggggcacatttgagctgggctttgaggcatgaataggagctcactgggaggctaggaagagcgctccaggagagggagctatttgatcaaaggccagaggtgagagagtcctcaggcctggcctctggtgagctgcctgaggaggtgtccctctctagactctgttccttcctgagagtggaagccaggaattatagactcttatggtttattcccaggccatcgtggcccgagccaacagtctgaagaattccggagtccccgatgacatcttcaagctagatgatctctcagtcctggtcagtggctacccactcacctggcccctgtgctagccggaccattcaatccccactcactataaaagtccctggggccattgttatcccattttgcagatgggaaaactgagtcttggagtggataataccttgcctgaggtcacttttggagtcagatccctaacacaggcactcttcctcccaagtccctggctgtctccctttggccctgaagccccctcatctacccccacacccaactcagtgccctgcctgatccccaagcttggcagacgcctggtggggaggagactcccctgacctgggtcttgccccttctacccaggacttgagccacaaccagctgacagagtgcccgcgggagctggagaacgccaagaacatgctggtgctgaacctcagccacaacaggtgccaggccagtggggggcagggggcaggtgggccctgtggggtggctggtgctgactcaggtggctcctgctccccacccgtagcatcgacaccatccccaaccagctcttcatcaacctcactgacctactatacctggacctcagcgagaaccgcctggagagcctgcccccgcag

SEQ ID NO: 96726 - DNA, 114816 bp, Homo sapiens
atacacctgcctaggcctcccaaagtgctgtgattacaggcatgagccaccacacccggcccaagaatatttgctttgagcttgctgtcatggtaggaagccggcatcagctaaattttactaacgtgctacctgatttgagggatcagcagtatgagtaggtgatggaaacagctgcctacatactacttaaaaccttccagccagaaaaatatctccctgcacctgtctggcataaaacctaagtcaagttgcaactcattcctctcgttctgttttccctttttctataaaattcaggtaaaatgtatgcatttctccaaacttaattgctattctaaaaagaagaggtagctttcctcttccctacttttctcatctacaaacttctaggctactatcttttgtcttttctatatttgaacttttctaaacaaaccacaagggtgctaatggtgataatatatctggatagtgagatacggtatttttaaatgttcaaatcttataaaataaacatatgccgatttttcaagagtaatataggagctatttaaaaataatagacttctggccagacgcagtggctcatgtctgtaatcccagcactttgggaggctgaggagaatggatcacttgaggccagaagttcgagaccagcctggttaccatggtgaaaccccatctctactaaaaacacaaacattacccgggtatggtagcaggtgcctgcagtctcagctactgggaaggctgaggcagaagaatcccttgagcctgggaggcagaggttgcagtgtgctgagatggtgtcaatgcactccagcctgggcaacagagtgagactctacctcaaaatactaataatattaacaatagacttctttaaaacaagtaatatcaaatagcatactagagcattgttatcaatgtgtcacttcagcatcaattgttaagtgccttgtattatattcgtatcacttaagatttgacatgtagtatatataataatacgacattcactaattatgctagggaaatgttacagtaatactatgaaagctattaatttctactcctagaggtggcagagagaaaatatattagttccatataggtaagacaatatctgtttcatacagtcatacccacagtgcttagcatggtgcctatcataatatagatgtccaataaatatttgttaagtgaacaaactgttaaagaatatttatagggactagcactatattctcataaaaatggacaaaatatgaattgagccatctctctattgtcagtaaatacagaggtgggatactcacaggcataactacactatacagataaagtagttttggggggccgagggtgctgcctctatggataggcaaacctgggttctcacctaagaactggaaaatggagatcattatgatttgctatccattaaggcctcccactcagaagaacacacagttttaaaaggaacgcatttatcccatctcaaatttttggtgtatcttttttttttttttctctaaagcataacaagcttgtcagagtttccatggtgagcacagggcaccatggaaactgatagatttagctacatgaaaagaataaataaaataggcaggcatttatttcactgtacaatgacaacttctctcctagataagagaggaaamgtggcctctcatttaaactgcttccctgcactctctgtacctcatgaaaacctgagttattttcgatagcccattctactgacctacgctgattggattcctgtttttctcaaggcccattattccctttagttttactgcaggctagatctgagtgtcaccagcaactgttggaaaaccatgtacaatgtgaaagttgtagatgacagcccacagtgcagtggccaagtgagtcatggcaaaactgaatgaacaattcctgggagtttactgtgatgagacaatgtatgagaacaactggactcaagatccaagtccatcctatattaactgcacaggcaagccaacctccctgaaccccagtttccccatctgtggaatgtttaaaatacatcctcttcctattttatagggttgttgagaggctcaaaattagataatagaggagaaagccttttcaaacagtcaggttctatctagcaaaaaggactgactgactaagctacaggtataattacattcatgagatgagcaaaatgtcaaagctaatcatgctatggtctaggttttggcctcaggcaattggaggtttagaacacgatgatcccaccccagtagttggggaatttgggggctacttggctccatctgaaatagagaaaattgagattgtaagaaatgaagctttaaaatttttctctatgtctgaacattctcataaaatgttggaaaactaaataaatgaaataaaactcatccttaagttctagtcccaatgaattgttcaccattagcagacacccactatagcctcttaatttttatgactaaaatataggcactagagccatctcctgcaattcaatattcatataaatctattgagcacctcctagtgaccagggactgtgttaaggggatggatacacagaaagaaagaggacatggtccttcagaaaaacacatcttctttggggtatagatgagtaatggaacaattacagcacacccacaaactcaggggaggaacacttaacactctagagcagaaatgtaaagatatcctggataaaggtgagggggggttgggggttgggggagtgggtgggacaatgaggcagacatggtgtaaggtggtaaaagggcaccacaggcagagagaagagtgtgagcaaagcggattcatagcatatgggagagtggaggtagccaagcctgaagaagcagccagggaatattccatgccaaggcggggctctttttttctgaaggaagtgatatgtgggggtggagcactaatgatgcttgggctgtattttgagggtgaatatgaaagctctgtactccctctttcctccaaacctctgtagccaggagaatatttccctggggataccagaatgggagtcaaaattgcaggaggaccagcaatttaaaggagttgccacctccgagagtggagtctcaccctgttgcccacgctggagtgcagtggttcaatcctggctcactgcaatctctgcctcccgggttcaagcgattctcctgcttcagcctccctagtagctgggactacaggtgtgcgccaccacacttggataattttttatatttttggtagagacggggtttcaccatgttgactaggctggtctcgaactcctcacctcaagtgatccgccctcctcagcctcccaaagtgctgggattacagtcatgagccaccatgcctggctgggaagccaagacttctggcatgtggctgagccatgctgcctggcagtatagcacccagggcttctggatcctgggcccaggtacctacaacttgactgggaatggaagtggaactatgcattgctcaaaagagctaaaatttacctgaggagcactaatgccatgtcacctggaggttcatggccaatccttctgcttaagacgattaatttctttaaaagcatcataatgattattcatcctataaaccacatagtaacaacattaaaaaaatcaaaacaaaattctctacctagcaattccattatctcaacagaacaacacacattgtttgatgtaccttttcaattccagcaaatatgcttatagcttttcatggttttcatcgtagcatagaagctgttttttgtttgtttgttttgttttgtttttttgagaccgagtcttggtctgtcaccaggctggaatgcagtggcgtgatctcagctcactgcaacctccgcctccggggttcaagcaattttcctgcctcaccctcctgagtagctgggactacaggcacgcatcaccacacccagctaatttttgtatttttagtagagatggggtttcaccatgttggccaggatagtctcaatctcgacctcgtgatccacccgcctcggcctcccaaagtgttgggattacaggcgtgagccatcgtgcccagccagaagccatttttgaaagcttaacattgtggctatatatttctcctgttgtttttaataactgtataatgttctatcaagtagatatattctagttcataaaactagtctctattttttttttttgacatttaggttttcattaaaacctaatcatcaaaaaaattattaaccgtatctgttttaggaaagtaatacatctgttggaaacatctgattgaatcctatctcaaaagccattttcttcacctttctgtctgaggtttttgtgtatacaagggaatgttttcagtgtgctggctgtcggtactgccaggagggagtgcagttggcagaatcaggagaaagtgacaaggagcagggacaagtgtaatgacctcagctgcagagattcctaattctggatccctggtagggtgatcaaccatctgtgtgcatggttctgacggttttcctgaacggcctttcagtgctaaaaccaggaaagtgcctggtaaaccaggatttgttggtcaccttagacattggttatgggggagctgaaggaactgagaagggaacgaatcatttctataagccagccctgtgtcttaaaagcagcaattcagagaaaaactgctcacacactgcaatgaaaccctcaccctttatgtagttgtcaaaatagttatttgtctcaggttatggctctgctcacagaaaaaccatccattcatttattcaataaacatgtatggaacaccggcattgttctaggcataagacacattccctgctcctgtggtgcttctgttattggtgtgtgtatgtgtgtgtgtgtgtgtgtgtgtgtgtgtgtgtgtattggtgagagggaaacaggagtaaactaaaaaacacaaaataaagaagaatggacacaataaatgcaatggcagaaacaagatggattagtggagtagaaactgctgggagtccggtgccacttggtggtcaggaaaggtgactccgaagagcctgacatttgagacaaatcagtggtgagaagagctgccaagtaaagcgccacaagagggattaggggcagaaggaacagcacgttagagggccctgaatggaagccagctgggtttcatggaggaacttagtgaaggaccctgtggtcattgtgtagggtgggaacgctgaccctagttatgacccagtccaagctccattttcataagtggggatgataagcacactgaggcccacgtgtcttgtccacagtctcttgattcccaattcagcacccatggtaccattgctgcctatttgacttgagaacttaattttctccctttgtacaactggaagtaaataaaagagattcattcattttacacgagaaaaattggtattggaattgtttgcggacaaacacaagaaccaaaaacattagcctcaaggtgaagagaggaaccttggcgtccacaatgacacccagtttaggggtccccagagatgttcggtaagacatgcttccagaaccttccaggtgaggaccaatactaattctgcagtctacataaactaaaaatgaaactggtcataaggtaggcagccccagctgacctttcacctgtgcctgaactaatgcaagtacaggacctgagtgctacaggttgaagaagtaagtgatcctaggagttgaagggtcagaggagccaggctgacacaactcatagaaggtggaggaagctgatcttctgagcctcagctgtggttgatcttgataactcaaagagttaacacaaccaaaactaacgcaagggtggagagaaagaccacaccccacgggagcgcggagccaactcgcgggagaaaaatcctattggcattgaggaggtagggagccagcccctgggcgcggcctgcagggtaccggcaaccgcccgggtaagcgggggcaggacaaggccggagcctgtgtccgcccggcagccgcccgcagctgcagagagtcccgctgcgtctccgccgcgtgcgccctcctcgaccagcagacccgcgctgcgctccgccgctgacatgtgtgccgctcagatgccgcccctggcgcacatcttccgagggacgttcgtccactccacctggacctgccccatggaggtgctgcgggatcacctcctcggcgtgagcgacagcggcaaagtaagcaggcgcggggtcgagcgcactcsgacgggcgggaggataggtgcaaggaacctggcgcggtgcttcgcgtagccyggggttcgctcggtgcgcagtgagcgccgcggctccggagttgaacttgagtctttggctcttgggcaacgcagagagaaccctggcgctaggttcgtgggctggctggggagttcccagaagtcgggagcagtggcgtgctaacgccacaactggctsgacagcagtccgggctgcggtagagccgggagcaaggatgtcaccccccgctcccccgccccccgttccaatcctaagataccggcaataatcttcaatcttgcttaaatcatctttgtttccaacacctagcactgtgcctggcacaggaggctctccataaatgtggttgaatttattgtgaaagaaataagaggagggggtcatttgattgatgttgtttagcgtgtccagaacatagaataaatagaactgattacattcaccctatcattcaacagagataatatactaacgatgaaggttccacaacttgtaatactagaagggatggtccgaaagaaataattcatccatctcttttccttcctctctctctcttatacacacacgcgtacacacacacacacacacgcacgcacacacacacacacaccatagccatttgcatcaaagcaagcagttccattttaaggttcaaaatgtcttctttgaatgtatcttttacacttccttttccaaaatcaggatttctacaaatgacacaggtaacttgatgtctactatttactgttccatacacacatatagtgactatatcagccatggcctggcaagtttgataagtgaagccattccattttttagaacaaaaaaatgataaaataaatatggagatgggattttttgagctgttttccaactactggtttggttagcaaaagtacacatacttgtgatttgtcaagttgaagatactattcttgactaagatgctaccgagtcggtgacagttttgaatcgtgactcttacatttgggggtaactaaacactgttttctcatggtgctttaaaaaatactctttctatgcacgttcagggagcctgctgttgtgtttccaaggtgataaaactctcagagctctcccagggagattccrgtaaaccctgagactgatgaacccatgcttggggacttggtcctcaagtttcagggaactcaggtttggggcaagtcccaggaagcaaaggaacggagattgctaaactggtgtaagattagaggtgttattttaatcacaagaagctgttcaactcttgggtttcttttttaaaaattaatttcccatatccagaattgtaattggtagggtaacaggcaactggttttaccagtggagaggaataagaaaaggaagtaataaaaataccttttctggtgcttgtacagaagaagaataaaagagtttcccaaacacacaattagtagttgagtcagggagtctattcctcactaaaaatcatactgaagttataaatttagaaaacatgcccttcccccacaagacaaaatgacttaggaattgaatacaaaggtgagttagtcagtggctggaatgtatggtacagagctcctgaaccagtggattgctaactgttgctctcctctcctcctaggtgcaaggcagttgatacctggctgtgtttaaagagagagcatgccatacatatttcaaaacttgacatcccccatttcaaaatggagagtatcttacttttagagttgctgggataaatatattatttatttaaacatttcaaggttcaaaaaagaaaataatacgcctttggaatacagaaatatgttgaattattatgatctgtaattttttttttggtttttttttgtttgtttttttttgagatggagtctcgctctgtcacccaggctggagtgtagtggcttgatcttggctcactgcaagctctgcctcccgggttcatgccattctcctgcctcagcctcccgagtagctgggactacaggcgccaccacgccccactgatttttttgtattttaagtagagttggggtttcaatgtgttaacaggatggtcttgatctcctgacctcgtgatccccctgcctcggcctcccaaagtgctgggattacaggcgtgagccaccgcgccggccaatgatctgtaaatttttactcctaaatttttaggagctcaaaccttgcaatgaatcagaaatatctaggggtgcttgataatatgctgatttctgggcatcatcctcagagactctgaatctatagacctggggtaggccccagaaagtggcattccaacaagcatcccaggagattcagacgcaggtagcgggtggattatagcagcgggtggattacattttgaataactgtaacacatagtttctgtgatgggacaagctgtgtgaagtatcaggagcttatttctccattgcaagtttagatctggggtagaatctcagcgagagggcacaaagcttactctgtccttctggtctcgcttttaaactttattccttattttgtataacttcgtttaggcccagagaatgccaatgactaactgctcttaatacattaaattaaagctcattcaaaagcaggttaattaaaagaaattatctagccaactttttggtataaagcaaaatacagagttatactttctgctcaagtagcatgtagcttttaagaatatagactctaatgattgccattctaactggtgtgagctgatatctcattgtggttttgatttgcatttctctgatggccagtgatgatgagcattttttcatgtgtcttttggctacataaatgtcttcttttgagaagtgtctgttcatatcctttgcccactttttgatggggttgtttgtttttttcttgtaaatttgtttgagttcattgtggattcttgatattagccctttgtcagatgagtaggttgtgaaaattttctcccattttgtaggttgcctgttcactctgatggtagtttcttttgctgtgcagaagctctttagtttaattagatcccatttgtcaattttggcttttgttgccatggcttttggtgttttagacatgaagtccttgcccatgcctatgtcctgaatggtaatgcctaggttttcttctagggtttttatggttttaggtctaacgtttaagtctttaatccatcttgaattaatttttgcataaggtgtaaggaagggatccagtttcagctttctacatatggctagccagttttcctagcaccatttattaaatagggaatcctttccccattgcttgtttttctcaggtttgtcaaagatcagatagttgtagataggcggcattatttctgagggctctgttctgttccattgrtgtatatctctgttttggtaccagtaccatgctgttttggttactgtagccttgtagtatagtttgaagtcaggtagcgtgatgcctccagctttgttcttttggcttaggattgacttggtgatgcgggctcttttttggttccatatgaactttaaagtagttttttccaattctgtgaagaaagtcattggtagcttgatggggagaaataggaatacttttacactgttggtgggactgtaaactagttcaaccattgtggaagtcagtgtggcgattcctcagggatctagaactagaaataccatttgacccagccatcccattactgggtatatacccaaaggactataaatcatgctgctataaagacacatgcacacgtatgtttattgtggcactattcacaatagcaaagacttggaaccaacccaaatgtccatcaatgatagactggattaagaaaatgtggcacatatacaccatggaatactatgcagccataaaaaatgatgagttcatgtcctttgtagggacatggatgaaattggaaactgtcgcaaggacaaaaaaccaaacactgcatgttctcactcatagatggaaattgaacaatgagaacacatggacacaggaaggggaacatcatactctggggactgttgtggggtggggggaggggggagggatagcattaggagatatacctaatgctaaatgacgagttaatgggtgcagcacaccagcatggcacatgtatacatatgtaactaacctgcacattgtgcacatgtaccctaaaacttaaagtataataaaaaaaaaatatagactctaacatgtttaattcatttgcaaatatttaatcttgaggtaatgcatgctcaaatattactaagttgcctgattcttcccacatacatcagggtcaggttgacagtaaagatgcataaacatgccttgggccttttaatgcacacttacccagaaacaagagtgaggaagagattcattttgaggttgtgtcctggggtggcaggagcaagtccaatggaggaatagagacttgggttcaggtcagagtctctaccacttacctgtgctgagaccacaggtgagacctaacctgcctgagcctccgtttcctcatttgtagagtcagatttccttttgctatttattaaatgagataatgtatgaaaatgcctggcacttagtggatacttaacatgtaccatgttcattctattccctttgcctcctagcaaatccttaacctcttgctcactgtgatattttgcatgttttcacatggtgacatgccaagtggtagagaaggaagccacggcctgtgatgaactgtatggggtggtcacagaaccttagctttttattctcactgcttatgtcattgatcccctgggacccaaagatgcaccctggaagaaagatcaagaagcatttggtgctagattcactagcaagctatctttagtatctcttttagacttgacaatgtcattatttccactaacagatgaggaagttgagacttgagaagtcrtgcattcagatacggtggtggtgtagctggattttgaattagtatggggcaaaggccatgttctctttactgtcgctgactgcttctctagggcacagtcctggacctcaaagaatctgcactttggcacgggagctaagacttgtagctgtaataaaagtgactcattcctgagccaaacactggggttttcaccggagataaattgatgaacaaagtatgcaaatactgccctgccctcttgaaactgatgatctagtaataaattaacagaatctgccatgacctatcagaacttgaactagttaggggaaggctttccctagcgtgaagtgacatcaaacttgcgatgtgaacaatgagaagttaagtaggtatattagtcaattttcacattggtgacaaaaacaacctgagactgggaagaaaaagaggtttaattggacttacagttccacatgactggggagcctcagaatcatggcaggaggtgaaagacacttcttacatggcggcagcaagagagaatgaggaagatgaaaaagcggaaactcctgataaacccatcagatctcgtgagacttattcactaccatgagaacagtatgggggaaactgcccccatgattcaagttatcgcccactgggttcctcccacaacatgtgggaattaggggagtacaattcaagatgagatttggatggaggcacatccaaaccataccaataggtaaggtggacagcattggaagtaaagaagagccttctaggttgagagaactgcctgtgactgcctgtgcaaaggtcctggggtaggaaggaatgaaacagtcaaggtagtcagagtccaaaggttgaggagaaggctaacacaggataaggcaggacaggtaggcagggctatgttatggagggcatcggggatggtgggattgtgtcatgattatattttgtggttataaaggtctaacttcaggataaatgcattgaagagaagttgagtgcaggcaaggaggtcagataggagcctgttgcagtatttaggtaaaatggaatgtggtttagatgagagaggcagtgtagttatcaactgagatatgaactcctaagagtacctctatcacttattacctatgtgaatttgatcaagttccttaccatttgtatctccaaatttctttatgcataaaataattactatggtctacctaatagggttgttgaaaggataaaatggattagtaagtgtaaaatatatagaataatgcctggcatgtagtacatgtccattagacttcagcggttattgtcagtaatgcagatggagaggtggatagaatcagtagctatttagatcaagttgactggatttgatgatagcttacatatgtaaggttggaaggtaagtgcatcaagagtgatcgcaaaatgtatgtaaatgtgtgtaaatagtacagtggggcacaagttgaccagtgataggaaaagcttcttgaaggaagtagtagctgaattggaccttttaggactggaacatgcaaaagaggattatatagccctggtgaaaagagtgacccaatgttcttcagttctgaagactgctgggaggaggaagagttctttctcacctgaggctactttaccagaagttctctcagtctaaatcacaaatcctagtgattgtgtatcatcctttcctccacttcctgccaagctcagcaactcaaaatatgctgttggtcctgagaaaggaaactgggctaatcccttccttctgaggctgctgaataggagcttggctttcatcagaaagatgcttkcactcccaattattacaagatcatcttgcaaattcccattttctagaaggctgattgcttgttcagaatgctcatggcaaacactgttggttacccactcagcagtcatgacctctttttccttattaacacctgaatttgatcagtccatggtagactcagcctgtggatacatcatggtgtaagccagtcatggtaatcctatctccatttatcagatacttattcttccagcttcctggtagctgagggtgactagtgataatattctgacatacaggaagtttgctcagaagcttctaggatgtgggaagagaagccctgccttttttggatactctcatatgaagaaaagatacttggaactgctgctgccaccatgtgagactgtgaggaaaaggttaaggggatttcagagacaccatcccattttctaacatcactgagcagttgaactacccctacctggaactgtctactatcagacttctagacttccttttttttttttttttttttttttttgagatggagtttcactcttgttgcctaggctggggtgcagtggcrcgatcttagctcactgcaacatccgcctcctgggttcaagcgattctcctgcctcagcctcccgaggaggtgggattacgggcactcaccaccatgcccagctaattttttgtatttttagtagagatggggtttcgccatgttgggcaggctggtcttgaactcctgacctcaggtgatccacccaccttggcctcccaaagtgttgggattacaggcgtgagccacggtagccagcccagacttcttttgtgagatatgaaatgtctttattgtctaaatctctgttagttgggtactgttcattgcagcccaatgcaccctcattactacactgcttttcaatgaacaatattttacactttacaagaataactaccttctccttcttctccttactggcctttccaggcacccatatcaatagtcaagcccagccaattttcctctgggatttctgtgtgcatattcacttccattgcccccatctaccctttagtgtctctgagctaaaatataacaggagacccttaactgttttctctcattctagtatttcccccacattactgaaaactcttttcttggaccatgggtagtatcatgtatctactcttctataaccatctatggctcactattgcctctaagtttcaaatgtcctggaagatgttctaggcatgacattatttggccccaacctgttctctaattctttctgttgcttcatttatctgtctggcaagtgggaataggattaccatgactgatttacaccatattgtatccatgagccaagggatgtctatccatgcaaatttctccctgttttccagcacatcatgtccttttatgcctccacattgttggcaccaatttctttgcctggaatagtcctcctttttatatccccatttccattttacttctatcaaaatgaaatcttgctcttcctttaaggcccagctctgatcttctctttttcacaaaggctttcacaaaggctttattcccaagttgaaataaattgccccttcctctgttcttccataaaatttttcatatatttcaaatcagtattttacaggtagttaagaacatggtttctagagtcagattatgtgaattcaratcaaaactctgctacttactaggacaaattttctgacatagctgaacctcagcatcctcatttaaaaatgtggattaaggctgggtacagtggcccgcacctgtaatcctagcactttgggaggccgaggtgggctcatcacgaggtcaggagatcgagaccatcctggctaacatggtgaaactccatctctactaaaaatacaaaaaattagctgggtgtggtggcaggcgcctatagtcccagctactcgggaggctgaggcaggagaatcccttgaacccgggaggcagagcttgcagtgagctgagatcatgccactgcactccagcctgggcaacaagagcgaaactccgtctccaaaaaaaaaaaaaatgtggattaatagcaccttgatagagttgtgaggcaagtgagatagtgtgttgttattatttttctttctctgaagtagttattccaatttgcctttgattatacttagctttatagaatgttctcactcactgaaatgatttaaagtttttggaaaaagagagatgaactggagaaaaggtaacacttactaagtcatactgtatttcagacagtctgccaaatcccttacaaatcaacaaccttgagacaaggtaaggacaccatcatcatcatcatcatcatcatcatcatcatctctactttacaaatgaggaaacggaggctcggagagttacttggctgcagtcacagcaaataagtggcaaaggcaagactcagagccatgcctgtctgatgtccaaggtccgtgctctccaggagtctctgctgtcttctgtcatggagagggccaaaactctattgtcctaaggccccttcaacatttcatgttgttttagcacaaagtaggtggtcagtaaagtgtgttgaatgtgatgtgtaatacaaaaacgaggcaggcagatcacaagctcaggagttcaagaccagcctggccaacatggtgaaaccccgtctctactaaaaatacaaaaattagccaggcatgatggcaggtgcctgtaatcccagctactcaggaggctgagggggaagaactgcttgaamccaggaggtggaggttgcagtgagccgaaattgtgccactgcactccagcctgggtgacagagtgagactccgtctcaaaaaaagaaaaagagaaaaaaaaatgagtgatagaacaaacctttctcagcaaaccccaccttaaaacccaactgtgtcaatatgagtttatttacagcccattgattcatgaattaaaaaaaaattgaaggccaaagcaatcacaaggtaattataatttaaagtgagttattctaaacttacatataatgatataagaattttaaaattccaagattctccagaagcttaaatggaaaaataaagtgcatcataatcatacattccccaccctcacacatgcacacccttatacactcatcaacaaaacacagttctggaagaagatattaaaataaaaacttaaataattacttttgtagattgggaatggagatttggagctatggaggataatttttatttttgtattgctagtttttwaaatttttgtcttgcttttataatttaaaaccaatttattttattttaaaatttgtattctttttcttaattgcagtaaaaaatgcataacttaaaattcaccattttaaagtatatgattcagtggcatttattgtattcagaatattgtacaactaccaccacactgaccatgatctagttcaagaatatattcatcagccgggcgcggtggctcatgcctataatcccagcactttcggaggccgaggcgggcggatcatgaggtcaggagatcgagaccatcctggccaacacggtaaaaccccgtctctactaaaaacaagaaaatatgaaaaaaaattagctgggcatggtggcgggcgcctgtagtcctagctactcggaagctgaggcaggagaatggccgaaacccgggaggcggagcttgcagtgagccgagatagcgctactgcactccagcctgggcaacagaacgagactctgtctcaaacaaaataaaacaaaacaaatatatatatatattcatcaccccaaagggaaactcattgcccattaagcagtcactccttatttcctctcttcacctctgcaacaatcactaatctgctttctctatccacttgcctattctggatatttcggatagatggacacatataatacataaccttttgtgtctggctttttagacttagcataatgtttttaaagctcatccatgttgtggcatgtgtcacaattcattcctttttatggctgaataatagtccattgtgtagatataccacattttgtttatcctttcatcagttgatggacatttgagttgtttctgccctttggctatttgtcagcagtgctgctataaatatttcatgcacatgtttaaaaaagcagcyggttaaaaaaaatctttgtatggtttcccattgcctaaccgtgtgataaacccaggcctggccttgctgactgtttgcccaaccttccacgttgttaaattcctttgtgtctttgtccatgctcctttttcaccttccattcgctggatggatacacatttcaagactaaatttaggtgttacctcctcaatgaggtcattgctgacatagcttcctgccttccttccacaggcagagtgcagtggtacaatcttggctcactgcaatctccgcttcccaagttcaagcaattctccacccgccacctctcaagtagctgggactacaggtgtttgccactaattttttttttttttttgtatttttagtagagacaggatttcaccatgttggccaggccagtctcaaactcctgacctcaggtgatctgcccacctcggcctcccaaagtgctgggattataggcgtgagccaccgccccggcctgtgtcctactttctactcagtgcctccttacaactcttacttgatctcatgagtctccccaaaacctgagcttgaaggcaggttcacaactttatcacctttgtgttgacagcacttaacacatggtgggcactctgatgaatatttcttcaataactggtgcttggatttttttcaccacaggataaccaggttatcttccaaataaccagttgtttgaataagaactctggttttttctaatctagatgccaatgtatgtggttactgggagctgtaattagttttatgtcctggtgagtaattaagaaccctagaagagtacattttaattagaattctgagacctcatgaagttctcaaaggcctttaactctgactatgttaaggacttgcaataatgtagattataaaggcctgcttgcttcttttggttttgtattatggtttattaagtgtttgctttttcataagatggtaatttacttgaaatgttgcttgtaaatgccacttacaatttacagtcctggaacatggtagaccctccataagcaatagctcttgttatccatcgcctatccatcatagtactttacacagagcttttgcacaaaattagcattcaatgcatgcttttaaatgaaagaatgaatagaatgggtatatgctcttcacagagtagacaagaaatagttaatcaacattctcagatggttgtagccaatgtgcttgaagatgcaacacaagaagtaacatcgttggtgacttccacacactgatgcagagtttttctcctgagctatttaacctataaattgtttcctttcagcctgtgtagagtggtctcaggtaccctttaaccctttttggaaatgcaaaacacagaagccattcctggttcctagatgagtggggacacttgtgcctcctcaccttcctgcagagcgtggactcaatggtctgtggtgctactatgcttggagctcatgagagctgacaatagctgatggagagcaaggatctcaaggtcttagggataaaatggtaagcaaaagagatgcggttcctgccttatttgcactcggagtcaataatcaaattagtatggatcagtatacagtttctaaaaggaaaaaatgcagagtgctctggagatgcaaatcagaggacttggcttattttgaggagatgcttcaagaatgtaaccccaaagaagtcatgttggagctgagtctgaaggttaaatgggaattaactaggcagagagagggaggggaaaggcctatgcaaagacccagaggggaggaggaaccaggaaccaggtggcaaagaatggaggaggaggaggtggtggaactagatgagggcagagagaaacatagtcattcccgttagcccaagagccatggaaagcctacgaagggtgtcagaggaagataggtcagatttacaatttttttttttttttgagacagaatcttgctctgttgcccaggctggagtgcggtggcgtggtctcggcttactgcaagctccgcctcccgggttcacgccattctcctgcctcagcctccccagtagctgggactacaggcgcccgccaccacaaccagctaattttttgtatttttagtagagacagggtttcaccgtgctagccaggatggtctcgatctcctgacctcgtgatccgcccgcctcggcctcccaaagtgctgggattacaggcgtgagccaatgcgccctgacataggtcagatttacttctaaagaatatattaaaaataatttcagagtaaggagcagaatggagcagagcaagacttgctggaagagatgagttagaaaatgactgcagtggaccacaaaagagacaggtagatggtgatagacatggagagaaacagggagctctgtgagatgagaaggaggtaaatcaatgggatttgatgacaaaaatgggtacagaggaaagggaagagctttcctgggttttaggcttgtacaactggatggatatggtggctgtcactgagtttttgaagtcaaataaaacatagagacaaatctctgaaatgaaaacattttatttgggaagaaaaattgcaatttggggggcatgcacacagaccgactggccttcagtatgtcccatgaacaaagagaaagaagttttataaaaaagagaaatgttacatattgctctttgagaaagttcattggcattagtaaggtttgagggagctggcaagttttgattggtaagtgacagtaacaggtaaaattattcttttttttttttttggactgagtcttgctctgttgctcaggctggagtgcagtggcacgatctcggctcactgcaagctccacctcccgggttcacgccattctcctgcctcagcctccccagtagctgggactacaggtgcccgccaccatgcctggctaattttttgtatttttggtagagatggggtttcaccgtattagccaggatggtctccatctcctgaccttgtgatccacctgtgtgggcctcccaaagtgctgggattacaggcgtgagccaccatgcccggccaactattcttaaagtcacaggagattgtttcagcagctgttagataaaactgtttcaggtgcaggaggcagtttcaggtgcaggaggcagtttcagcagccaggcttgcatagaattacgttcttggagcaatgttttgttccctgagtgcttttactcctgacctctctgttttagttgggtatgacaagaatgacacatttgttgattaactttcacatagggaagagaagaagaggtccagccagggagggtggatccagaggtctgctttggtcatgctgagttgagatgcttttgtgacatctacatggagatttgaagcagatgttgacttgctggtctggagctcagaggagatatctgaacgggcgatataaaatgtagagtaaaggttgagaagacaacaggaactagactaattcctcttgttgagtttagagttaaagagaatgagtaggatgaggacaatccaaatatcagaggaagacaacgggagggtattgtcatagaaggcaagagatggggatacttcaagatggagggagcagtgcaggtgtcatgttactgagacataagaacaacactggaaaaatgtccagtggatttagaaacctcaggcaactgttgaccctaggaagcttatttcagcacagggagagggtggcaatcagcttgggttaggttttggaatgattggaagataaggacatgcagacagtaatcacagacaactcttttgagattaaaaaaatgtgtagtgttttatcatatgagaaaaataattgcttccaacagcaataaaatgtaaataagttacatacctgttattcccactgcttaagttatcagaggacttttatacaaacatttgcatttgtagcattctgaggaaaaaatgctctggctgggccgggcacrgtggctcacgcctgtaatcccagcactttgggaggctgagtcaggcagatcatgaggtcaggagatcgagaccatcctggctaacatggtgaaaccctgtctctactaaaaatacaaaaaaaaaaaaattagctgggcgtggtggcgggcgcctgtagtcccagctactttggaggctgaggcaggagaatggcgtgaaaccgggaggcggagcttgcagtgagccaasatccagccactgcactccagcctgggctacagagcaagactccatctcaaaaaaaaaaaaaaaatgctctggctgtcctctggtcttcaaatactttgcttaggtttctgtgaatctttaaatttcaggtgacttaagtgcacattcaatctactgaatcacaattcacttgtgctcatattcctgtatttgtatgatttttcccagccttcctgtattgtatggtgaataacttctttccaaggacgtttcaaaagttaagaaagcatgctgctgttgcccatttacaaatatttaatttcaaaggatgccaaagcattggcaaatatatgtgtcagagcttagagttagttgcagccttcttaataatcattttactattttatttcagaaatataatctagcatttcagcgtcactggaaatcttggtaggtagtcagtatttttgtttggaagtacaggataccagcagtgaaacacttcattttattaacgtcaagcaagtaaggcattattttcctataaatgtgaggttgtttgaaatgaaaacaaacaaaaccaggtaagacgatagaagcagatgttttctctgtttaaaaatgcggttggtatgtgaggtatgtgtagggaatggctaaaaagaaaataaaaataaaatttaaaatgcaatttgggttgggcatggtgtctgatgcctgtaatcccagcactgtgggaggccgaggtgggcggatcatcggagatcaggagttcaagaccagcctggccaacatggtgaaaccccgtctctactaaaaatacaaaaattagccgggcatgatggcaggtgcctgtaatcccagctacttgggaggctgaggggggagaactgctcgaatccgggaggtggaggttgcagtgagctgagatcatgccattgcactccagcctgggtgacagagcaagactctgtctcaaaaaaaaaaaaaacaacaaaaaatgcggcttgttcctagttaagcattttaagatttcccccttccccaagggaagagagaaaatcttacccctccttctgttcttcccttctgggtgaatgactgtacaatgaagatttaatctagttgagaaaaacaacacataggtgactcacatacaacctttgtatgtatgaatggaggcttgtataatcatttgtttttcactgtcctgacaatcaagtgggaatgagaaaaataagatttatgctagatttatttcagttgcaattagaaggaaaactatccctgtgatctagacaggattggatgtttcaaaagtgccaaatcattgagcagatagagaaagtgagaagacaataagggaacaagatttggaaaggaaatgatttaacagttacgccagtgtcctcactcatatgcaggagttgaaaaagttgatcttatggagatagaaagcagaatgatagataccagagactgggaaggatgtgtgggtggggtgggggtgggggaatgaagagaggttagtcagtgggtagaagggcagctagatagaagttatcaacaacgtattctacatttcaaagtagctagaagacagaacttgaaatgttcccaacacatagaaataataaatactcaagatgagggatcaaataccctgacttgatcattacatattctatgcatgtaacaaatatcacatgtaccctataaatatgtaatatattatttataagtaaagaaacttaaaaatgtaattgtgccaatataaacttatgtatcaatttatatttgttcatgtcttttgacttctccacctttttgttcacactcttaatgcccttactctcttttctcgcctatatttaccatactcatcatttcctctagaaacaccttggttattctgtcctcaccaatttcctttttctcagagttttcatagatcagtccataatgccaatttggtgcttagaaacatatcattgtgcattgttctcgatttttcataggcagtaaattttattttctctaccagaaactaaattcttgacaggcaaagatgattttgaaactgacccaatagttccatagacaggtttttgttgttgttgttgttctgtttgtttgtttgtttttggataaacatagaaattgacgcttttggtcttaaagcctgaaacttacatttgttttatttgagttccttgtttaggaaatgacccccaggcctctcaaaagtatcaaagaactgaaactaaccagatattgcatccagacaatgaaatgccaggcctctcattcatcatgattgcttccttaacccctctggagttcctgttttctcatacctttcttccctgctatataaacccctcattttagtccatcagggagatagatttgagactgatctcccatctccttagctgcagcacctgattaaagccttcttccttgccaataatcgttgtctcagtggtgtttcggtaacaacttcttatatatttacctgaacccttagcagtttgatgagcatacatttaagaaataaaggattccttgaattgttatcagttgaaatgctgcatttctgaacatggcaaaaagtggtctaagaagcatagcttaagcaactttctgtccaccactggtttttctgcgcccagcctctgcctgcaatgtgtgattggcatacagcctctcacaggccctcagaatgtacaggtctaactttcacaaatgaacctggaagataatttgtaattttgtggaggtgtgtgttcaagagcagcacattggtgtgctaatcagtatcccttcaccagccagtgagccttgctgctcatcagcatcaatacctcagtgtaatgtcttgcccttatcatacatgcagaaactctcaagaagtagttgaaaaacaatcaaagcttagcattttagtaaaatgttacagtggttttgagaaaattgctgaccaaaggaagatgtgcacctatcaaagtagtaaatttttactagtgttgctgctgccataggctataagctccctgagagcagggattaggtcttactcacatcattccctagtgctggggtacatcacctgggagatagaatgtgctcagcatatatttgaggaatggctaaataaggaaatgattatttctaataaaaggaaaagattgggcagggtgaggtagcttgtgtctgtaatcccagcagattgggaggccaaagcaggaggatcacttgagcccaggagtttgagaccagcctgggcaacacagggagatccctctgtacaaaacaaacaaaaaaacacgagctgggcatagtggtgcgtgcctgtggtcccagctacgcaggaggcttaggtagagtacagcttgagcccaggaagctgcagtgaattgtgattgcaccactgcactccaaactgggcaacacactgagactttgtcttttttttttttttttttttttgagatagagtctcgctctcttgctgaggctggagtgcagtgatacgatctcagctcactgcaacctcttccttccaggttcaaatgattcttgtgtctcaaccacccaagtagctgggattacaggcatgcaccaccatgcccagctaatttttgtatttttagtagagttggttttgccatgttggccaggctggtctcagtctcctggctttaagtgatctgcccaccttggcctcccaaagtgctgataccctgtcttcaaacaaacaaatgaagaatgtatagcacttactatgtgccaggcactgctctaaatcttttacatatattaactcatttaatcattgcaacaaccctataaattaactattctttatctctatttttcagatgaggaaactgtgtcaccaacagtttgagtgccttgttgaaggtcacatagctggttactggtagagttatgatttataatccacatggtctgactttacatttaacagctctcatatggaataaattaaatgctatactgctattcagatatgtgggaagacatgaaagcctcaagatatagtcaccagcctctgttacaagcttgttgtttgtttttgcttttggctttttgtcttgccacggcaaactcctaagggattctggtaatttgttagcaaactttctaaacccttccaagactgccaaattgctaattcttaagcagttttcattgacactattacattgtttcatgtcagggctttagaagcaggtgaaatagatattggttttgggaagtgggggaaagctgactagtaattgatgaatggctagcatytttatacaggagaggaatttgcaaggcaagtaggtgggcttgttctgagtttcttttgttagtttcaggagttaggcttgttgaattaagtaaataaagctcacaatgtgctgatcatgtgaaacctaatgccaagtctatttctgagccactgtgaagaggacatagataaacaaggagggaggagtgtcaagtcacacaaaatatttcttactggacttggattttattttttaaatctattcttttggaaatagagccatgatctaacttaatgtggctactctgaatgcatgctttctccatgtccactctaatttctttgcaggttcgtataaattttgtaagtaggctttgtaaatcaaactgtggactaaatatcctggtgcgactctcaaattgctctctcaaattgcaggcacaaagtcttggaagttctgttgggcagaaacaaactggaccaacattttgcgtttctgttatcatccaacttcctatatgcagtcaatctgataacaaacaagctaatgagctcacactagaattagaaattataaaacatttggttttccaggggaactgggaatggttttgtaattaatgtgtcagaaggaaaactgaagcaaagaagttttcaattgcaccatatatgacagacaaaaaatgaaattaaatgcatccttcagctctgaggacagataatggtcctctgtatctaagcgtccaggaggaggtgttctctctattccatacatctgtgtcccagtgaccaaatgcaatgaagagagacaacttgtaaattaaacaaacacaatggggcataaagatttttcccctttaatattacgggatatgacaaagaagatcattttctggttgccgtaaaaatacaacagtaaagttgaattagacccgcagatttgattaatgaatgctgtgcttatgaaaacacataattattcctgagctcttggaatgaaccaagtgcggtagcttctggggcacttgtgcatattacttttaaagatagaatcctgcttggcaaaaatggctctcccagttctatataaaagatacagcaagaagcagtgaatgtatatatagacaaagagaaaaataaagctcatagctgtcttcataccagtatagatctttcttagcacataactagatttttgtggattttacaagttaaataatgtgaaaaatatatttgggcacaagccgggatcgctgagctatataaaagggattctatcactcagagagttgtgtgatcatgggctagtcagtatcctttgtcagtgggcctgtctccctcattcgtaaaatggatatggggaggcttactatttccttaccagccatttcaaatatatgtctcctgataacctttgcattttagagctcttcttttgttttcccatgagcaaatcagcaagagctacaagttagcaaacttttaaggagtgcttgctgtgtaccggcccatgataggtgataggggccacaaagatgaaggcgccttttctctctacccatgagatccagtgaggccaatgaattactattattgttgttgttgttgagataggccctcgctctgtcaccttggctgtagtgcagtggcgcgatcatagttcactgcagcctcaatcccctggggcacaagtgatcctcccacctcagcctcccaagtacctgggactacaggcgtgcaccaccatgcctagctaatttttgtatattttttagtgactgggttttgccacattgcccaggctggtctcaaacacctgagctctggcagtcctcccgcttcagcctcccaaagtgctgggattacaggcgtgagccaccatccaccgtgctctgggtcatttttttcagctctcttatagttcatatatactttctccggctattgtatattccatctgttaatcttgtcaaatctattgtatattccatctgttgaccttgctatagcaacaactataattttaattccttaagttccacttagttctttttcaaatttgcctgatcatttttgattgtctcttgttgcttattccattttatgattccattctttatttctttaagcataccatgtatatttgtgtatacttcgtatcagatcatctagactccttgagattctaaatctggactttgtagcttctgctagcctttacctgggatggtttgttccttttkattttggtgacctattttttatgggttcarttttggttaatcttaacctgggaaaatttggaggctgaaattaaagatgtgatcctccagaaaacattttttttttcctgttcagagatagtgaccaytggggccaccatgcattttgtgtgggtttattgttcacggctcccatttcagcttagaatctctttttttcttcctcttttttcccctttaaccttcatattctcccttaggtcctgcaaagtgctacctaaaaggtcttgtacattataatgttattttataacttaaagkcccctcagggtatcttgcccaccatatttctaaaagtgaaattgctgatgttattgaatgcttaccctgtgccaagcattcttttgagcattttacttgtgttagctcatttaacactcacaacaacttcatgaggaaaagtaacattttttattctcatttcacaggtgaagaaattgaggtgcaatgcgattaagtaacaggttgccaatgttacacagctgatacatgctacatgagttgataatgttacacggcaaatagagctgggattgtaagaaacacctaaaaaatttatgcacatgataggaaattcaaagtgtacaaaaggctatatagtgaatagtaagtccttttctgttcctgtgccctagacatgccattgcccctcccaggaggcaattattaccagtttcttacgtatttttctaggggttgtgtacaaaacatacaatctaatatatatatatatataatagtatatcatatttattatacattatgtgtctgattttgctagaaaaatagaaataacaaaaagtaacatttcttgaatacttactctatgcttgttacttttcattcattatctcatttgttcttctgaggaattattagttttactttgtaagtgagaaattgagtattacaaaagttaagtaacttgcccaagaatttgcagatagtaagaagcagagctaggattcaaacctaggtcttcgtggttcttgggcctgcacactttggcttttcacagggagctgactaggggttgacatctttaactcctctgtagtggattaggacaagagttagagtaaaggctggggtttagggtttgcgctaggacctcctctctaacccctacaccatacctggatgtggcctgtgcaagtgtgttttaggattgctgcttcctggggaatgagatggagaacacaaaactcaaccttgcccatcttctctgcatctatatttgttagtttcatatgtttaaggataggcttttgttaaccaattactctattttgaaactccctcttctcttttcttctttttctaatttcttccttccttccaaccctcctgtaaacatttatttgagtgcctttatatgtctagcattctgtttggtgctggaaataccaagatacaagaacataactgtcttttgagaaggttgtactttagtggggagacaaataccctaactgcaaattataacacagtgagttaagtgtttgtactttcctatggctgccataacaaattattacaaacttggtggcttaagcaacacacgcagattctctcacatttctagaaatcagaaatttgaaatctgtttcactggtccaaaatcaaggtgtcaacagggctacagtctcctggaagctctagaggggaatctctagattctcctttgcttttccagtttctagagccacattccttttatgctgagttccaggaacttccctccatctccaaagccatgaatgcagcatcttgcgtaagtgatcacattgccttcttctggtgaaatactgctctgacttccccttcttttttttttttttttagatggagtctcgctgttgcccagcctggggtgcaatggtgcgatctcagctcactgcagcctctgcctcctgggttcaagtgattctccagcttcagcctcctgagtagctgggaatacaggcgtgtgccaccacgcccggctaatttttatatttttcggaggggcaggatttcaccatgttggctaggctggtctcaaactcctgacctcaagtgatccaaccgcctcagcctcccaaagtgctaggattacagacgtgagccaccaagcctagccctgacttccccttctaaggacacttgtgattgtatttagggtccaccctgctaatctgagataatcttcccatagccagatccataatttagctatgtctgcaaagtctcttttgccatataaggtaacattcacagatccctgacttttatagttctgttcttttgtcctcattttctcattctgtgagtgtgtgtgtgtgtatcctcaacagtttcctccagacctggtgtactagcaagttgtgtgggttcttcctcaaaataccacccatggggtatttctttttcttctctctctctgctcctctctacactggttgatgcccttattcagataaacattcaaatggtcagctaagggttctccctgtctctaagctctcctcccaacttaccttacaaccattgttccattaattgttctatgtgacccttgtttaaaaacttctagagaataaattctgaactccttagcatgacacttcaaggttctctggagttcaagacctatatcaacttcatttatttattcagcaggtgctcattaggatttctcatgtgttaagactgtgccaggcactgagagtatgatagtgggtaaaagtaggcatgtccacccttggggattttgctgtctaataggaaagacagatatgaataaaataataattatgaagaaatgtgaaattgcaactacaataaaacagcagctcagacttatgtaatgcctgccatccatctagcatcatcctaagaattttacatatactgtctcttgtaatcttcacagcttgttcataactgctacttcctactttatggatgagataacaggtgcagaaagtttaagtgattcaaattcacacagctggaaaggatttaagccaggtagcttggttctggattttgtgtatggaaccactgtcatattttgataaaagagaagtgcctggtgctatgaggatcgttaattgggagtgggaccagggtagaaagaagcacagagagaagcaaaactgcttcatgaatgatgtgttgaggaggtacacagcttgatggtaggccgggtctgttgggaactgttgaggttatatattgggaactgttgaggktatatatatatatatakakakagagagagagagagacagacagacagacagagacagagagacagagacagagtggggatggggaattggaaaagcttcctaaggaagggacagctaaactgaagttggaaatataccttggcattaattggacaggaagaaaggaaaagtgttccatccagagggaagatcatgtgtcaaggccgtatggaggcaaggagcagagtgcttagggggtctgaaatgggaccaggtggagccgagagagcaaaggcagagggaggagcaaggtataggatggctgcagtgggattaggctggggaggcaggtaggtgccaaatcacccaggaccctataggacatattataaaccattttctttatcctaaatgcaatgggaaaccattgccattgagtttttgttttgtttcatttttctgagatagggtctcactctgtcacccaggctggagtgcagtggtatgatcatagctcactgcagccttgaactcctgagctcaagcgatcttcctgcatcagccttccaaagtgctgggatcacaggggtgaaccaccacacccagccccattgaggttctattcagggggtacgacagagatgtgtcagaggtttctggattgtgccctgaattgatgtggtctcattctctggaacggaacccaggaaagagaacatgttcaggaataagatcatggactctgttttggacctgttgactttgagaaacacaaatgagatgtgaaggaaattttcaaatatttggatccagagttcatagaagatgtctgggctgggcctttaagtccagcccttgtgtcactgacttttggcaattgaaagatgaaccttttgaaggacttctatggtgctaaggagaattttaaattctacttgtgagactgcattaatcttttgttgtagatttgaatgtggggtgaaaatcagtcagagtgggaagaattaattttagagtccttccccactttctacttttacaacagaatacctttggataatcatttatccttcaataataggaactagtttttggaaattgtggtttgagtctgctataaggaaaccggcaagacaaaaaacaaataaccaaaaagctgtgtgagaaggcttcttaagactgcaatgtaacctcagtgttcaaggcaaaagggagtgtatttgttagctattgctgtataacaaattaccccaaaacttaggggcttgaaacaacaataaaaatgtattgtcctcacagtttctgtgcatccaggaatctgtgagcagtttagctgagtggcttgagctcaggaggtaagaggtcccaggcaagatgtcagtgagttcttcagtcattggaaagcttgactgaggttgtaggatccacttctgaggttaaaggtcattcacatgactgcaagctagtgttagctgttggcaggaatccttggtttcttgccacaagagcttctctcagagctacttgagtgttcttaccctatgactagaaagctccccctagacaacctaacagtgagagggccagatggaagccatcctttttatgagcgagtcttaaaagtcacacggtgtggtgaatgcttcattccaagcaagtcactatgtttggcccacctcaagggtgaaggagggaactcggctccaccttctgaagggaagagtgtcgaagattttgtgggcgtattttagaacaccacatgggtgtttgaaatctgagctgtggatagggcctcccctctcaccctgtgtaggaattaatttcgggtacagcatccctgacagatggtcattcagccctctgcttgccacttccaactacgaggagttcactacactgtgagtcagtgaattccacttatatccagtgttaattgttagaagctttttctgttcatgaaattgaaagctctattgtggatattccattattaaagctagttctgctactctagaatggcacttttacatgatggcttttccaatatttgcaactgtggtaatcttaacttttctcttctccagatgaaattttgtctgttccattcagagcttcctctcgtgttttaattccaggcttcttccacattctggtcacctccttgtgaaaacattctgattcagtttatccttccagaactgaaaacacactactaattctgtagcccgmgctaagtataaagggacacagcaagggtttcctcactttgcgtaatagtggaggactgaaaaatgactgtgaaacctgaaataatgcaaagtgatcctagtgggaaaaatgatgatcattctgagacctttataaactgctttttttttttttttttttttttgagatggagtcttgcactgttgcctgggctggagtgcagtggcacgattgttgctcactgcaacctccacctcccgggttcacttcattcttctgcctcagcctcccaagtagctgggattacaggcacataccaccgcatggctaactttttgtatttttagtagagatggggtttcactatgttggccagactggtctcaaactcctgaccttgtgatccacccgcctcggcctcccaaagtgctgggattacaggcgtgagccaccgtgcctggacaaaacatctgtttttaaaactttaaaacttgttaaaattaaaaattttatttcaaatttaaatgcaaaaattagtaaaactagtgttcatttagtattcattagtattctgtaattaaaatattacatattacattaaagatatagagaatttaaaatacagaggattaaaatacttttgcaaaagaaaaaaaaacaaaaacatcaatagtagattgaacagtgcttgctacctccttcttcttgtataactaataatacagagtgagtatttttgcttcggcaaattgtcatcctgcttttaaaatttgtatcagctttcaacattatatcctttgagctttcagtattataaaacatctctgagagttcctttaatgtgaagttgtttttgctggtatcatttccttggagatacctttaatcactatccacatttatgttgacaagttcatctttgctaagttcctctggctgtagactttagagtctctgacagtggcagtgaccacattgctatggttagctgtataattacatttaggtccgattcccacctcgctactctgttgtcacttttcacttctttgctgtactttcatgtttcttgaccaattcactctcttcattatccattcttataaaatgccacatgggtttactgctgggaagcaaggaagcaacacagctacatgctttgatgtcaatgtgtgacctgaataatagatgcacagtgactagccacacatactttggaataaggagtgtggttggttactgatcatgatgcacgtctgttatgtatgtaatgatttgtggactacagaactagaaactaagtttgcactttattcaattactcacagttaatataccatggtaattgatatttgaaccatgttgttaggggactggtattatttaactaaatcatggtattggaaatttatgtacatcagattcatgcaaagcaaagtctgcctgtaggcttacgaattggtctggagttggaatcgatatttttttttttttttttttttgagatggagtttcactcttgttgcccaggctggagtgcaatggtgcaatctcggctcactgcaacctccacctcccgggttcaagcaattctcctgccctagcctcccgagtagctgggattacaggcatgtatcaccacgcctagctaatttttgtatttttagtagaggcagggtttcaccatgttggtcaggctggtctcgaactcctgayctcaggtgttctgcccgccttggcctcccaaagtgctgggattacaggcgtgagccaccgtacccagcctggaatcgatttttatgggcgactgttctgtgctgcttattttaagctcctggtcctcgctgtaatcaagtctcatatgtctttacctatgcatttgaattgtgtaaaatgtaagtgtaggattttacatacattccatttagcttgtggctgtatttttgacattttaaaaattttctgatacataatatttgtacatatatatggggtctctgcctttttaaagctggattgtgctatctagtaaacaaactgtcttctccaaattgttatccttttcacagtaagccattagcaagaacatggctggggccgagctcaatgatatgtttccagagttctctaagagctctccagccatacttccctcatcctattaatcaaccttttaagtaggaatatatagcagctatgaatttctccaactctgctgtcatccagcctgacgttttcgagcttgtccaacaaagttatctgtctggtgccatcagatgcctttctgaaatcaaagcatattgtatcagtagtggtgtcctgaaatgccactctggttaccctaccaaaaattaacactatgggtaataccttatgtttacagagaacttttacagttcactggagtgtttggcatatctctattttaaaatattttgtctatatagagttgaagggagatatggcagatatcattactttattttcaaaaatggtaaatcagagaggttaagggattggctcttgttcacagagctagtaaatagcagaatcttgatccttcagtaaatccagtgtgtttgaccatttcaaactatctcagatgaagtgactacaggcaagaaaaagggagtttctgcagtgttttcctgtcgatttattaggacagatcagtcttatgaccctcctcctatagggtctgtgctggtttcccagggctgctgtaatgaagtaccacaaacagggaggcttaaacaacagtaatttattgtcttagaattttgaagtccaagatcaaggaatcagcagagttggtttcttctgaggactttgagagaaggatctgttccaggcctgtcttctttgctcatagatggttgtcttccctctatgtctcttcaactcattttctttctatatgtgttcctgtgtccaaaaggacaccagtcatactgaattagggcctatcctaatgatttcattttaacttgattacctctgtaaagatgttatctctaaataaggtcacattctgaattactggcggkgggggttaggactgtaacatattaaattggggtgggaggggaggttcaactcataccaggtcttcaaggcagatttcaagtttttttaaaaatggccatccgggcgcggtggctcacacctgtaatcccagcactttgggaggccaagaggagcggatcatgaggtcaggagtttgagaccagcctggtcaacatggtgaaaccccatctctactaaaaatacaaaaattttccaggcatggtggtgggtgcctgtaatcccagccactgaggaggctgaggcaagagaatcgcttgaacccgggaggcagaggttgcagtgagacaagactacgccactgcactccagcctgggcaacagagcaagagtccctctcaaaaaaaataaaaataacaaaggcccaaaggaataggcttgtgtagggagtacttttgtgtgtgcctgcatttttaaatcaatgtctgtgtatctgatacagtctattgagatcaactttatggtcaattgatactgcctttcagtttttcaaaagagagagagagtgagtgcttttcctaaattaattcttagttgtctacttgctgaatgtagtctctgaagatgtcttttgtgaggcagctgctgaaattatttgcttgtttgatgatttcaggattcaaatgtgtcatttaactttagagctgagatttatggtgaatttcactccragcttggtgttaattttacacacatctaagcagtttccttcttccacaagttggttaagcatcagaggattctgaatttaggaaaaaaaaataaattaggcagtaacaatttgcatcccaaagtgattcacaagttttcaagtatattcaagggttgtttagcatattaccgactacttatcaaaacacgggactgattatgaccttgttttagattgctggtgttgaggtgctacaaatgtgagatctgtattattgtgtttcctcattgccttcgcttcttctgtggttttttccttttggtcactttgggtgttccacagattaccaatgtgtgcatttcacatgaaatagattttgattttttaaaaatagcatttattgtgagtagaaaatttggtttcactcatacatttttctggtgatctttgtgcattttacttatttttttgaagtgattcttctttttaattaactcattgggtaaagaaagtacagttctaatgtctatgtaaggtgtaatgaataaggatgtgacgaactgtggttatctttgaagctctatgtgttctcaatatccgttcccttcccttatcaccattatactaaattttatgcttatcatgtccttacttttacttatactttcacaattttttttgtgtgtgtcacttgttgcttaggctggagtgcagtggcgcgatcttggctcactgaaacctccacctcctgggttcaagcaattctctgcctcagcctccggagtaactgggattacaagcgcccgccaccatgcccagctaagttttgtatttttagtagagacggggtttcaccatcttggccaggcttgtcttgaacttctgacctcaggtgatccacccgccttggcctcccaaagtgctgggattacaggcgtgagccaccgcgcctggcctcactatcttttttcactttcttttttttcttttagtcagagtcttgctctgtcacctgggatggagcacagtggcgtgatggtagctcactgcaaccttgaactcccgggctcaagcaatcctcacatttcagcctcccaaagtgtgggattacaggtgtaagccactgcacccagcctatactttcactttttatatttgcgtttccaaataatatactgtttagtttttcagttaaaattttttatttttaattcattaaaaaatgattcaaaaagttacaagaatatacaaaataatgctgctatagacttcacccggattctcagtgctaatattttacaaaatttgcttcattattctctactctctctacatatataggtagacacacacatgcacgcacacacacacatttttctggactgagagtaagttatagacatgctgttggagtctaaatactttattttttttccctaaaaaataaggacactgccttacataatcatgaattattatctgggtcaggaaattaacataggtataattctaccacatgatctgtagacccattcaaactttgcccactggcccaataatgcccttggtggctatttcccctcctcttattcagaatccactccagaaccacaggctccatttatgtatcacattcctttagttgcctttcatctgtaatgggtctttagtgtttctttgtctttcatgctctggataattttcaagaatatagaagagtttctccttttttcaaactgtcccttaatttgggtttgtctgatgtttcctcatgattagattcaggtcgtgcatttttggcagggacatcggagaaatgatgctgtgctctcagtacatcatatcaggaggcacaggatgtggaattgtcccgttattggtgatgttaactttggtcactcggctgaggtggtgtgggccagctttctgcacttctctttgtaaaataaactttgtggggagatactttgataattatataaatatcctgtttctcaacaaattttcacccactagttttagtgttcattgatgatttttgcatgaatcatttttttatgatgatggatgccaaatgctcattttctaattgtgtaatttcttccacatatattagttggtattccactggaagaaagaactctccattctcactcatgtactcattcatttacttatcattgtggactcatggattcccrtattattctttggattttaatttgttagtatttttatttattttgatgctcaaattgscccagatttacctagtgggagtttgtttagagtggcttctttgtccttttgactactttctgactatattctagcacttccttacttttggcacaaaattatgttctagattcatcttgtattttccttaccagagccctggaatgagccctggagtcacttggttctgttttgtggagaatggtatttagaaaccaagatctgagaactaggggtgctgattgcatctgggtttcattgtctctaggcctctcagcagataaagctagtatgtgtgtgcatgtaatgtatatgtatgtatgtaaatatatgtaaatatatattactcctatatgtaatcaatctcctgaccctggggactgtctcctcggctacagccttgcccattccacctgcctccttgacactgcacttctccaaccccagttcccctgaccctattagcattctcagccttgactgctcccttagccccaactacctctgcattcctggatccaccaggcccacctgctggggctatatgaatggaaggaaaaggaaaggaaaggcacaaagaaatagtttataaagaaaaaaagaaaaggaaaaggctgtttggtttttaaaatattacatgaaaaaatacataacgtagtgtctaatggccgttagcctgtaggcaactggggttcaaattcaggatttattacctgccagatgcgtaattttgggcaaggtacttaacatctctgtgcctcaattttatcctctgcaaaatggggctagtaatagtgcctcatagggttcttgtgaggtttaaacaagttaacrcatgtaaagtatgtaggatggtgtttggcacataggaaatatattttaatctctttattattatcagacatcccatcattttagaatatgttgctttatatttctaataaaaatgtgttaaataccaatgatttattagtggtgtcttctacagagatcagaagagttattaaagttaccgtttttccttccatgagtattattttctttattcagatttgactgtctataccttataccactttgcaacataagcattacattaaattactattacaaatcttgaatctttgcacttatcttttaaaaatttaatttttagagaagttttaggttcacagcaaagttgagagaaaggttcagagctttcccatgtatcccctgccgggacacatgcacagccccctcattatcaatatcccccaccagaatgctacatttgcaacaactgataaacctacattgtcacatcattatcaaccaaagtccacagtttatactagggctcactcttggatttgtacattatgtggttttggacacttgtataatgatgtattgaccattatagtatcatagagagtgttttcactgtcctaaaattcttctgctctgcctattcatccttccccctccaacccttgacaactactgattttttattgtctccatagtttgccttttccagaatgtcatatagttgggatcatataatatgaagctctttcagatttgtgtctttcacttagtaatatgcatgtaagattctctatgtattttcgtggcttaatagctcatttatttttattactgaataatattccgttttctggatgtaccgcagtttatttatccattcttctactgaaggacatcttggttgcttcctaaaggtacatccttcatctatcaaggagtgtttgttttctactacagaatgatacttgtaagccaccagagtctgtactctgatcaaataccaagggcatttgatcagtccctgacgttaaagaaaaatgttaaatgttatttccatttggaagctaatcataaataaatataaagtttcagagaaatgctagtgaaagccactgggatggttttcaagttatataattttaatttacatgcatctttttaggagttcatatcagagcttggcaactataggccacaggccaaatccagctccctgactgagttatatggcctgtgagctaagtatggttttaaaatgattgaaaaaaagtgaagaagaagaggaagaagaagaagattttataacaaatgaaaattacataaaatgcaartttcagttcctgtaaataaacttatattggaatatagccatagccatttgctactatattgtctatggttgattttgcaattcagcgacagatttaagtagttcaatagacacaatatggcccgcaaagcctaaaatatttactgtctcaccctttagggaaactgtgctgatccttggtttatactattacagaagcaatcataaagttttggaagaatctcggaagacatgtctagtttaggagatatggcttcccctgcaccttaggcatttaaaataacctggcctgtttctttctgaaatgagaatattggatctgaagatctaagtccctcatgcctcatgctattctttgatgcctttgtaacattattcgccccattgtactagtccgacggggttttttcccccactttggtttttattttaaggcaatctcacttcatctctcttttccattaatctgtttgacatgaactgagctaatacggcaatttttgtctctgttcaaaaacttcaagaaattttgagacctcatatttttatctggttttatytcccctcacagtgacgtaagagtggattttgtataatagattgaaatatgttcttttattttgttggatggctgagctatttcacagtggctcaaagagcagtttactttgttccatagcaacaagcctcttgcccaaatttgccatctggtgtttgaagcctgtatcttgcagcagtttttttcattagctgacagccattactcatctgcttttggctttagtattcccgacattctcattattgctcatcctaaatagtcccagtttcaagtaagaaagcacttggagttgtttgcttagcagaagggaatcaatttcatctggaaaacaaggggccagttgagaagatacctgccagctgggaccatgactttattatttgtgaaacttggtttttaatgacttgtgtatatgcttaacagcccacctagagtgtggcctgtgaaggggaagaccaattggccatggtgggtacccactagatggtgaatgagtgaacgggtttcctgcataaatccaggaaaccttgggatgaaaaagcagtagccccatgaagaaagcatcaatcatactttgtaattttgccacatttgctttccaaattttttttagagattacctgaaaataaatctcagggctgatccctggctacctctgatctgatcttctatcagtctttcttgtagtccttgtactgtatccccactagcctctctggtgtttcagaacctgccaagcacactcccattttggggtccttgctagatattccctctgcctggaatgctcttccccaaatgtctaagtggttcactctctccttttatgcaagtctctgcttaaacctcattcttcagagaaaccatcacactccacattttagtctatttacctctctttattttcaccataaccctcactatgaagtatatcttcatcaatttattgttcccagtctctggaataatcctgagcatacaggaagcactcaggaagtactttctgagtgaaaacatgaacaaaagcaagacaaaaatctattaaatacttgatttgtgaattaaggttttccccaacccaacacttccgtgttatttacagaatactcctgtctatttcacatcttgtagctttttgcctctttgctgctcctgttgttaccccttccatcccttttcccacaaccctggatacttaccaagtaccaagtcctaccaaycactgtccaagttctgccttttctttgaaatcttcgctgatcacacttattatctctccattggaacccacagggccattgcacttcctcatcctcccttctcatgtctaattcattttctacctctgcctgtcttaactcctaaaccttaagctctatgagtagagactatgcatatatattcctatttttcatactttgcattttcatatacacttaatgcatatttttagtacattggctagaataagacatttattattaacaactttgtatctaaaaaggagtaaagatgaaagtggagtcactctcaacttctttcctaaagagataagcactgtcattatttagacacctgctatggtttgaatgtttgtcctctcagaaactcatgttgaaactcaattgccattgtaatastattaagaggtggggcctttcagaagtgattaggccgtgaggacagagctctcataaatggattaatcttgttaccatagtagtggttatcttgacagtgagttgttataaaatgactctggcctcgagtgcttccctctttcacatgctcttgcctgcccttccacctttctgctgtatgatgactctggctagatgctggtgccatgctcttggaattcctagcctccaaaacggtgagccaaacccattttgctctttatacattaccaatctgtggtattctgttgtagcaggagaaaatgtactaagacagaaaattggtaccaacaccagggttgttggaataatagatacctgaaaatatgcaagtggctttggaactgggcaatgagtaaaggctggaagaatttggagaagcaggctagaaaaagcctagattgctgtaaatggagcattgaaagtgattctggtgaaggctcagaagaagagaagactggggaaagttttgaacttcttaaagattacctaagtggtcatgaccagaatgttgatagaaatatggacagtaaaggctgttctgatgagatctcagatggaactgagaaacaaggtattggaaactggggcaaaggccatccttgttataaagtagcaaagaacttggctgaaatgtgtctataactgagggctttgtgaaaggtggaatttaaaagtgatgaaataggatatctagctgaagacatatttaagcagcaaagcattcaggctgatgcatggttacttttaaccgcttatagtaagatgctagaggaaaggaatgatttaaagatggaatttataatgaaaaaggaagctatgtgaaaagatttggaaaatttgcagcctggccatgtaaacaacaaaaaagcattctagtgtggaaccaagagaccatttactgacgagattaacacagacagaagagagccaccatcaatacaatgggagatagaccctgaaagcatttcagagatctttgaggctgccctgctcatcacaggcccagagttctaagagggcagaatagtttgaggggttgggctaggagcaacctacacaggctccctgcccagaccgacctcacatctctgcttcctgcattccagcagagagctctttcactgctcccaccatggctcaagcaggtccatgtgtggctcaggccacaacttcagaagatgcaagtggcaaatcttggttgcatccatrtggtgttaagtttgcaggcatgcagaatgcaagatctatgggggcatggcttcatccacctagatttcaaagtatgttgcaaatagcctggagccccaggcagagacttgtcacagaagcagagccactgcagagagccccaactatggcaatactgcacaaaaatgtggggttggggttagtgccagagctgccacagagagtcctcactggggtaatgcctagtggagccctgggagcaggactggcactgagactccaggatcgtggagctactagcatgcaacctcagcctgggagagcagcaggcaggagactccaacctatgaagcatgggctgggtctaggaaagccataggagtggggctgccgaagacctgtgtgcccaggatgcagaaaatggagtcaaagattattctctaaattgagggcttaaagtgttttttcccattgggttttggacttaattggagtctgttactcttctctttttgcctatttttcccttttggtccaggactgtcaatcctatgcttgccccaccattgtattctggaagtagataacttatttgatttcacaggctcacagctgtaggaatatgcctatggatgaatcctgtctggtgtctcacccacatctgatacagaggagactctagacttttttttttttttttttttttttttttttggagacagggtttcactttgtcacacaggctggaactacagtggtgtgatgacagcttactgcagccttgacctcccaggcttaagtgatcctcccaccttagcctcctgaatagctggggttacaggcatgcatccccatacctggctaatttttttgatttttttagtagagatggggtcttgctatgctactggtctcaaactcctgggcgcaattgatcctcccacctcagcctcccaaagtgctgggattacaggcgtaagccaccacgcctgacctgagactctggacttttgaattgatgctggaacaaccacttaagacttttgggactactggaatgagatgaatctattttaggccaaatacagtggctcatgcctgtaattctagcactttgggaagccaaggcaggaagatcagttgagctcaggagttcgataccagcctgggcaacgtggtgaaaccccttctctaccaaaaatacaaaagttagccaggcgtggtggcacatacctgtggtcccagctactctggagacttagatgggaggatcatttgagcctgggaggtggaagttgcactgagccaaaatcatgcccactgcactccagcctgggtgacagagtaagaccccatctgaaaacaaaacaaaaaaaagaaatgaatatgttttgtacttgaaaaggacatgagttttgtaggaccagggcagaatgctatggtttgaatgtttgttttctctgaaactcatgttaatatttaattgccattgtaacagtattaagaggtagggcctttaaaaagtgactgggtcatagggatgaagctctaatcagtggattaatgccattatgaagggagtgggttagttattgtgagagtaggttgttaatgttttctttccttttcttgtttttttgtttgtttgtttttgttttgtttgagacaaagtctctgctgtgttgtgcaggctggagtgcagtggcatgatcttggctcactgcaacctccgcctcccaggtcaagcaattctcctgcctcagcctcccaagtagctgggactacaggcacctgccaccacgcctggctaatttttgtatttttagtagagatggggtttcaccatgttggccaggctggtctcgaattcctgacctcaagcaatctgctcgccttggcctcccaaagtgctgggattacaggcatgagccacttcaccccgccatgttttcttttctctagcttactttagtgaagaatacagtatataatacatataatatagaaaatatgtgttagttaactttatgttgattatgtcgattatgttattggtaagtctttggccaacagtaggctattagtagttaagtttctgggaagtcaaaagttatcgctcattttagactacggtgctcctaacccctgcattattcaaggggcaactgtaatccccttttcttcttgaattactaattctattctacttccctcacagactttttactaatgcaatatatttttatacttgaaagccttctgttgatcaaccattgtagtaaaatatctgtacatagatttaagcatttacagtggcccgggaatataagaaaattaaaaaaaaaaattgtattacacgttttgaaagtaatttgttaagtgtaaaaagtttttttcatccagtttgataatatatctatgaatgattgttagttgttggtagaataaaataaggggcagcatcaattttttcttattttccatttttatagatgtgagttttaggaataattttaacataaatcgagtagatgcgaatggaaaaagtttcattgtagcaatatcattcaattctttgaacttgttatgtgataaatttacatattaatcaatcaaaaatatctttaatgatctgtcaattgataagcaatgaggacttctatcattttattgacagttaaagaccacaatgctagagaaatatcgtagggtgccaggcagaagccttggtaggggcacatttgagcttggtgactatggctattccatctactgtgctgcgtgccttgttccagtactgcatggctactcaggtgcagcccagaaaaagggaaagtgggactcagttatttttaccagctgtatgttaagtaaaagacaatggaaatatgaaataatagatagtgaaatctaacctcgacaaggaaaatggaggaagaagatggctggtggactgggcaaaagtacagggagaaagtaaagggaaggctcttttttttttttttttgagacggagtcttgctcttttgcccaggccagactgcagtggtgctatcttggctcactgcaagctccgcctcccgggttcacgccattctcctgcctcagcctctggagtagcttgattcttttcrcttttgttgcccaggctggagtgcaatggcgcaatctcggctcactgcaacctccacctcctgggttcaagtgattcttttgcctcagcctcccagatagctgggattacaggtgtccaccaccacacccagctgattttttgtattttttagtagagatggggtttcaccatgttgaccaggctggccttgaactcctaacctcaggtgatccacccacctcggcctcccaaagtgctgggatgacaggcatgagccaccatgcctagccatgtttctttcctcttgctgcttttaggattctttctttatccttgatctttgagagtttgattactaaatgccttgaggtactcttctttcgattaagtgtgcttggtattctgttaccttcttgtacttggatattggtatctttctctaggtttggaatgttctttattatccctttgaataaactttccatccctatctcttttcctacctcctctttagaagcaaatctatgagttattgaatttgtgggtttttagatcctataggcttgcttcattgttttttattctttttatttttgtctcctctgactgtgtattttcaaatagccttttttttttttttttttttttttttttgagaacgagtctcactctgttgcccaggctggagtgcagtgtcgcgatctcggctcactgcaacttctgcctcccgggttcaaacaactctctgctcagcctcctgagtagctgggattacaggtgcccaccaccacgcccagctaatttttgtagttttagtagagacgggttttcaccaagttggccaggctggtcttgaactcctgacctcgtgattcacctgcctcggcctcccaaagtgctgggattacaggcatgagccactgtgcctggcctcaaatagcctattttcaagctcacaaattttttcttctgcttgatcaattctactattaaaacactctgggccgggcacattgcctcacacctgtaatcccagcactttgggaagccaaggcaggcagatcactaggtcaggagatcgagaccatcctggccaacattgtgaaaccccgtctctactaaaaatacaaaaattagctgggtgtggtggtgcaggcttgttatctcagctactcaggaggctgaggcacaggaatcacttgaacccacraggtggaggttgcagtgagccgagatggtgccactgcactgtagcctggtgacagagtgagactccttctcaaaacaacaacaacaacaacaacaacaaacaacagtctgatgcattcttcattatgccaattgtatttttcagcttcaggatttttccttgattctttttaattatttcaatctctgttaaatttgtctgatagaattctgaattatttctctgtgttatcttgagtttctttgagtttcctcaaaacaagtattttaaagtctctttctgaaagrttacatatctttctctctcctggattaatccctggtactttatttagttcatttggtwaggtcattttttttttcctggaatgtcttgatacttgtagatgtttgtgcctgggcattgaagagttaggtatttattatacttgtcactatctgggcttgtttgtacctgtctttcttgggaaggctttccaggtatttgaaaggactttggtgttgtgatctaagctatatctgctttagggggcaccccaagcccagtaatagtgtggttcttgcagactcgtaaaggtagtgccttgatggtcctgaacaagatctggaagaattctctggtttaccaggcaaaaagactcttgttctcttcccttactatctcccaaacagtctctctctctgttcttaaccacctgaagctcggggtagagtgacacaagcacccttgtggccacaatcacccttatggccacaatcactatgactgtgctgggtcagacttgaagccagcacagcactgggtgttgtccacagctttctgtaatcactccctggctactgtctatgttcactcaaggccctggggctctacaatcagcaggtggtgaagccagccaggcttgtatccttcccttcaggatagtaagtcaccgcagttccctggcagttctagaggtgccgtcagggagctagcgattagagtcgaaagacttagaaagccacctggtgttctattgtactgtggctgggctgaactcaaaccacaagatacagtccttcccactcttccttcccctttttgaaggtggaggagccttaccttgtgtccactgccaccacaggtcccctggaagtcctgccagactactgcctatgttcccttaaagcccaaggattcttagtcaacttgtgaattctgcctggcctgggataaactcttcagagcagtgggcttccctttggcccagggcagatccataaatgctgtgtaagagccaagttctggaactggggactcsaggagcctgcttgatgttttattcttctgtggccgaactggtacctaaagtgtaagacaaagtaccgtttaccctctgctttcctcaagcagaaggagtcttgccccatagccaccacagcttgkgtgaatgtgctgagtttcacccaaggccctcaacatagtacctggtattgctgctggttattcagggcccaagggctcttcagttagcaggtgacgaatcctaccaggactgagtcttttccttcaaggcatcaggttcccttttggcccaaaatatgtctagaaatgctgtcaaggagctagggcctggaaagacagtctcacacccctgacaggtgccctatcctgctgtggctgacccggtatccaagatgcaagaaaaagtcctccccacccttccctctcctctcctcgagtggaaggaaggagtctcttttggagccatgagctgtgtggcctggagttaggggaggggtgatgccagcactcctgcagccaccccaatttgtgtctcaggaggttgtgttcccccccttcccggcccagtctattgtctctgggcccagttcagcactaggactcacacaaaagttgtagtccttgggacctagactggcttttaagtttattagggcctctgggcactttagcccactgtagtctgtggctaggcttgtggaaactcaagtcccaactgctgggatcagcaattcccctctggccaaggctggtttgaatgttccctctgtgggcagacatcagctaagtttggtccagttttctttctgctataacagaacagcactgagttcggtggctcataattgctatgctctccttccaccagtgcccagaaatgctctccacaccacatcaccacgccctggggggtagggaaggggtagcatatgcaattcaagactggtttttgtatctcttcagtgcctctttcagcaagataaagttaaaaccaagtaccatgactgctcacctgatttgtagttcttatgaaggtgctttttaatatagttgtcaaattggtgtccttgcagggggtgattggtgaagccttctattctgccatcttgctccgcctctccaattagccatttttaataccttgtatcttcaattgagaatttttgaagtctcagattgatattatggcagaaaaggaggaatcacacacagcttgtctttggatgaccaaaagcaaacacctgtcttttttttttttttttttgcctctaaactcaattccatttggtatcaaataccttttaactcagctatagtctcttttaagaatatttacatatttaataaaaaacaaatgactgtgactcactaatatgtgtttcttttcttttctttctttcttttaaagatagtgtttttagaagaagcatctcaacaggaaaaactggccaaagaatggtgcttcaagccgtgtgaaataagagaactgagccaccagtaagttgttacttcttcccttttactgggtgccactaataagcttaaattatagaaaacctgccttgagagacagagagactttaaaaaataatattaatttaacaataattattttgtattaattatttgttaagggaggagatgggaaggagaaggtatacaggaagctgaaggatggaaacttagagagctagaggctgccatcattcatcaatttctttagcatatatttgttgagcatgctatgtgcagtactggagggtctggaggtgaaaaagatcttcaaagtccttgtcctcacagggtttacagtccatggaggacaaagacagtaaacaagcaaacagatacctgcgcatgaccatagtagattgtgatagcttctataaggaaggaaacaaggtggggaggggtatgatagaggttaactattaagaagtagggaggaaagaaaatttgagaatcaattggttggggaagttcagaagcacacttgagctrtgatattatatttcawctacttttagtggtttttaatattcgttatatttcatatataatatatatttaatatatgttatacagttcttaaagaaatgattgggccagccaggcatggtgtctcatacctgtaatcctagcactttgggaggccgaggcgggtggatcacctgagatcaggagttcaagaccagcctggccaacgtggtgaaaccccgtctctactaaaaatacaaaaattagcctggcatggtggcgcatatgatgcctgtaatcccagctacctgggtggctgaggcaggagaatctcttgaagcccggggggcagaggttgcagtgagccaagatcatgccacttcactctagcctgggtgaaagagcaagactctgttaaaaaaaaaaaaaaaaagctcagtttcctcatagcctggttgatatgctttatggaaatgggaaaactttttttgattataatttttattttattttttgtttattttactttaagttctgggatacatgtgcagaacgtgcaggtttgttacacaggtatacatgtgccatggtggtttgctgcacctatcaacccgtcatctaggttttaagccccacatgcattagatatttgtcctaatgctctccctccccttgccccccaccccccaacagaccccrgtgtgtgatgttcccttccctgtgtccatttgttattattgttcaactcccacttacgaatgagaacatgcggtgtttggttttctgttcctgtgttagtttgctgaaagtcatggcttctggcatcatctatgtccctgcaaaggacatgaatgggaagacttttttaaagctaaaatattttatcttgtttcaggccaagtaagttccaaggccaataaaattggtaccatttatattctgaaaacactttgataacttgggaattgactttcacgtaatatagagaaacactgtttcacgtaatagaggaacattgaactaggaatgaaaatacctggtttgaatccacagactgtactgtagctttgcagatgttaaaagtcaagcaagccactttccctctttgaggtcatctagactatgaagctcatccctggtcatagtccagagagacagagtgactatttataatgtttcactccacctgcagttttactcacatcccttgcctccttccctctccctgctgcctctctatgggcttggaagtgtgtgggcgctgggcatggaaatgaatatagtagcttctgctgttaccatctacttcctcttgctagattttcatgtaagaatctatgatgaggagcaactgacatttatagtctcctgcttgcgtgtctttgtgatgcaggattagaagaaggcttggaagcagttgaagtagaggctgagatgggatgagagaatggtggaaacggttggaggatggagaggagggtaaacataactgtgggtcttcacttccttttcttcctctttatgaggttgcttttgaaattaaatccatcagaaatgcagattctgggggtcgtatgtaagtactgcacacaaggaagtagtaaggtaagaaataatttaaattttagtagaagactgaagtctttgaagaaagattatatttaaaatgcagagattcttatatcaagcacacaagttatgtgyggttgaatttaagtcatgattaaaataccataaagggatgtctcagacagtttttaatagacttggcccaatacacagtgtatctacaggtctatctcagtactgtctggatttttagaaaagggaaatcacaactggagtaccatgggcagtgctgtggtaggagtgaatcagatggtggccatggaccctggacaggtttgcagggccaggattagggtgaggggagtgaggcattcacctcaggcacaaaatttaaaagccagcgggggaggggcaaaaactcagtaatcaagataaatacttttaagacaatattttaaaatataaaaagtaatgcatggctgggcgcggtggctcaccctgtaatcccagcactttgggaggccgaggcaggcggatcacttgaggtcaggagttcaagaccagcctggccaacatggtgaaacctgtctctactaaaaatacaaaaattagccaggtgtgggccgggtgcggtggctcacacctgtaatcccagcactttgggaggccgaggcaggcgcatcacgaggtcaggagatcgagactgtcctggctaacacggtgaaaccccatctctactaaaaatacaaaacattagccgggcatggtggtgggcccctgtagtcccagctactcgggaggctgatgcaggagaatggcttgaacctgggaggcagaggttgcagtgagccgagatcgcaccactgcactacagcctgagtgagactccatctcaaaaaaaaaaaaaaaattaatgcaaaaactcatgatgaacaaaatrccaacattttaaataaagacaagatgttgtttgttttacagccatgcattttttttgtgcaatggaacagtcactttcaaataacggattctcaggcccatgatgccattgcattactggtagggcaggctgatgatggtgatgatggtttgggtaatacacacatgtattgatatatacctgtattgttttctgattataaaactttattaatgtgttccatttggtgaaaagataggtggatgttctgataagcatatatagggggatatatatatatataaaattttttttgctcaggttatgatacagcttggccaacactgcagatttggaatacctgggggaagttgagattctctgaggaaattatgatgctgattaagtaaagtgagaagaggaaagctgaaaagaagggagaaaggagagcttttttaccttctgctgctgccttcagatctcttctctgctttgcctgcagctgggcttgtagtagctacaatttagccataagtgatgttgtgagtggagaaccgagtttgaatcctagctgagccaccaacaaattgcaagtcaaaaataaacttgcaatcccagaccttccttttgttctctctataaaatgagcaggtgggctcactgacctctaatctcatgtgcactctcacattccatgcttctgtgtgtaccaatattatctgtaattaatcctggactgtaaccttgattctgggaatctttttattaataatcatttcacgatgcttactatttccttaaaaggattgtaacttttctgggtaaaaaaatcacacttcagatgcaataaatccttgcgcttctgttgcctctgaagactttgtactctgaatcatctttcactctctcatctcagctacaatgaacatgctcatttctcctacatgaaaaacataaagtgacttgaactcttcttcatcctaaytttcactaccaaatattttaaaagggmgctctccatctgcacaggactttctcaaacactctctttttagcacttagtgcagtaacaaaaacattctagagactcagtgactactttttaaaggaagagctaaatctttccaaaattgggggtcttaggattattcctgaggccatgcatttttgacccttgcagtttttggcactagtcactgccctgctccttcttgaatgtctcttctttactgtccctgacacctctctgtcctgggttccctctaccctcctgacaataactctgccaagattgatcctgatcttttctttctcagtcttactcctgaagtcgaaggtgctgcttaagatgttggtttgttcttccttccacagagaactctggcatcgccaacttctagagttacctatataagaccctcaaatctgaatcctttctttttttttttttttttttttgagatggagtctcgctctgtcacccaggctggagtgcagtggcatgatctctgctcacctcaagctccgcctcccgtgttcacgccattctcctgcctcagccgcccgagtagctgggactacaggcgcctgccaccacgcctggctaatttttgtatttttagtagagatggggtttcaccgtgttagccaggatggtctcgatctcctgacctcgtgatctgcccgccttggcctcccaaagtgctgggattacaggcgtgagccaccgtgcccagcctcctctccttcttttcttctgcctcttctcccttctccttcttcttccttttcttgctcttcttcttccctcctcctcttcctcctcctcctctttttctccttctcctcctcctttctcgtccttttcctcttctcctcctctcctttttctttctcctcatttttcttcctcctcctctctgtctccctcattcacccgtaacctcctcaactagattataaagtctttgacgacaatatgccttatttttctctggactctccacagggcttggcggtttcctaaatatagtagacattgggaaatattatttggttaaacaatttaactgcatgaggaagttacactgctattccgttttatgacgggagagaaagcaaagacccaaaggactgacattgtagagagatcagtgactgatacctgagagaaatccatattccaccctccctttcagagtgcttcccacattataggcccacttaatgctgccttcttgacgtccttaaaaatttgtcacagttctttatttccatagtcagtgaattaacaattccatcacgtggaacgtagtgaccgagagtactgaacctacagacaaactgcctgggtttgaatctcagcgccaaagctgactagttaacagttactttttttcaagctacataaattccctgagctttagcttacccttatgtaaaggagggtaacagtactctcatacttactaagtttcttgtgaacattacatcatcatcatcatcatccataacatttattgatgctttccattatctaggcattgttcttacacacactaaatacatcctcacgacagccctatgatgctactactatctccattttacataaggggaaactgagtcacacagartttttttttttttttaatatgtcaaatatctaactgctgatttatggtcaaacctgatttcagatcttagcaggccaaaaccagaatgtatacactttaactcaactgctgcccacagatgagatgatgtatgtagaacgctgtgccagtgcctagtgaatgtacatattcaggaaacattagctgctgtcaccatcattattataataactgactacaaaaaagctagtcttttccatgcgatgtagaggctttcttgtagtcagacaagatcaagatgaccactgartctgccattccttgctcttgttttaaaataaagcatttagagttactcatggctttatttggcttacagttaggtggtatgtatacatttgatttgatagcatgaggaattatttgtaatgttaggtttcaagttcaagttgcttatgtgattgaatacttacctaggataatggtggcagtagagggtcccatcttttggcaaatatctgtttggatgaggttggatacttaatagtgactgtggtgaactgcattagctctttagaaaagcatgaagtgtctgttagcaccatactgcctcaattctgtgggtagtgcctctgaacactttccaggactttctaattataagaattaatagaaatatgaatattaattggtggatcatggtggtagcattagtgatcacaagcatcctgagcatggttgtcacagcatcatatgtaactccctcttcgcttcactacttacaccactgcccgtttgtggtccatctcctgagatcgcctgtccctaaccagcttgctcttgctgcttctatttcagaactcagtttctgtaacacgtgggaaaagactaggtttcttgtagtcagacaagatcaagatgactgctgagtctaaaattgcagccagtctgtttctcacctttagttgcccttagtgactggtgtgcacattgctcagcacggctctagaagttttaaaggcctcctcttccattcttgatctctgacctacaactatcagttgtgagaacaaagtcatgggattaaatcagagttcccgtcctttcttgtgccaccactgctttgcttctgctcaatgctgtgtttttccctcccttcgtcatcactggttaaccccgaccagccattccaacctagaagctatatctctcctagcagagcttcatttttatgtcctgacctctaaataattggagaatttacagttgtctgattgcattacctataaacctgtgtgggtgaacagtgaaatcatgcttgggaaaaaatgtgatttaaaaatatgggaaatgactgaagatattattaaatacttttattctcatcttaatttccagtgagttcttcatgcctgggctggttgatacacacatccatgcctctcagtattcctttgctggaagtagcatagacctgccactcttggagtggctgaccaagtacacatttcctgcagaacacagattccagaacatcgactttgcagaagaagtatataccagagttgtcgtaagtatcttgtgtgtgagtgtggtattctgtttggtcatctatagaaatatcagtttcctaggacagatttaaattataaagcataagcagttaagcctaagatgggccatagagaatttttaagtttctttttcacagtccagtgagtttgtgaccacctcacctacacagctagtcagtggcaaagagagaatttgaatccaagtttccaaaaccccaatctggtgggtttacgttactcttttactttctgtgttttactttaccaaatctgggtttaatgaatatgtgtatttccctactcctgctaatccataatgctgttctgaggaccatatggattcattatgtgacctttgcaaagttatgtgactcacttttcccatctgtaaaaaatagagatcatgatagtacctatttcacaggattctcatgataattaagcaagttaatatttgtgaagttcttagaatagtgcctrgcacatggtgggagctctatttgtttgctttaaaaatgcccaaggaaatttaaaattaaatatttaaattactgttagaaggaatatcatgttattctgggagctttgcaaggaaggaaaataggatggtcccatattgcatggcacgtggtaatgtgacttgagcactgacaccactagagggaactctggggctagtacagtcattgaacagtggcagtagtgtgtaccagccatatgttgaaggctctgaaagtgtccttccttctcctctttcaggaaaatcagttcctttcttactccaatcctgtgcccagaaccagaatctactcaggaattagaaacagtttctgcagtaaaggagctaaagcgcaaatgctgccttgtctgatcattatgtcctggtgttcagcgcacttggtctgaacactcatggatttttgtgggacccattgattcctcctaaggtgttcactacatgtggtggtggcagtattataagccttccacatcaactgacctaaccatcttgccagtttttttggtcttgcatcattccagtcttagagagtaaaagcaagtgctttttttttttcttcttttttttggagacagagtctcactttgtcacccaagctggagtgcagtggcatgatctcggctcactgcaacctctgctgcccagattcaagtgattctcctgcctcagcctcccaagtagctgagattacaggcacctgccaccacacccagctaatttttctatttttagtagagacggggtttcaccatattgctcaggctggtcttgaactcctgacctcatgatccacccacctcggcctcccaaagtgtcaggattacaggcatgagccaccgcgcccggccgagcaagtgctaacatttatacacttgcctcacgtaattataaattcagtgcaattgtggatcttacatatttagcatgcaccacatgacactagaaaagctgagaaggactaaagctatgtataaagtagctggtgcattgtgttaatgaatggtgttaaccacaccaaatctttattctcaaaatttatttatgcctcacattgttctaaaaaagatgtgagatagctgaaaattgcatagtatacaacaaaagaaaatgagtcatgatatcaaggcaaagaaaaaaaagggggaaggaaaagtaaaataaaaccaagaaaacaatgtctactgtgggggtccatgcatttgttagtttgtcatgaatttggctttagatttctagaacctgacccaaagagggaaatcagttctgaaatttacactgcttttatgattaaaaaacacatttgttaaggtaaagcatatctatgcttcatactgaaacttaagaaaattaatctcaatattccttagtgtggatagacactatgctgccaaaatatatattgtaaagattctatactatcaagaagtccagatagatcattcttttatgtttagagaggtagagtatcaaagactatatatttttcaggcagtactccatataaattatttctgacatcagagatttgtttaagtatttgatgtcaggccgagtgtgatggtggtttaagtatttgatgtcaggcctgtaatcctagcactttgggagaccaaggtgggtggatcacctgaagtcaggagtttgagaccagcctggccaacatggcaaaaccctgtctctactaaaaatacaaaaattagctgggtgtggtggcatgtgcctgtaatctcagctactcaggaggctgaggcatgagaatcgcctgaacccggaggaggaggttgtagtgagccaagatcaggccactacactctagcctgggtgacagagtgagactctgtctcaaaaaaaaaaaaaaaaaaaaaaaattgcggagcacatatcctatgttctttcttatgtgtctgataatgaatgagtgtgggcccacaaacttttaagttggaggcactgagggtatggctgacatctgtttaagggtgtggagatgtgttaactagccacgtagcctactcagtgggatgagctcagtgggaataaacagtagtagctttgggtttccttcctcccttccttcttccctttctcaggggtctccctgtcctgtccctttactgtaattagggcacttcctgaactttctagtgttttcagttcattctagttgtggaaagaaaaacttcacacaaattaaatttaacagagtaaattgagcaaagaacgattccagaatcaggcagctctcagaaccaggaaaggttcagaggactctgcccagcaaggtgggcaggcagcatttaagacagaaaatggaagtgaggtatagcaacagcttgattgttacagctctgggtttgccttattcaaacttgttctgatcacttggcacctgtgactggctagagctcagctgctgtgattggctgagactcagctatttgttacaaaagcatattactaatcaggctttcagtgagttgataaactaagttaggttgcagttccttataaactcaaagttgagaagcatgctcaggccaaatttagcttgctttaacacagtccaatttgaagtttcaatttctcattcactaaaatcttctcccatataagccctgtacctcctggtttgggcctgacactgaggaaggggcttactatcagtgtttgtgtagtgcttctaaataaccccagctttccgtttcaatttcatctttaagtcaagattgtagaaaggtgcttaaaattttgaaaatttagaaaaatttagattacatatccgttttaattttgagttttattttagtttggttagtaaatgtaatgtgtcatttttcttggggatagctgagatttatgacctaataaaaggttaatttttatgattattctgcgattttttaaaagaagactgcattttctctgttgatttgacatttttttctatctctatgagatgaagttgttaaaagtcttgaacacttctattcttttgctgcatattctcccatatggtaagacaagaacattttcattctgttcccttcttcatccctaccttttttgctacgtcctatgttatatcatctgagattttagttccatttttttttgccgtgtatactatatttaagataatatttaacttttaagtttaatttaaaaaaattatctcaatttaattccagttttttattttaacatctgcacttaatttaacaatgagggccgggcacggtggctcatgcctgtaatcccagcactttgagaggcctaggcggacggatcacctgaggtcaggagttcaagaccagcctggccaacatggtgagaccccgcctctactaaaaatacaaaaattagccaggcatggtggcgggtgcctgtaatcccagctactcaggaggctgaggtgggagaatctcttgaacccaggaggtggaggttgcagtgagccaaggtgcaccattgcactctagtctgggtgacagagtgagactccatctcaataataataattattataattataatttaacaatgagctttgctttttattttgctacttggatccctgtcttcattcatttttgttggaatatatcctctgacaattctttccaatcaggtgagtgataaacattctaaaacctagaattatcaaaaatggctttactttttttttttgactcttgaacaatgccttagctgtagagagaattctatttgaaattatttatctatcagcatccaatgtgctgacatcaatgtgattctcatttctttctagttaattttctggcctttgagatttttttcttcattcctgatattctgaaattgtaattgttgatcatcccaattcattctcagtttaattcttcaattcattctctttaatacatagttctttcaataagagaacttctgtcttccttctgtttctaggaattctgttatttctctttctctttctctctctttctgagtatattcctctcttcaatctattcttccttttgataattactattagaaaaatattgaaacttctgttctgttttcatgtctctaaacttttctttcacactacattcttaggaaatggtatgggccagttttgtaaatcattaactcactcttactatttataataacctgttcctctttcaagatatgacatcctgtcctattcatcaaaggatgctatttttcattcattttatgtctcttgttgttttagtaattctgcttcctcaggtgttcattcagtaaatatttactgagcacatcctagaacccatacacttttctagttgctggagattaaatttgatacctttgtcatggtattggctttccacctggatttgtgatggagagctcatccttgtctgtaattgacaggttctaaacatcctctgctggtggccagatctttttgttttacatgaaaattatcttaatatttggaaaaattgacaggtttccaaattcttttgacttttggggctaaccaatattactgagttctcatttgcttttttgaaacaattgactgggccaggtgtggtggctcatgcctataatcccaacaactttgggagtctgagggcaagaggatcacttggggccatgagttcaagaccagcctgggcaacatagcaagggcttgtcttaaaaaaaaaatagctaggcatggtggcatgcatctgtagtccctgctacttgggaggctgaggtggaaggctctcttgatccctagaattcaaggttacagtgagctgtgatgtgtgatggcacctctgcactccagagcaagaccctgtctcaaaaaacaaaacccaaaataacaacaacaacaaaaaatggaacacactggatctaattagaggctactgtctaaggtacggcatgttcatttctattatcctaactccaaactatttcaatcctgcagacacttgagcttctgatgtctgtactagtcaagaaaaccctgttttttcacaaaggaggaaacatggaatgtaagcaaccttctcaaggtcacgtagctaataacaggcaaaacgtaagcaagagccactgtctggagggttttcctctgcatttaaaagcttctgctaaagatatgccccaaagtattcaatccactagtcctttttccaagtgctcagacaggtcaggcaatatccgttccattttctttcttgaagatcttctcacctcctcccattctcttgtttctggtcagcattctctgtagcactactgtaatcttggcattctctttgcctctttcctgcgtttaatgcccactccctggatccaggaattactttggattactcttgtgttttactaaaagacagtttctaaaagcttcctaagaaagagttcatggagagtaaaattttcaagtccttcggtacttaatcatatttctatgctaccttcacacttgattgataatttaccaaggtataaaattatatgttaaaaataactcctgttgtgacaaacaacttatatgtacttgtgggaagacctcctttttaattgttagaacatgagcattgcattttttgcaagtacttaattgtctgtgtatcactgtggcccttagaaaattttctaaagtacttagaaaatagaaacctatataatagagcgttttctattttctaagtactttaattatttacttaggatttttggttacagaatgatatatatgagttgaatttgaaggcattgttctgcttccagcattgttagtgagaaatccaatgtcgttgtgagtcctgtcatttatctgtgaccagtttttttttttttcctggagtttttagcatcttttctgtacttacgaacttaatatctcacaattatatgccttactttgggttctctttttattccctgtgctgacaattctatgaggattttaattttggagatgaatattatttttcatatttttgtcccttccatttatttaaaaaaatttagatttcttattctaaatgttggattgcctagattgagcctaattttcttatgttctcacctttgattttcatcttttccttttcctgagcaattctcttgtaatttatcctacaaccctcctactggcttccacatttcatttataatatttttacttttggagagctcctgcattctgattttcatagcattctgttcttgttttgtgggtgcaatagtgtgttttatttctttgaggatgtgagtcatagttgttttttttaactgagcttttttctgaccttatagattatgtttcctctaagattttttccagattctttctccccctccttatctttttgataatagattccctccaatgcctatcaaaccctggacatacattcatactgtgatgctataaggtgctgactggaatttctgggtggaggtatcacttgttgatggtaacttcattataggatgagtagtgaaggcagtgaatttgggtcccaaacgtcactgtgaagacatctttcttttagagccattcattttctctagaaaakaatcgtttagtcccctgccaggagttgtgggagtagtacacgtggtattctggggaaaatgactgagtgcccttgaggtcagccagattttcacttaaacctctgctttaccttctcttttggagcttgtaccctctaaatactatccaggttctataaagagtaaatctctcttataaggaagaagttaagggtggttggctgatttcaacaaggttcctgccagggtttaatcatacctgcatagacttccagccagtcccctgctaaaacccacacacttctctccttctttccaagttgcttccaggttctcgtccatgttttttgtcttccaagaagatattgaaatgttttctctgctcatgtctctcctctcatgttcttcttgtgggttaataacgtttgtactcctttactgtcatgtttgttgtagtttgcgaaggaaaggagatagatatatgtgattaaccttccaggttgagctaaagtctggctgaatatttttattctgtagtagaagaaaaacttatttatgtactcccagatgcaataaaatttggatatccttaaacaatcctaagaaagaaggaattcattagtatcacattttaatgaattctgaagcacagaactgtgtgaatcgagaaaaaatcagaagtatcagcttctcctccagctaacttttggaatataaataccttttgccatttacctaactgtactctacatcaagatggcatacctttaaataaaaacattttaaaattaaaaactaaaattctgttttcctctggatgtaccatgtgacttttctgagcacacgtgattcgcggtttttgtgatttatttttagaggagaacactaaagaatggaacaaccacagcttgttactttgcaacaattcacactgactcatctctgctccttgccgacattacaggtgagcaaatgaagcaygatttatgggcacctcaagcaaagacagccagaccatcgtggcaaacaacttatatgtacttttgggcagacctgccttttaattgctagaacatgagcattacattttttgcaagtaattacgtgtctatatgtcactgtggcccttaggaaattttctaaagtacttagaaaatagaaaactgtatcatagagtgttttctattttctaagtactctgattatttacttacaatttttggttacagaatgatatatatgagtctgaattttgtgtattaatttagggctttttagggaaactttactaattctagttgtggtaatagtttcttatatcagcagatacatggtggctattggctagagtcagggcactgtgctagatgctggaaacgcaatgagataaaaaatagtctctgcccttgagaagccagacagaatacctacaccattgatcactaaccttagtaacaactatggtgctgttactagacgtctagcattgtgcaaagcactctggaagaattagttcagcagcaaacagccttctgaagtggttactgatgtcctcatgttacagatggttagactgacgctcagagaggataagtaacatgcccagggttgcacagctagtaagaagagctgattctggattcgggttgatgattccaaaacttgtacccagcacagtacctggcacatagcaggtgctcagtaaatactgttggctgatacactgatgccactgtttgcttatgcaaaagacctgacctaatgggtgactctgaaaatagatactacagtcttcagagaaggcaaagagaacccagaactacgacatctgggaaggctttatgaaagggtcctttaaactkggctttgaagtaaagacaagatgaggagaggacaaactgtcttctagataggggaaggacacaggtatgggaacaggagtgtcaatagtggatgcagggaccacagtagtttaactagaggagtggattcatcgcctgggggcagtgggagaagagggtaggcagatgggagggttcacattgtagaagagctcaaatatgcaccaaagactcaaaaaaggttctgagtccaggtgtgagtgatgtgatgaaagtggtattttaaggaagattaatctaatggccagttatctaaatgaattacaggggaaggagagaggcagaaaggtttttaaaaatctcttatgacagagatggagacactgtaaaaacaattaccattgtcccatatagcctcagctttcttgctgaaatagaattcttccagcacctttgatgaggactaggttctagtgctgagagctgctagtaagactgcgtaaaattcctcacagataatattggcattgtttcagttaagaatagtatggccaggcgcggtggttaatgcctgtaatcctggcactttcggaggccgaggcgggcggatcatgaggtcgggagattgagaccatcctggctaacatggtgaaaccctgtctctactaaaaatacaaaaaattaaccaagcgtagtggtgggcgcctgtagtcccagctactcaggaggctgaggcaggagaatgacgtgaacccaggaggcagagctttcagtgagctgagattgtgccactgcactccagcctgggcgacagagtgagacgccaccttaaaaaaaaaaaagaatagtagcagtatgttgcctagataaccacatgcctgacaccttatatatattattgcatgtattcctcacaaccctacacatagcagagaacactgtacatatataggtttagaccttaaccaaataatatccaccacctggagtaatcagaggaataaggaatcagtccaaatctttccaattccagtgctcatgttcttatccctcagccattctgtgttttgtctagaagaggaccatgatagagagagggagagagagagatccaagggatggtggtagagtaggagacaggagggagattgtaagttggggtagaagaagctgagtgtaggtatgccaatgactaagagagtctttctttaggacctgagactgtttgctcctttaccatgtgataaaatgagagcaaagatagttacatatttaatgaaaatatagacacactggataagcaaagggaaaaactgaataataacttaaaaacacccagccaagcacagtggctcacgcctgcaatcccagcactttgggaggcccaggcaggcagatcacaaggtcaggagatcgaaccatcctggccaacatggtgaaacactgtctctactaaaaatacaaaaattagctgggcacagtggtgcgtgcctgtaatccaagctactcaggaggctgaagcaggagaatcacttgaaccagggagktggaggttgcagtgagcccagatcacgccactgcactccaggctggtgacagagtgagactccgtctcaaaaacaaaacaaacaaacaaacaaaaaaaccaaaaaacccacctgacagcctgagaatggggatgggggaggtagtgggttaaagtgatgaatagaaaaacttttactgtttactgaatatagtagggaatttgtggtggttcttgttcttaagtrgtgtgatggtggatgatcttttacattttcatttatgttttccatatatgattttaatttaaaaattactgttgaaagcttagaaaaagtactgttttggccgggcgcggtggctcacgcctgtaatcccagcactttgggaggccgaggcgggcggatcacaaggtcaggagatcgagaccatcttggctaacacggtgaaaccccgtctctactaaaaatacaaaaaattagccgggcgcggtggcgggcgcctgtagtcccagctactcgggaggctgaggcaggagaatggcatgaacctgggaggcggagcttgcagtgagccgagattgcgccactgcaatctggcctgggctaaacagcgggactccgtctcaaaaaaaaaaaaaaaaagaaaaagaaaaagtactgtttcagaaacaaacatgccttcatattctttttgtgtatactttacagataaatttggacagcgggcatttgtgggcaaagtttgcatggatttgaatgacacttttccagaatacaaggagaccactgaggaatcgatcaaggaaactgagaggtaaaaggcccatttgtcttgatttgtcttacaggtgaattcctgtgctgcactgatggagttagrgatggaaaaaggaaacaggatactgttatcacccagttgggatgtgcacatagtgactcagaatgttctgtttaatgcaatgggtcggttagtctacagtgaatttgatcaaacactcgataatcattaatgatttacaaagagctttcctttgtagtgccacacttgatcctcatagaaatctccatgaagcatctgtctttttatttattttttatttatttttattttttttttttgagacggagtctcactctgtcatccaggctggagtgcaatggcgtggtctcagctcactgcaaccttcagctcactgcaacctctgcctcctgggttcaagcgattcttccacctcagcctcctgagtagctgggactataggtgcatgccaccacactcagctaatttttgtatttttagtagagacggggtttcactatgttggctgggctggtctcgaactcctgacctcgtgatctgcccgcctcggcctcccaaagtgctgagattacaggcgtgagccaccacgcccagcccacatctgtcttttatgataaggaagctgagtctgacataggctaagaggcttgctcacagtcatacagcttttaagtagtggagccagaattcaaaaccagggtctatgactctaaattcaaagttcttttttttttttcttttcttttctttttttgagacagactgtcactctgtcacccaggctggagtgcaatggcgcgatctcagctcactgaaacctccacctcctgtgttcaagagattctcctgcctcagcctcccgagtagctgggattacaggcacgtgccaccacacccagctaatttttgtatttttagtagagacgtggtttcaccaggttggccaggctggtcttgaactcctgacctcaggtgatccacctgccttggccacccaaagcactgggattacaggcatgagccactgtgcccggctcaaagttctttctctcatgatatagatcacacctcatattcaatgtaagtaaagagaataaaagagagagaaacagagggtatgcaagaatacttgctatggcatgtgttaatttaaaaatgatgatggaagtgaataattatttgtgaaataaaatagtatacaagaagttaggaaaaatgagttatagttacaggttaatgaaagactttcactacaaaaggatttttttaaaagataccaaagtaatatgtgtttccatggtccagaacttagagaagcacaaaaaggtataaagaagaatttttttttgtaatgaaaccaccaaaagttaccataatagggtatcttttattgttttctcaaggtggtatatgcatccttcactactatttcgtcctaccttgggaacaggaaagttgttctggatgtatgctgtaatggccataacaggctaatatagggatctagaatatcccctctccacaaaggtgacctgaaagaacatctctgcaagctgaaatgcaggcatacaggagggaagatgtggttcctttttctgctttggttctacatctgtgctcctagggaatagggcctcactctactacctgtaataaaagctctgaggatgttatgtggtgacacaggctagagagagaccatgggagggaccaaggcccactctgctgctgctggacattgagctggattcccaaagattgtggacagcctactttggaaagatttccacctcaaagaataggataccatatgcagatagaatcataaaaagtaaagatgtgcaaggaaaatgaaaacatgtttccacgtaaagacttgcaggtaaatgttcatagtgacatcatttatagaagacaaatgcagagcagkttcactgcacataggtatcaatcccaggggaggactctaaacacctcaccaatactgcacaccacttgcatgaatctggtgagacagcacacttatacaacaagttaagcaaagcaagtttattatgcacagataggtagcaagggacaatagaagcctwggtgaactgatcctccacggctcaggaaagttgcccaagagtctcatatgtgcatgccccacatcacatcatagctgagggaccctgtgagcatgctctacctgtggttttatacccagatgaaactggtctcactgagctaaaacattgcagaacatcctgttctaggagaaatgggaacagaacccaggctgttctgaccagtttctccatatctcagggtggttgcatttccagcacattctacagttattctgataactacaagtaagaaaaggggaaaaactgggtcaccaaggccatatgagaacttgtcctgcaccaaatagtggaaacaaccaaaatgttcataactggtgaatggataaacaaaatgtggtatacaatggaatattattcagccataaaaaggaatgaagcactgatacatactacaacatggatggtttttaaaaacactgtgctaagacaaagaaaccaaacacaaaaggccacacattgtatgatttaattgatatgaaatgtatagaaaatgcaaattcatggagacagaacaccagcgattgcctggggctggaagtaggaaaaactattttttttttttttgagacggaatcttgctttgttgcccaggctggagtgcagtggcacattcttggctcactgcaagctctgcctcacaggttcatgccattctcctgcctcagcctcccaagtagctgcgactacaggcgcccgccaccacgcccagctaattttttgtatttttagtagagacagggtttcactgtgttagccaggatgctctcgatctcctgacctcgtgatccacccacctcagcctcccaaagtgctgggattacaggtgtgagccaccgtgcccggcccaggaatagctattaactaaatgggcccaaggaatctaactggggtgatgagaatgttcaaaaactaggttatgatggtggttgtaaaacgcaataaatctactaaaaatcatggatttgtgcacttaaatcaggtgaattttatggtatgtaaattatacttcaatataaatagtttttaaaaatagcagtatgtgggtgagattgtgttcatgtacatttgtgttttctagttcacatccactttagataagagttgagtagaaagtgattagatttttttaaaaggaagattttgtacagaataaatagctgtgagcatatttgcagagactccagctctctgtgattttctcctgtggtacagtagtgcttctcttgatgcttctagcattcttcccctcacttttctcccttaatcacacattgttgaagccaaaaccaaaaaacgcctgagaagctcaagatgtattaacacactgcgtcgaattaaagttgaaagatgattaatgcactgaggcattcttcctatttgccaaggtcactgtgtgggtttgtccaacttgaatgtcaatattatttttgtgtaacaaattatatttaaagcctgcaggaacttgctataggagtcctagggtaaatcctcttgtaaaatgaagtaaatyatttaccctctccctaccctttattatagaccagggcttctcctgtagattggatttgcttttaagtacatatggcctgctcattaaattacttttggttgtgggtcatactatggcttgagattatgaattttcattatgttctttttcatacaacattgggagattctactgaccatataaatacttttcttatattttaaaatggcatttctatagtaccttaaggatttgacaagaaattgtattggtttatttatttatttttattttctattttttattttttttttagatggagtcttcttctgtagcccaggctggagtgcagtggcacggtctcagctcactgcagcctcccactcccgggtttaaacaattatcatatctcagcctccctagtagctcggattacaggcccctgccaccatgcccagctaatttttatgtttttagtagagatgaggttttgctacattggccaggctgatcttgaactcctgacctcaagtgagccgcctgcttcagcctcccaaagtgctgagattacaggcgtgagccactgcacctggccaaaatgtaattttattctgttcaacatctaagagatacagaagaaaatgctttagatacaaatctttgccaagaccaaacatattctgatgcaggttttagaagttcagctttttttctgttccccagacccctttccccttaaaagtgtcctctgaaaagggagcagaggggctgcttacatgctcacagagaggaggaagtacccgccttcctttagcatcagcctatcccagcttatctattaatccatttttgtggtgatagtaaaccttaattctcattttgttctgaaacaaaggaatgccagaaggcagaaaactacagctgcctagggagggcagaaagagccatttcatagtctttacagttgccaccatccctgcaggcataaactggtgggatcactaccatcccattccccatgcacctcacaaccaactctcgccttttccttctgctttactccaaggttcatccccaagagaactctacccttgtaaataaatggtgatgttgtgggaacaagtagcttccactttaggagaattcgaagtaaagagcttcatggcttctaaaagcctccaagtgcataggacttcatgactctaacaaccgtagagcataatatattgcaacatttctccaaacggagcttgagctagtagaacagcttgagtgctgtgggaatatttgagaacagcccgaccgatgctagatgataacattacgtttccctgtgattttgcactccatctctggctgcaagtaaaaaagcagagtaattactacttgttaatctttaattagtggtggtggaacatgtgcagcattagaaatgtttgcatgaaaatcaggatatgtaagaatcatgtttttatctttttaaaatgtttatttgaaaatggtcggccggtcgcggtggttcacgcctgtaatcccagcactttgggaagccgaggagggcggatcaccaggtcaggagatcaagaccatcctggctaacacgctgaaaccccgtctctactaaaaatacaaaaattagctggacgtggtggcgggtgcctgtagtcccagctactcgggaggctgaggcaggagaacggcgtgaacccgggaggcggagcttgcagtgagccgagatcgcaccacttcactccagcctgggcgacagagccagactctgtctgaagaaaaaaataataataaagaaaagaaaaaaagaaaatgctcaagttttctaacccatttgttgytttatttcagatttgtgtcagaaatgctccaaaagaacgtgagtaactttgttcagagctcgcttttagattgcctttgcattagctgtaggattcataaagttgcttgatagtgattagtctgtgtacgactggcttatctcatgcatgtagaagtatttacctagagcctgatgtgtcactgtggactgtcactgtcagctcagtgaagtcagacatttttaaaaaattatcttaaaatatttaattgacaaaaattgaatccactcaaggtgtacaatgtgatgatttgatatatttatacattgtttattgattattagaatcaaatttgttaacacatctattcccacacacgctgtacactasatcctcagaacttgttcatgttataactgaaaatttgtaccctttgaccatcatctccccacataagccagcaatcccacttttgggtgtatatccaaaagatgcaaaataagcatcttgaaaagatatctgcacttctatattcattgcagtatcattcagaatagccaagatatggaaacaacttaagtgtctgtagacagacaaataaagaaaatgcagtgtatatgtctatatacaaacacaatggaatattattcaaccataaaaaggaaggaaatcatgccatttgtgacaatgtggatgaacctacagcccattacaataagtgaaataagccagccccagaaagacaatactgcatgatctcacttatttgtgaaatctaaaaaaagtcaaacttatagaaacagaggtcaggcattttttgctttcttgggggcagctctgtacctagccctctgtgttttgttttaaatacattttgaaataatgaaatattaatgattttagtggatttgtttagatatcgttcacatatgtacaaacatcaaacttgctttattcttaaaattgtgtgtacttttcttggctcccaaaccccatgcctacatgcaacagaaaaactaaatttcgtcaggcaggtaaacttcgtcttaagttcactaagcttttagttgatccaatttttattaggacaatctcagtcactgctcaggttagagttaccgtctcagggtaggtttttcttcctcagtggttttccttacccccctctgggatcttctgatttcacaggattggtttctggcaagcagggacagggcttgatgggcgtgggctgactggtggcacctggaagttggggactgcttggtggccacctcaacattggctctggccacttgtgcccttggtctgctctgtaacacaggcagtgtctagtcctatgcccctgccactggctgtcttggtccctatgtgtgtgacacctcacatggcctgcaggcatgcagcaggcaccccctattgtggtcccctggtgttggtgagcctgtggagacaatgctgtttcctgcctccacccctaacaggctggcatgtggctctgtcaagcaatctcttagactggcaagcctgacccttccctgatcatcttttggggcctgataggaaatcataagaaatctcaaaatttctttccatctaactttgggagatttagatgaaactttgtagatccttatcctcactacccctctatgagtccttctctcctgcctggccactcacctcaggtgccaccagagccaatcctacaactgaatagtkctcaggaaggctgtaaccagcacacctggacaagatgtattcccaaaatggaatcggctatcacctcacttttagtctccccagcactcttttaaaacttcagcctccacttttcttcataaaggctacccagtctagccttcatcagagccttaatgtggtggcagaggagcatctgtcatttgggataggatcttttgttgaacttgggtgctgaagaagataccctcctttattctccactttgagctgttttcatgaaaccccgtacttccaccgactgttagaatggaggactgctccccaaaatgaagacacaaaatcatcttgctgtatgatatgcattttggggtacccttcacattcatgatatccatagtttcctttttttgaaaaaacttttaagttcaggggtacatatgcaggtttgtttacacaagtaaatgtgtgtcataggggtttgttgtgcagattatttcatcacccaggtattaagcctactacccattagttatttttcctgatgctctccctccttccatcctctacctgccgataggccccagtgtttgttgttcccctctatgggtccatgtgttctcatcagttagctcctacttataagtgagaacatgcaatatttgactttcccttcctgcgttagtttgctaagaataatggccttcagcttcatccatgwccctgcaaatggcatgatctcattctctttttatggctgcatagtattccatggtgtatatgtaccacattttctttatccagtctatcattgatgggcatttaggttgattccatgcctttgctattgtgaatagtgctacagtgagtgtatgtgtgcatgtgtctttataacagaatgatttatttccttttggtatatacccygtaatgggattgttgagtcaaatggtatttctgtctctaggtatttgcagaatcaccacattgtctttcacaatggttgaagtaatttacactcttaccaacagtctataagcatttctttttctccacaacctcaccagtatctgctatttttctgactttttaataatatccattctgactggtatgagatggtatcttattacagttttgatttgtatttctctaatgatcagtgatgttgagcttttttttcatgtgattgttggctgcatcaatcatatgtaaaacagtgaaaagtgtctgttcatgtgctttgcccactttttaattgggttgtttttttcttataaatttgtctaagttccttatagatgctggatattagacttttgtcagatgcatagtttgcagaaactttctcccattctgttggttgtctgtttactctgttggtggtttcacttgctgtgcagaagctctttagtttaattacatcccatttatcaatttttacttttgttgcaattgcttctggtgtctttgtcatgaaatcttttcccatgcytatgtcctgaatggtattgcctaggttgtcttccaaggttgtttttttgttgttgtttggttggttttttgtttttttttgagactgagtttctcttttgttgtctagactggagtgcaatggtgagatctcggctcaccacaacctccgcctcctaggttcaagcagttcccttgcctcagcctcccgagtagctgggattacaggcatgcgccaccacgcccagctaattttgtattttttagcagagacagggtttctccatgttggtcaggctggtctcgaactcccggccctcaggtgatccacctgccttggcctctcaaagtgctgggattacaggtgtgagccaccacacctggcccttccagrgtttttatagttttcggttttacatttatgtctttaatccatcttgagttaatttttgtatatgatgtaaggaagaggtatcaattgttttyaattatctccagtattctagagtgaagcccatagtgacaccacgtttttccctctcctgctctgagactttgatgggtgaactgggcaacattgctaaaacccgtgatttgcacattcaggtgggtattcttcttctctttatgcctctatgcagacctgcaagatttctcagcacccttaaatcatcatttccaataatctgtagttgttttactgagtaatctgtttcttcaactgagatatcctagagtcacagcataacaggagagaaaggacccctgtagatatcacctaatccaattctttcattttgcagataagaaacctgaagttccttataccctcaatgttttctgatcagtcttctaaagacaagaaaatcgttttaagtagtggcaagatcaataacagactgtgatctrttctctgtaggatacatttaatgcatttatttcctacttctctttcacttgatactttctcagtgtgttctgtaccttcattcttagagaaaccagctattatttgaaaagcaaaaagagcctaatttccaccttacaaaatagcatttaaaatcccttttgttctgagtttcttaatttaaaatcagaacaaaaaagtataccttgctttgtcattaaattgttgcaatttaggaataaaacacttttttaaagcttatatctgggttaaaattgagagttccccttctcccatccaagcttaattacatactgtactaaaatttctcctcttargagttgacggtcttataagaaaggtcagatcagggcagagacaacacattgattctttaccatttgtaaatcagtgtttttttggtttttgtttcccaaatctattttcttaggaaccattaaccgctctcaccttccctattattgttattattatttgcagcctataatttttgaatttttaattcagtcccacacatttctctgctggagataaaattcaaaacttacctgatgtttctgctttgcaaacaaaatgcttctgtcgccgacaaaataaaatacacatgaacatttaaaaatacatgaaaaataagatgagaagaacacacaacaaaatcaagtttatccttgctagagagatgcatgtggatgtatgcacatttactcacatttatccaaatgactcgaatcatcagattgtcctttcttctgttgctgtccatgcatttcatcggtggtctgggacttcctcaaggccagggatggagttcattgtctgagtaaaacacgtgttttcagaacattgctatttttttcttttaaaaatttagctacgcatattctaaatggcattgccattcttggaagtattaattatgccctcttagattttgtggtgccctagagaaaggtcttaggggcctttttcagtgtgggggcataggacttattgttttgcttgcatgtggattcttatgggctgtttcttgatgaccgtggaattttctagctcagctattttcaaactcttttttggagaactcattctggaaactaacaaagggcacagaatggagacagggtcccagagtctcaatcctgctgcatccggaggggcagtgcttttatgccttctatatattgggtttctgtgaatttttatatgaataatatattcagtgcygagagaatttggaaaatcactcatctagcccaacccttttttttttttttttttgaaagatgggaaaattgctgtccaaagaaaagaatgactttctctaggacacatagctgtcagaacttgggccaaacccagctctctttactcaaattccagtgttcatataagtgaaccccactgtctgcttttttatgaacactgagctcttttcttaaacggccagtatggccagtcacggtggctcacgcctgtaatcccagcactttgagaggctgagcccggcagattacttgaggtcaggagtttgagaccagcctggccaacatggtgaaaccccatctctactaaatatacaaaattagccaggcatggtgacacatgcctgtaatcccagctactcaggaggctaagacaggagactcacttgaacctgggaggcagaggttgcagtgagtggagattgtgccactacactccagcctgggcgacagagccagaccctatctcaaaacaaaagaaaggccagcaccagaagaggcaggttgctagggtcctgactatcttcaaggaggacttcatatttgttccagctggaggtcagaatttgaaaagactttgttggaaaaatttgtcttgatattatacatacacatacacacccacacccacatccacacacacacactacatgttcataatattcagtttctttgtcatatacattatattatctatgatgaatataattgtttctaacaaaatgcatgtgtaatcttcattgcctttctatgtggtcccttaaataggcaagtagaaaaccattcacaccattttgaggtaggaagtgtaatttctaatggtattttacagaagaaaaatgaaaatattatttttttcttgtagagccatataagtgaaaatcgtgatgaagttgaagctgtgaaaaacttataccccagttataaaaactacacatctgtgtatgataaaaacaatcttttgacaaataaggtaagttttatatcatgacataatctgtttaaaggagggcatatttatctcaattttaaaatctcaatagtaatcttcagatttctgatatgaatacatttctttaaaaattttttttaaagttttaatttttgtgggtacacagaaagtttatatatctatggggtacatgtgtatacatttcttaaattagagtaaagcctagtgtgtgtgtgtgtgtgtgtgtgtgtgcgtgtgtgtgtgtgtgtgtagttaaaaatggacccgaagtttcatcttagtgaattaaatgtaaaggcttcattgaagatgggaatgtcatttggtccaaggacattttaacagtatctattagaatgtaaacctacatttctttgagtcagcagatgcatttctaagaattcactctaagtaatatgaatagggatgctaattttatattaaagtttaaaaattgttatcggtgagggattaaattacagagcatacataggattttatccagcattcacaaagaaagaggtatgcaggcttacaaggaagaatgtttgtgtaatattatttgatgtgtatgtacatatgtatagatgcatgcttacttagaaaaaaactgtctgaaagacacaacttgagtattaaaaatgactcttcctgagggacaaaccagaaggactttctgctttttatttttaaatactctgagagtgcttttaaaaaatgagtatgcattactcctataattaaaattaatatgtgtgaagagacctcattacaataatgtactacttggccttggccttcaatgaaatgtacaaaccgcatggagagtttaccatagcaaataatttcttagtgactgtgtgaatggagatatgaatataactgatttaaaaggttaatactttgcataaatcatgtaaaagctacaccatagttttcattctttatatattttccatatgattaataaattaaccttccatttgcatgttaattttatttgaacagagattgggaaagttatattttaataataattctgtagtcactgggccgggcctggtggctcatgtctgtaatcccagcactttgggaggcagaggcaggcagatcacgaggtcaggagatcragaccatcctggctaacacggtgaaaccccgtctctactaaaaatacaaaaaaattagccaggcgtggtggcaggcgcctgtagtcccagctactcgggaagctgagataggagaatggcgtgaacccaggaggcggagcttgcagagagtcgagattgcgccactgcactccagcctgggcgacagagtgagactctgtctcagaaaaataataattctgtagtcactgaaccgtgcctctcaaaggggaaagcaagttgggtacaggttttgtactgagagaaaaataattttgaaagagtaaagtcttatttaagaaaatctacaaataaatactaccaacattaaaaatttagagaggtctcatgtgtgtgcagtgcctgctttcttggatcaattttactttctgaattaatgattataagatgttaaatttcctagtttttatgaaaatataaacgtaggtgagttaaaagtttatttagttgaaaatatcaaggccattggcacttacattgaagctaggagcagaaataaagaacagcgctttgcaggattactctcacagctttcacatactgagaagggacttttagttctagaaagtttttttagaattggagcaagcacaacactaccagttgcttcccatataaacttagaaaagaaagtaacttgacagtcttctaaagtagagatgagaaaatcatgttatcttccatctggatggatattctgtgctgtagatcacctggaccaaaccctcattactttatagatcaacaaaaagaatctaagtaaactccacaaatttcctgagactttcgtaagacaatgtgtttacaggccttttctaaggtataacttgtacctagcaactttgtacatatagatcatcataaatgttcttgtgaagatgctaacagccaagctacagcttcrgtctctctctaaaataccttgtgagtgagtacccacttaatcatttgtgagcggtaaactccacgtagggcactcttytctccagacagtgatggcacacggctgctacctctctgcagaagaactgaacgtattccatgaacgaggagcatccatcgcacactgtcccaattctaatttatcgtaagtagacaatgattgtttggtagattacgaatgattgggttgcagattagcagccaaatgcctttgtttcctctgtcattcctccaggatctcccctctattctgtgtttggcaggacccagatagatagacatttactcgtgctgttgaggagtaaaagagaacacgtaagaggacatttatctcagaggacacgtgaagagcacagcatcttctgaaatctctgagtttgtacaaaaaaaggacaatagggaatacaacataaaaaatttacagtgaaagtactgaaagaacccatatgtcagccaggaaatccagaagagggtagtcactcccattactgtttgtgctgtagtgtgagaaggaaacacagcaataccaaagcaaatgcactatgatgtatgttaccctgttggacctgacggaatgccagcccacacaggcaagcccaggaggaccttgtcctattataattccccagaatacagaggtgttatttattaactggttcttaaccttttgaaaggtgatggatccgtaaatgaataaaatgaaagttattgcctgggcgcagtggctcacatctgtaatcctagcactttgggaagcagaggcaggcagatcacttgaggtcaggagttcaagaccaccctgaccaacatggtgaaaccccatcagtattaaacatataaaaattagctgggcatggtggcaggcacctgtaatcccaaccactcaggaggctgaggcaagagaatcgtttgaacccgggaggcggaggttgcagtgagccaagattgcaccactgcactccagcctgggtgacagagtgagactctgtctcagaaaaataaataagttatagcctgtaatttcaggggaaaaaagcccatggatattacaagtgttgcatctaatttcagggaattcatagatctcatgatgccagtccatggatgctaggttaaaaacccatgcttgtggctgtaatctcagaaaacaacttcaggggtcgggcgtggtggctcacacctctaatcccagcactttgggaggccaaggtgggcggatcacgaggtcaggagatcgagaccatcccggctaacacggtgaaacccagtctctactaaaaaaaaaaaaaaaaaaaaaaaaaaaatattagccgggcatggtggcgggcgcctgtagtcccagctactcgtgaggctgaggcaggagaatggcatgaacccgagaggcggagcttgcagtgagccgagatcgcgccactgcactccaacctgggcgacagagcaagactccatctcaaaaacaaaacaaaacaaacaaacaaacaaacaaaaccttcagggaagtaaaacagggaagggaaagaagtcagtgaagatcgtatcatcacggaagttaccactgtgggctcccggagtttaatccttctatttaatagaaaactcaggtaaccagtgtccaaaacagaactcaaagttatcctgcccaagaagtgagggagctggctgtgacagtaatacccaaatgcttatgggttgttgttgagggctcctgggcagagtggagaagagtattaattccctggaacttctggccgtccccaaacaagggcagagcaggctctagcacaggagagagctgagaaagctcctaggcaaagagctggaggcattcacagttggaaatctagggactttgcaaattacaaagatatatgtcagtgtcattatgggaagggtgctgagagccacagtgacatatttctggagtgctttagggaccccagaggttctgagttttcagacttaaaggagtgacacagggaatcttgtctatgtacagcttagtgactataattagggtctagttacttgatagtggaaggatttaacacccattgggtgttaatatcctctaaattaaagcataatctagctttgcaaattgagttttgaagttaaatttctttaggacacatttctgtttaaatggtcactgctgttctttctccagcaactgagagatttattatgtatgcaccagggctttcaaaattagagttatgtgcatcttccagcaaaccactttgacctttgcaactttttagaattctaaggatcaccttagttttcctttgtctctttagaaaggcagcacatggtgggcatggtggctcatgcctgcagtcccagcactttgggaggccaaagtgggaggatcacctgaggtcaagagttcgagaccagcctgaccaacatggcgaaaccctgtttctactaaaagtagagactggacatgctggcgggcacctgtaatcccagctactcgggaggctgatgtaggagaatcgcttgaacctaccttgaaggagatggttgcagtgagctgagattgtgccattgtactccagcctggatgacagagacagactctgtctcaaaaaaaaaawaatatatatatatatatatggctggcacatctctttagctcagagtcacaaggtcccaaattcagcccaggaaccatctatcctactttctctgtcttcagaggcagcgtttgaacagtcaggtcctgactttttaggctgcacccctttttctagttgtactcccctttttcgatcttaaagtcactactcattcagggtaacaaattattccaggcagagagaataggtaatgctttataatttctgcttcctaacataaaaagatgtgttggttagaaaatattaaagacagataaaagacttttgtattaattgcaaagtttgatttcttcatttttttcccatacaaacgatcccctgcttttccttctggctcttgctgctttgtgcccacctgagattaaccttggcccaaggattaggctattttatgatcctgtttactccaggacttggatggtctgatttgactaatatgtttgtgtcaacattagagccgatatattgggaagcacaattttcagtggyatcaccgtcattgttattagtgttcatcttttattggaamcacatggatctccttgttctgacatctcctctctctacaggctcagcagtggatttctaaatgtgctagaagtcctgaaacatgaagtcaagatagggctgggtacaggttagtagttcaccatttggagctatggcaaagtggttgattactgtgtaattttctaatgtgactaatttgcaggtgactgttctgtttaaaaaaaaaaaaaattagttttgggccgggcacggtagctcacgtctgtaatcccagcactttgggaggctgaggcgggtggatcatgaggtcaggagttcaagaccagcctgggaaacctcgtctctactaaaatacaaaaaaatagccaggtgtggcagtgtgcgcctgtagtctcagctactcgggaggctgaggcaggagaatggtgtgaacccgggaggcggagcttgtagtgagctgagactgcgccactgcacttcagcgtgggtgacagagcgagactctgtctcaaaaaaaaaaaaaggaaattgtatgcaaagggagaagttttgatgatactgacctcctgaaagctgttatccctgtttattattcaaagattaggctataaaggatgattaattccttctgacgtgtttcagaggtattytaaaaagtccttgacttttgttttgttttgttcttctggctaggttttaatggtttggatttctatatttttagttttcaataactgtcattacaaatgctgtctcaaaagaaatttttttgtccttgccatagtgagcacagattcaatctatgacagaattgagaattcggatgtatgttaagaattggttttgcttttaagcaacgtttagccaaatgagacctctccatatccacaggcagtctgcttgtctactaggctgagggatgttctaagtgcatatgaattagtgacrgattagtgatgtttcctttcttcacagtacattttaattgtgtttcttgagagtgtgcaagcgttgcttgcttcgaaagtgtgagtcaggcccaaatttctaggtgtcctctgtgaggcttcttttatgactgaatgactgaattaaaaattkttttaatgggtatggggcaggaggacrtgttttctgttcttgatgcctttatcttcctcatatttaagagcatcaggctgtatgcatgttgacactggtggttttcatcactttctgcaggaactcaagtctcagtttgttatagtgagacattttacaaagtaattaactggtaagacacaataatacgcataatgattttactgatattttgaaagaggtatatattagattagaagtttttccctattttatgggaatcaaagtaatcaagattttgaaaattctaatttaagcctgaaatcatcaagattgtgataattctacataaagtcacaggtgttaaaggaggaaaccagtgattttatgttcacaaaaaagcttcaagggataagaaaaaaatggccaagagttttggttacacactatagtcagttaatatgaaaaatttagcagacacataaaaatcagtcagatattgttttcagatattctaggattttggtctccataatttaagttcatcacatgacttccttttcttgactttggattgtttagtgatggtctataaagttcaagttgagttctagctgtcacttattatctgtaagaccttgagaaaattaattttctagtagtttttagtcaaggattcatttcctgatttctacaacaatagtaactagcaattacaactatgtctatcttacaagctgtttagagaattaaactttaaaatgcatgcaaattggttagcacagtgcctgcctggcacatgacacaaatcaatcaagattggcttaaaaaggaaagggcgaagttggtgtattgaccaaacgtttgaataaatatgacctattagcttatttactcagaggatggtgtttcatttttacctagtcctttttgcaatttagtcaccctctactctactatttcctaaacgtgacttttgtgtatcaatttacccttcaatttgtaaactttagaagattattatacctcatactatgaatagagagcaagtccaagagcaattcacacaccctgtctataacaagtgcaggcagatcttgacttgcacaaatattaggtagaagaaacccacatgaaatttaacagaaatatagcaaaacaagataaagtgatatcacaaacaataagaatgtgaacaaatatctgaaaatgatctgctttaggatccagaagaaaatttcagaaaattgccttcatccctggagtacaggaaatcatggttctatgaaaagattgtggtagaaattttagaaatcaaggaagaaaactgaaaaaaatcagattaaaaagcacatagactctcatacactgatggaaggagagtggatggtacaactactttggagaatgttttgggagtttcttctaaagttaaatatacgtctacatatgacccagcaattttactcttgggtatttaccctagagaaataaacatatatgtttgcagaaatagttgtatgaggcccaggtgcagtggctcatacctgtaatcccaccaccctggaaggccacggcaggaggattgcttgagctcaggtgtttgagatcagccttggcaacatggcaaaaccctgtctttacaaaaaatacaaaacttagctgggcatggtgacatgcacttgtaatcccagctacttgggtggctgaggcaggaggatcgcttgagcttgggaggtcaaggctgcagtgagccatgttcatgccactgcactccagtctgggtgacagagtgagaccctgtccctaaattaataaataaatgaaagaattgtatgaggatgtttatatcagctttatttataatagccccaaaccagaaacaatccaaacatctatcagcaggaggatggataagcaagttgaggtatattcatataatgaaatattatttagcagtaaaaaacacactacagatatatgcaaaatgtgggtaaatatatgccagtgtgtgggcttaaagagcacacactgcatgattccatctgtatgaaactcacagaccaacagaactaactgatattggtagaaatcagaaagtggttgccaaatgttgtaggtaagaatttggggaattgacaggaaaaggccatgagggaatttgctggggtgatggaaatgtttaatatcttagtttttttgcaaartagttaatgctatataattgttaacattctccaaactgaacatctaagttatatatgtattatgatattttagttatacctcagttaaaaaaatgacaaacccaccaaccctgtaggaagctatgagaagcagaattattgttacagaaaatcaaatcagtgatgtgagaataaaatcaaccaaagatgatagaaggtgtttgaggatgatcgatgtgaagcccagaaaccacagagccaacacatggggtttttttctgatggagcacccagaacaaatgggacagatgcaatagtcagagctttgaagggtaaatcttttctgagcttaagaaagaactgccttgcaagtgcttaccctgttttacgctaaatcgtaactgaacatgttgtgacaaaatattttaattacaataaaaaaatttctacaatattgacacaaggaaaaaagtcaattatcaacaaaacaattaaaaaccagtttgctttcagatgtttttgttggcacacaaaataccaaaaggcaagaaaagagtttggagacaaagcagtgttagccaagaataatatatctggccaaattctcctttatgtaggaaggcaacaaaattctcagctatacaaaaacttggaaaatattttccttaggaaccctttgaaaaacttacttgaaaatctacatcattcaatgaaagatgaggcaaatgaagggccatggggggaaataatggcacaatatgatgtcatggaaagctaacatcaatcagaataagaagatcaaagaattgtaaaggagtttaaaaaatgaaagtaaaagccaaaaatatatctcaagagagaataggcacaatgttaaaaacctatcagaatggtaacataaatcaggaagatgtttccctcaggctggaaagaggttcctgggaccgaaatacatggcacttattttaaaaactgagtgttaggtccttgagttttggttttatgctttccttatgtcatttgaatgtcttcagtattttatcacaaaattttaaaaaataatatatgctctgccaaggaagaattttccaagtataatacataattctgtcttataattttattaacaaaacccaagaagttgtagtttatgtgtaaggctgagaggaggatgtatttggcaagtggccaacatggtgaaacacatttctactaaaaatacaaaaattagctgggtgtggtggcatgtgcctgtagtcccagctacatgggaggctgaggcagtagaaytgcttgaacccaggaggtgaaggttgcagtgagccgagattgcaccactgcactccagcctgggtgacagagagagactcaaaaaaaaaaaaaattccttgtctcagaaaaaagagaattgcacatattttacttttgacttttcagtataaaaatattagagataactacttgaagaattttaaagataggatacctcctatgtgaaatatgaaaaaaaccataaaaacaaagaaaacatagcaaataaccaaaaacactcatctgaaggaaaaatttaaacatatagaacaagtttactaaacaagacctataaactcattaaaacaagcaacatacatggagccagtgcctcacttttcagtgacaattccctatcctaacttacttcttccattattccaaaaacaacagctctttgatctcttgtagactctagtccaatgactccatgctttctcaaaatccattattctaattcgaattcttagatgtcagagtacatcactrtaatcatttccttggaaacattctcgcttttcatattcccctcattttctttgtattcacattgcaaaagctccacccttgattatctcaaaagtccccttctcagtgcctgcagtggagcatctggaggttgctggagaaaatcctccagtgggctttcattttaaattttgttctcaaatcccaaatggcccaccgcttggggattagagacagttattagtctgtaataagcgtatatctcctttttccaagacagcgttttctcatttcttcttaaactttctaccccaacttctagtttaaggcctccctcatatcataagttattgagaaatagaaacgaccagaaatccttccctcaatctcccaccacgaaattcacacacctttctgcatctgctgggattttctcttctttgccctgttgcagcaaaaacaacaacaacaaaacccttcttccaatcaaaggcaawaataccaaaataccccgacgtgtgttstgtattctttccctctcccagcatctcaataaactaattcctttggccatagaccgtcctgtatcatcagtgtctccttcctgctggatcattcctgctggtacacaaacatctctagtatcttcttttaagcaaagaaacaaaaccactcctatttttttttttttttttttgagatggagtatcattctgtctcccaagctggagtgcagtggcacgatctcagccctctgcaacctcagcctccagggttcaagtgattctcctgcctcagcctcccgagtagctgagattacaggcgtgcaccaccacatccagctaatttttgtatttttagtagagacaggrtttcaacatgttggtcagtctggtcttgaactcctgacctcaggtaatccacctgccttggcctcccacagtgctgggattgcaggcataagccaccacgcctggcacaaaaccccttcttaatcagacatccccctcatgctcctgctccacctgtctgcctcccttcatggcaaagcttcttcaaagagtggggatccacactggcaccactttctaggcccttttcccttcctccaccaacttcagtctggattcttgccccaccctccgtgacaactgcttttgcttttttctcctgtgggtattaccactggaatttctgctgccaactccaaaggatgccattctgtcctcatccaatgggacttgtcagcagtatttgccatgattgactgttctctccattgtccaartaatcttatcttgaatcctatgaagcaccttcgttcttcccttctttctcttctctgaaggctgattctcttcctctgggccatttgaaagcttgcttcaagggtcagtctttggcagtctctttgactttacacattcttcttaggaggtgccatccacaaccatggcttcatgtgatttaatatactcagatgacacacaggttsttatatccagcccagacttctctgaattctaaacctatgttttcaactgactacattctcccttctcttagacccctcctgaaggaacccccgaacttcattctatcccaaaacacatttaaacctagttctctaaaatagctctcctttttagagaattcatttttgctaactggaaacttgatcattatctttgggaccttcttctccctcacttcttccccagcacaatgcccaacctcatgactccttagtatctccttgaaccatcccctttcccctcattggtcactaccacctgatgcaagctgccatcgtttcctgctgaactgctgcaccagcttcctaatgggtctcataccatcctaggcccttccagtccattgtgatttacaaaagaatcacaatgaaaatctgatcatgtcacccccttgtgctcgtcacccttcaatgygattttgagtgtgtaaggctcattacaaggcccacaaagctctgcaatggtttgacacccatccactgcccagcctcatctcacactactctctcctcctcaccctggctatcttttatgaatagatatggcttttatgaataacctgactatcctctctataaatcatactcccttctctcaaaagtcctgtatgcattgtttctctgtctgaatgcccttttggcctctgtttatatggctgagttcttctcatccttgttgtagtttaaatgtcattgccttaaagaggtcttccctcaccatcctatcaaaatgggcccttcatctccattttctttatcactaaagtgaaaacaayttattgttaatatatgtctgtttatatgattcttttctttctccccaacaagatagttaacttgctcatgtgggaagcccataggttttatttacaagtgcttaagtaaatcaagcacatgcaaggagtgtagtaaatgattgctgaataagtgaatgaatgcataggaaatgagcacatacctatgaaatcattttttaatctttccattgtcctctggcttaagtttttgctcttgcataattttgttagagtcttcttgtaaataatagtgtccaaatgttggctctgacgagcaagtaatgataccatcttcattgtgatggtcctgggggagtagtggggtaagggggcagatcttctgagaaaatgcttcaattttccttcctcctccacacagtttccaccctttggtcctcattcttcagcacttcagttatgtaactgaattttctctgcaattattaagatatgtgatgttatttctattttctgagaaaattgagattcacaggtcctaagtaactgatcaaaggtccgcaaagcaaaaagttccatgcgcacagtttaaaaccaggtctgtaaaatgtagatattcgtgatttctcyttctatcctaccacagtgcctctagccatatgacaaagtagggattccacctacattaaatgtgttgtagatggaaggggaaaactacaaagctaatccagtcgggaagaatcggcaagttactgtcacagtggaaatccctggaaaaaaaggcttgactcttactaaataccatgaaattatgcagcccagagttctttctttgatgagcacaaaattgttttttggtttacagttattttactgacataacattggcaaccagaagaatataggatgattaaatcaacatcataaggcatctctcaatttttttccagtaaattgcatagcattatttcctaatttatacttattctttctgtaaggttaattttgagtaggtatttaggaaaatgctactttctgttatattttataccttatttttaaaactgcaggtatttaagtcttccatattcataccatcccaactgcattgctttcatttctctatgtttacttccagtcgttacccrtatattataaaatatagttagtctttacatattttataccacatagtgatataatttttattccacctttatttatatttaacatttttgttgttttagcaataaagaaggaagcagcagacagactatttcaaagcttaatgtgtgtagttcccaaattgtatttgttttcttagtatttgttttcctagctatgataaaaatgaagatttaagggatggttactacatattaacacagactagtaacttaagtagatgtaatgaaattttttagagagctgggtgattctctaatttaaatacaagtttaaggacatgtaggatagttgaacataaaattgagctacaatctagaattactactaaataggcaattattttgttttggcaacatatatagaggcactaacaattacatatgtctacctagaaatgacagaaggaacacttgaaatatgaagcttactttattagctataagtgtgtttttctttaataaaacatactaacttacttgaaatttatttatacaaactcacttaactccatgttcattcttgttaaaggtagtatttcatttgattatgattagggactttatttaaatcactaaaatttcattcttcatttaatgatgcctaccaaaatatagagctgtctacattagcactgctcatttattacactaatttcccaaaatatacaagtttattctaaaagctcttcataaaaattacaaagaagtggctttttaatttcccaaagttctcatctggattagaacaaggttaggataaatttttagtgaatagaaccatgagcttattttaaaccacatattatctaaattatctttataactatgcaggcatatttcaacaatttctgtgagagttcatggactcttcagagataagagtttcttttggctctttaaaccatttgagtattgtggtgggttgaattgtgggtccctaaaagatgtctatcagaatctgtaaatgtgacctcatttggaataaaggtctttgtagatataattaaggaagagatctcaagatgagattattctaaaatagagtgggtcctaaatccagtgatcaatacccttagaagagacaggaaaagagagacaaatagaagacacagggagaagagaagaaggctatttgaggatggaggcagagattggagtgatgctgccacaagccaaagaatgccaggagccaccaggagccaccagaagctgggagaagcaaaggagaattctcccttagagctcttgtggggatcatggccctgccaacactttaatttcagacttctgacctccacattgtgagagaataaatttctgctgttttaagctagaaaatttgtgataattagttgcagcagctgtaggaaactaatacaagtatgcatttgamactaattacagattttgaattgctttaaatcttagtctacgactatcttgtgtttatagttaagagctttttaaaaaaagtatattaaggactgaatatctgtcataaaaacaatgttatatatgtattattccatttatcctcacaaggttactgttttggttttattttacctactgcagacgtggctggtggctattcatattccatgcttgatgcaatcagaagagcagtgatggtttccaatatccttttaattaataaggtaaatgagaaaagcctcaccctcaaagaagtcttcagactagctactcttggaggaagccaaggtaatgactcttacatttttctctcacacaatatacaaccatgctgatcggtgtctttggatgtagtatgaagatgcatgattggtattaggaaaatccaatatttgtgatgatcacatctcatgtaacatacccagaactcagccagtaaagtgaagttcactgaaggaggaatcattccttagtgaattcactgtctttggtagaatagatgtctgagacacagttatcatattaattgttttaatgggtattacattggttacatggatatgagtgctttaaaataatccattcttaggccaggtacctaagaatcacagtaacttacgtctgtaatcccagcactttgggaagctgaggcaggcagattgcttgagcccaggagtttgagaccagcctgggcaatgtgacaaaaccccgtctctacaaaaaaatacaaaaattagctgggcttggtgaagtgtccctgtagttctggctacttgggaggctgaggtgggaggatcatctgaacccggggaggtagaggctgcagtgagcagtgattgtgccactacacttcagcgtgggcaacagagtgagaccttgtctccaaataaataaattaaagaatccatttttccactaagtcaagtaacttgctctccagtggcctaagtgatgatcataatagtaaaatagtagccaaggcttacttaagctcttcccctgtgataagaatcataccacatactttatatgtgttgttatttaatcctcaccaccactgttattcatttcgttttacaaacaagaagcctgagtgaggcttacacagctgtcaagccacagtgtgctatgatttgaatccacctaatctgatgccagcatgcagatttcttaccttctgcccttccactacagtatcttcctgtataaatccctgccaagaccatgcatttggttcatatacttaagtacactaattactctttaaaaggataaagatgtaaaaatttagttggttgatatgcaaatattgctcatcaacttttcccaattctcacgtgtaactgtattgttacggaaaaaaataaaaattggtcactgtatttctttaagtcactttagaattatacatgtaatcagaatggatgatagtgaaacacagcatgaaaccataggtagctagtgagaaattaaaatgtagatatagatttagaaacatattgggtgtagatttatgatagataccctgagtcttacaaatgaaggatgaccgaagccaagattatcctgggaagagaaacttctcagatgttctctgagtgttggggactatgatgaacaccataagcacatttcaagaaaagcaaatacaatgttgttttttgtttttgttttgttttgttttgtgatttcccaaagtattatggttcattttccaaaatcccaagtttcaaatcacccactattttaataattgttacaacctttcacccacaccaccattgtcttttcacatctgaatctgagtttgagtagttattctaccatctatgtttgtggtacaaacgagttgtatttaaagagtgctttttgaattctagggctctctgtaagttacttcatcaggatcctgtttctttgatcaagtcagcatgggtgcctaccaaatcatttctactttgctgtgtagcttttaaatctattttctgggtcactgggcttactcatggaatttcttttccttagtttgtttctctactatagtcagagtaaaatgagatgaakggatctgtatttaaagtgtggcattttcccagaactgccatggcctttacattcattctcaagaagatcaagatgagcagaaatgatcttcacagaaccaacatttactccaaaggcatcaaaactcyatttcctgaaatgcatttgagtcacttaccagcccagtgggatctctgtgcaacaatttgaatttatatcagtttacaaattcactgaaaagaattgtgtcttttttggttagttcattcctgaagtctccaggctctactgaataacccagttggtttatatataccatcaaacttgcctaaaccctagtcactgcacctggttatctggcctattaaatgcacagtcagtaattcagtttaattcagttgaattcagtcattaaaaactcatacttgacatgtttctttgtcaagggcaaaaagaagtcaagtaatcagtgaaggaggagagaatttccagtgattttctgttacattcagtcctttcccatacaattagtagaagtcacctggctccttttaacattttggattattttcatacccctgtcttgctaaagagagtactttagctaaaaagccatttttcttttctgagaataaaagagttgccctttaaagaatcttttaagaacaagtaagatttctgagtcagtgtttagagaaatgccacaacttctggatacctataggtagaaatataatgtattagatattgcctaacaaaggtagtcgattcaatattttcacatgaaactttatcttagcggtgatagaatgcaacaaayacatgtgaaaattgaaataaggctgagcacagtggctcacgcctgtaatcccagcactttgggagtccgaggtgggcagttcgcgaggttaggagatcgagaccatcctggctaacacggtgaaaccccatctctactaaaaatacacaaaaaattagccgggcgtggtggtgggtgcctgtagtcctagctactcgggaggctgaggcaggagaatggtgtgaacccaggaggcacagcttgcagtgagctgaaattgcgccactgcactccagcctaggcgacagagcaagactccgtctcaaaaaaaaaaaaaagaaagaaagaaaattgaaataaataatactgcactccagttaaccttccatgcttccatttgtgaccccagtttacaccttcctcagattacaggctttaaggaactttagagccaatacctctgttggcgaagaaagccaactacccccatctttctgaaactaaatcataataatgagagatgttcttccttgatatccaataatcttggaacatgaattgtagctatgagatgagccaagtcaatagatattrttggcctgtgctctattttagaagaccattcttctctggtgaccagaaaacctttgaggttgcaaagagattggtctgttttcaaaagcattgagacttttgagttatgagaatctgttcattttgagaagtgaggttttttttccattcaaaggatttaaactaaggaatttctgatggatatgcctgcattgacaaatatgcaaaaggataattattttttatttattcaaggttcatttcactgccatgaaaataaatcttgtcagctatttcatggaacagaaagaacaaaaaaaagcaaggcaaggagttggagtgttgggggagaatagaagggaaaaagaataaaggtattatgttaatcatcatgttgcttagagggataaatgaaaagcatagaccagctgggctatgaagtgcactgatagagctgaaatagagacataccagagttatgatacagtaatgaagggaattgttttcattctcagattttgctttcctgtgcttactccactttatgtaagtagaagtcttgtgacctgttagaatgagagtgattttctgtctcactgttaagatactaatttttttttttctcctagcgacatgttggcaaaatctgtccttacaaactgagacattagtgtggtctgatggcttgcaatcctgactgtttattcacttgttctcaatagccctggggctggatggtgagattggaaactttgaagtgggcaaggaatttgatgccatcctgatcaaccccaaagcatccgactctcccattgacctgttttatggggacttttttggtgatatttctgaggtaagtaaaagaaagttaatcaaaaggcatttatttcataaagtcgtcataatagcttccctgtagaaaagaaaatagaaaccgaaactttttaatggaatgcaggaaaatcttaaaatggacgctagagccctttgataattattataattttatgacagcaatgttaagaataatggtgttaacaaaacttttatattttgaatgtgtttgtgtatttgaatgtatttggctacaaacagccataatgtaactagcactcattgaacacttgctatgtgctgggtaggcatgggattaggcacttccatacctaattttgttcgatcatcagagcaactctaagagagtaggtactattaatattgccatgttaatttataggggcagtgaggcttaaggaaggctaagtgatttacgtaaagactcatagccagtgattagtaggtagagtttggattcacacctgggactttctgactacgagaggcgaggctcttgagcactatgctatgtcaatgtttttaattttataagaaaatgaactttgtttctcttattataaaatgtttttctatggataaaataaactagttcatcttacctgaaaaataattccttgtaagatattgagttcttcctaaaaaaagaattaagtattgccatttctaaattgatctacttgtgagagtaattgcgataataaatatgttaaagattttaaaagaaaaattctgtattatatgaagtttgtaccatttgttattataaaagaggaaaaatatatttttctctacccatcttagggtcaaggctgaggtcactataacaagagacagatttaacaggagaaaggcatacwcatttatttaatataaatttttttgagacggagttttgctcttgtcgcccaggctggagtgcaatggcatgatctcagctcactgcaaccactgcctcctgggttcaagcagctctcctgtctcagcctcccaggtagctgggattacaggcgcccaccaccacacccacctaatttttgtatttttggtagagacagggtttcaccatgttggccaagctggtcttgaactcctgacctcaggtaatccacctgccttggcctcccaaagtgttgggattataggcgtgagccactgtacccggcctatttaatataaattttatgtgacataggtgccttcataaggaagtgaagaacccaagaaacaggtaaacttggatatttttatgctaggtttgatgaagagtggaaagttgtagagaaatatgataggacaaagagtgtggtccagtggtaataagctagagagaacttagcaaggcctgcttgttcagattcttctctgtgatcctttagcttcagagatcaggtatagggagggcaccccttacgtgatggtcttatgacctgcattggggtaaggggtaaggggagggtcagagtgaccttcctgtgtttgatttgagggtagcgtgtcctgaccccctcattattttcatattgcttattcttttactctctgattagagtaaatttctaagaatagggctctagggaatagtcctagtgatttttcttatatcaggggtgtccaagggagttcttagtttctgtttcaggttgtgccagtaaagccccctccctcatccctcttttctgcttatcagtagagacagaaactaaaaaccatggcttcaggctgctaaaagcctaaaacaaaacataacaaaacagaacaacaacaacaaaataaggcaggttggatgagcttgtcttacatcatacccgtcttgaaatatttgaattattttactaaattaatttctttaatttatataataccttttctctgatgactcaaaattcacatacccagaactttcacacaataggtaaacttctgttaattgccagtgggttattttttgttctgggaggtttttataaagcacatagccacttcttttttaattaatagaagtagattttgccattgagaaacaaattcgtatttctgggctttgtcaaccactatcagctgtgaatttacttttctaaatgcacaaatgagtctttcttattacttttattttccattttaggctgttatccagaagttcctctatctaggtaggtagatgcatgtctctatgctaaatattaaatagaacctttccctgtctttttcttgggtatggctctatgtatttatcctaccatatattaaactctgtggatgataatttgctttgattcattatttttttaacagtctgaagcatcaagcccattggtggcacattatttaaaggttctatttgaaatgcacatgactccctctagtcataaattctaagctgaggaatggaaggccaaaggtgaagagatcttcatgttcaaccctcttgtactcattcrgtatctgacatactgccctgccatgtttttgtgacaaatgtatagtagagtctcaccacacgtgctggtgatgtactcacattcaattccattcactgagagagagagaaacagtaatgcagaatattctacactgcctcccattctgttcagtgagcccaggactgagtgaactcaagatggaaagatgcatgtgttacttcttgtggagctgattctggagcgtaaagagtagtatttctttctcagtgggggcaaaatgtaaaccaaccacttcagctgagaaaggacagctatagggggttgattcaactttatgtgatttctgcctctggtgcagaattcagaccctaatcatcaaattagctatggcattttctactagtcatatcttcctgttcagattataaacaatctgagggttgggggaaagcagcttttagtatttcctctcctagaagtatctttaaaaaaaatctctcccaatggcaaggaagatacttattgacacaaaaggattttatacatgattccttgatttttctttcaggagatgatcgaaatattgaagaggtttatgtgggcggaaagcaggtggttccgttttccagctcagtgtaagaccctcgggcgtctacaaagttctcctgggattagcgtggttctgcatctcccttgtgcccaggtggagttagaaagtcaaaaaatagtaccttgttcttgggatgactatccctttctgtgtctagttacagtattcacttgacaaatagttcgaaggaagttgcactaattctcaactctggttgagaggttcataaatttcatgaaaatatctccctttggagctgctcagacttactttaagctcaaacagaagggaatgctattactggtggtgttcctacggtaagacttaagcaaagcctttttcatatttgaaaatgtggaaagaaaagatgttcctaaaaggttagatattttgagctaataattgcaaaaattagaagactgaaaatggacccatgagagtatatttttatgagggagcaaaagttagactgagaacaaacgttagaaaatcacttcagattgtgtttgaaaattatatactgagcatactaatttaaaaagagaacttgttgaaatttaaaacgtgtttctaggttgaccttgtgttttagaaatttgcacttaatggaatttgcatttcagagatgtgttagtgttgtgctttgccttctttggsgatgaatgtcagaaattgaatgccacatgctttcataatatagttttgtgcttcaaagtgtttgacagaagttgggtattaaagatttaaagtctcttaggaatattattcatgtaactccatggcataaatagttgtatttttgtgtactttaaaatcaacttataactgtgagatgttattgcttccattttattagaagagaaacaaattccatgctttatggaatttatgtagactggagtcttcgtgaactggggcaaatgctggcatccaggagccgccaatactaacaggacaggttccattgccatggcctattccacccaaacaatatgttgtagtttctggaaattccatactcagatatcagtctgctagaactttaaaatgaaggacaaatcctgttaaagaaatattgttaaaaatctttaaaccctgtgtattgaaagcactctattttctaattttatccagttttctgtttaactccttataatgtttaggatattaaaattttaggataatgaagagtacataatgtcctacttaatatttatgttaataggacttaattcttactagacatctaggaacattacaaagcaaagactatttttatgcttccataacctagaattaaaaccaaattatgaccttatgataaatctttaagtattggtgtgaatgttatttaaattctatatttttcttatttaattacaaatactataaatgagcaaggaaaaggaatagactttcttaatatattataacactcattcctagagcttaggggtgactctttaatattaccttatagtagaaactttatgtaatatagctaactccgtatttacagaacaaaaaaacacagttccccctcctgtagtataaattttattttcacatacttagctaatttagcagtaattggcccagttttttccctaatagaaatacttttagatttgattatgtatacatgacacctaaagagggaacaaaagttagttttatttttttaataaacaacagagtttgttttgtgagataagtatcttagtaaacccaatttccagtcttagtctgtatttccaatatttctaattcctgagccacgtcaaagatgccttgccaaatttctccccatttctctacggggctagcaaaaatcttcagctttatcmctcaacccctgccaaaggaacttgattacatggtgtctmaccaaatgagcaggcttaggaatttagatgagatgtgtaagattcacttacaggcagtagctgcttctagcatttgcaagatcctacacttttaccttctttaagggtgtacattttgatgttgaacatcagttttcatgtagacttaggactcatgtgcagtaaatataaataagtgtagcatcagaagcagtaggaatggccgtatacaaccatcctgttaaacatttaaatttagctctgatagtgtgttaagacctgaatatctttcctagtaaaaataggatgtgttgaaatatttatatgtactttgatctctccacatcacttataacttatgtgttttatttctccaagtgcggtgttcctgaatgttatgtatgcttttttttctgtaccacaggcattatctatacctggggccagattttctgcactttgaaatgttgcctttgcctaatgtaggttgactttctgaattgtggagaggcacttttccaagccaatcttatttgtcactttttgttttaatatcttgctctctgacaggaaagaaacaattcacttaccagcctcctcaccccatcctccaccatttccttaatgttccatggtattttcaacggaatacactttgaaaggtaaaaacaattcaaaagtatcgattatcataaattcacaaaatatttttgcaaccagaacacaaaagcaggctagtcagctaaggtaaatttcattttcaaacgagagggaaacatgggaagtaaaagattaggatgtgaaaggttgtcctaaacagaccaaggagactgttccctaatttattctcttggctggttctctcattgaattatcagaccccaagaggagatattggaacaggctcccttcatgccaagggtctttctaagttaatactgtgagcattgagcccccattaaaactcttttttacttcagaaagaattttacaggttaaagggaaagaaatggtgggaaactctccccgtaatgcttagccaactttaaagtgtacccttcaatatccccattggcaactgcagctgagatcttagagaggaaatataaccggtgtgagatctagcaatgcattttgaatcttcactccctaccaggctcttcctatttttaatctcttcacctcagaactagacatatggagagctttaaaggcaagctggaaggcacattgtatcaattctaccttgtgctatacgtaggagagatccaaaatttggatgcttctggagactcttagacatcttttcattgttgtccatttttaaagttgatgattgctggaaacattcacacgcttaaaagcaatggtgtgagttattaatgggtaaactaagaagtgttataggcaatgacttgaaatggtttttaaattgtatggattgttaagaattgttgaaaaaaaattttttttttttggacagcttcaaggagatgttagcaatttcagatatactagccagtttaggtatgactttggaagtgcagaaacagaaggatactgttagaaaatcctaacattggtctccgtgcatgtgttcacacctggtctcactgcctttccttcccacagacctgagtgtgaaagactgagagttgaggagttactttgtggatcttgtccaaatttagtgaaatgtggaagtcaaccagaccaatgatggaattaaatgtaaattccaagagggctttcacagtccacagggttcaaatgacttgggtaacagaagttattcttagcttacctgttatgtgacagtgatttacctgtccatttccaacccaaaagcctgtcagaaagcattctttagagaaaaccactttacatttgttgttaaactcctgatcgctactcttaagaatatacatgtatgtattcataggaacattttttctcaatatttgtatgattcgcttactgttattgtgctgagtgagctcctgtgtgcttcagacaaaaataaatgagactttgtgtttacgttattttttgttgtgagttctctctgtttggttttgttgtgaattctatcaatctgctggaagaggaattgattttacaatgtttttcttcttttagcatgaatttaaaaaaatagaatagaatactcagctgtgagccaacatgtatctaacatcctataatagtcactatacatagcttttaaaaattaagctcgaatgttcagccttttagaagcagattgctattgcttttgatttcagcatagtgtatattttatatattttaagacattacccagagtgagtaatgcactctatatgaagaatcagttcacacagacatatgtgcatgtgtatttaaaacaaaagtttcacagaaaaatactttctctatttgtgatgccctgggctattttctatactattttagtctatgtcattttattttattctctacttttttatggtgctgatgattccccagttggtttcttgagcttctaaggaatcacctgcaattcagaagcaatattccagtatcttttgatctatgtttgaatctaagtttggccattgccttgctgggtggcagatatgttactttaagtgtccatttctaactctgtgatatggagataatatgagtgcctgccttacagtcatgaagattaaataaaaggatacatagacagcacttaagctagcagctggaacacagtgagtgctcactatctggtagctattatcctaaaaattaatatagaccaaataaaaatagaaataattttataaatatttttatcagtatatattttagaatctaaatcaagtgatattacggatcctcctttacacagaaacactttgcatctgatttttcaacagtattatatattctttttttatttgtaatatgaaacataaagacagtagtagattaggtctataaattcatcccaatgtctgagcagcttacagaacaagtcttcggattgcactggtgacccagctcatcccctctttctctcttgtagttctcagaataactgtagaatgtgctggaaatggaacattctcagataaggaggaactggccagatcaaactaagctgtgttcccatccctcctgaaacaggatcttatggtgctttagcccaggacgtcaagtatcccctaggtatgaaacccagagtggagcatgctttgaaggtccctcagctacatgcagactagactgcatgtagctgactctaactgccctgggaaactatcctgagctttgacagacctgccatgaatcttaagcttttattgtcccttgctgcctatctgtgaggaataaagttgcttcacttactttgctgtgtgattgttctgtctcaccagactcatgcgagaggtagaaactgcagtcccaagatgcagtgggcatgatgaaactgcttcccacaaattactgagcactttatttttctcctaaagatcaatttagtataaaatatccagaaaagaaatttcacatgcttaatttagcaataatgtatgtccagtttgcacattgtagacactgggtattacaacagataatatataaacgtgcaaattattgcatggtactaaattcaggatttaaattaaaaaaaagatttggatataagagttagtgggtgcagcacaccagcatgtcacatgtatacatatgtaactaacctgcacattgtgcacatgtaccctaaaacttaaagtatagtaataataaaaaaaaagataaatacctcccagtagcaaaacaggacttgtgttatggtgttctaagactccatgaagaggccacttagttactggaactactggaacagaactcacaggtaacgctcaccaatggcagcaggtgttttgttttgttttcatcttattttaaaacaggataaaagggagatgttctctgtctttgatatgacagtattttaaagtgtaattaattttttaaactaattcagacttatcacttttatctccagccctgccctaacctactaccacatcattgtaagactacattgcatttatcatacttaaaaaattgttcatgcgtctataatagttgaatctaaattttggagcaggagtatagatagagagataaaagcattttctctgtagcaaaaactttgttgggaaattcttcaatggtaactaaaaaaagtaaaaaataaatgttttctctccagtacaaaatgcaattaaaaaaaaaacaaaaaaacaaaacagatcacacagaatttcatactccacttgggccctcctctattgcctggcttctgtagagaggaagcaaacatttgttccctgtctgtagaaggagaacccaaagtcataagcagtcaaatcaaactgcagaaataacggccctggaagatggttatttggtcagatgacatccactcacttgaaaactgaacttgtagcttcactgtgaaattaacttctgtccttttagtctgggccagtctccagatcagacttttggttaactgctgtcaaataaaacccataagtggataatccaagcgagaattctgtttgtgtgtgtgtttcagatttctaaatttggtgccctggaacacttgagagacttcaaatggccttggtgatttttgtttttgtttttcttccacaaaagttggtttcatccacacctgagttaaggaacaagtgaaggatggctttgtgtttgtaaagcgctttgaaaaccttgactgaagcacagcaacagataaaggcaagaaaggcttaatttatcaaagtattgcagaacagatgagccctcaaattggagctttgcccaggaaggttatccgggaaagaattcagtgttagacagcatcttttgttgaatagtactgctccctacagagcagggctaactcataggcagtgcagctaaagttgacaacatatgagttcttggcagctgtatttatactcacttaaacctgctttcaattacatgcaaattaacgggtgggtggatgcaaattgaggggcagtttgtttagaattttctagcaaaggggtagtaacttccaggtcatcctcatagcttttgtaaattgtcatggtgctggtgggagtgtcttatgctaatgagcaatgagggcatctatggattgctttggtagccatctgctggttcctaccagtttcttcactttatcctgtttagaccagatcctgttttggtcagcaaggttgtgaccagaaaacaaggtttagaccagatcctgttttggtcagcaaggttgtgcctgtctcctacctcaaaaggttactcaaaaagataaattaaggggctcagaaatacaagtgcacacacttctttcaattcatgaactttcttagtggaactatgaaagatgaattggcaacttacgtattttggactaatttatataaccacaacaaaccctccagcatcataaacgtgtcctggcataatgcaatggcatgctatccatcccgtaaaatctcatggtagtgactcagaaacgtgggggtaaaagagaagctatggagtttaggttgtttgtttatttattaaagctgggtaataggctttttatgtcatccaggacaattttgcaatctcttatggatgtattatttattgtaacttatgggggaaactcatgatgagactcacattccctagaaaattttcacattccctagaaaattattgcccagactaaataagaagtcagtataaatgcatataaaatactcatttaatgttgtttgtagtactgtagaccatttaacatggcataatttaatccaaaagaaattataattaatcagtcagtttgctctgaaatatacttggctgttctcttatgctttttatgtctttgtaaatttcatacttaaaaaaggttaattagttggttttttgaaagatttaaaaatggttaattagttggttttttgaaagatagaaatctgtacctgcagaaaacaaaataatggcctattaagtcatatttaatttactaatcatgaagttgtaaattttaatcaacattcatttaagcaacatttcataataaataccaggtatgggtcagttctgaggrttaaaaataacattcatctctttgaagaactcacagtctgggatgggaggtgagaggaaacacatagacaatatgttatgtttatgacagatgtatagagagctaagggtgtttaagggggaaactggttctgttgggtacatagtccgcagagaatacatagggctaagtgtggtggtgaatctttcacagaagtgacatctaagcctggaagaagagtaggaatttattttccatgtgaaaactcaaaaaggtatttcgagtagagcgttcagcatgagcaatagcagctcatcataaagacttgacttctggaaaagtaagataagaatgaagtggatgaatccagtcttcgtaagaatcaccatgggtgttggttcaaaatgaaggtttccaggcccttgtccctatacattctgattcagtaggtttgtcctggggcccaagaatttgcattaccaacaaataccttggtatggtcaggcagtgggtgtagtgaggagagtcatcctgggtatgacaaggaccaggtataatcaggtgtgtaagctaatgaagagaaggcaccaggctcactgagtgcagaaactgtgggtctcacgtacattggtggttttcctattcactggcagataactgttgttgtttcccaggctgatcttgatatcctggtctcaagtgatcctcccacctcagcattctaaagtgctaggattacagacatgagctactgcacccagccaattggaggccttgccccagcaggtggggaaggaaatgccagccaagttcccaccacatgcagaaacctgagagggtgaaccctacccatcaacacctggagaccttttcctgactctgggacccgcgacagacagagtagcccctgcatgggtgactccctgattcccacgaggccccagggctgccgtggctcctgctgctccacatattgtggggcaccttgatagccgaggttgccttaagttacctccagctttgtttctgtcacctgcaaatcaaagagcccagcctaaaatcctctgtagccttcttatttcccccacggtgagtacattctttagagataggatataaactttgaaatgaccattttctttttaaatgaatgataaaccattgttccttcattaggcatgtggccactctctaccctctcgcaagccttgccagagatgccatcctccacttccactgggcacctggagcctgaacctggaatcttccaagaccccagatcagcctctgctgacagttctcttgtaaagatactgaggataggattacaggtagtggctcacgcctgtaatcccaacactttgggaggctgaggcgggtggatcacttgagctcatgagttcaagaccagcctgggcaacatggcaaaactctgtctctacaaaaaatacaaaataatacaaaaataagctggatgtggttgtgtgcacctgtagtcccagctactcaggaggctgaggtgggaggatggcttgagcctgagaggtgaaggttgcattgagccgagattacaccactgcactccagcctgggtgacagagccagacctagtctcgaaaaaaaaaaaaaaaagatactgaggatgagtcagtcatgacagaatcctagtgacatactaagagagggagatgttgtttaatgaaataaatggaggccaggtacggtgactcatgcctataatcctggcagcttgggaggctgaggtgggaaaatcacttgaggccaggagtttgagaccagcctgggcaacataatgagacccttatctctacaaaaaaataaaaaatgtagctgggcatggtggtgcacacttgta

SEQ ID NO: 96727 - DNA, 12736 bp, Homo sapiens
tctgagttggttacatattattacaatgtagtaaaccagagtttacactttgcagtaaacaataacagagtctggtattttacacatggtaaatgcttaataaataatttgcttttagaggctaggtcaatgtttacacatggattatggtaacctttgactcaaacacctgacttacaaataatctatacaccaacaacaactgctacttcctggatatcctgccactgaagccttcccaaccactgtggaaggctgaggaaaactcaccttgcactgaagccttggccaactaaccaccaagaaggccacttggaaccccacgcctctcagccttaactgctgcacagaaagcattgcctgataccagtatgggagccaatgagccttcaaatcttgactcagagtaagagaattcagtaaattaaggcattggatatattcggtaggctggcctagaaagctacttattagttataatgttgttactaataggatatgcactaagtcactgattcaaaatatattttaagctcctggaggtcagagactatgacttattcaccggtatactcttgtacccataataatcattctgaacaagctggttacatttaagtgagtgcttgagtgaaagatacagcccctgattttcagttgcaatccacagacttccacgctatagatttctagtgcctgtaataaaagtcagtaacagatacaaaagaaaaaagtgtcttctcctaatagaaactctcatatataatttgctaaaggtatatcctaacaatgaagacacttttatctcatgtcactttaaaaatggttaaacaactcagagaagtgttcctttctccctttctccttagtacacagacagcttttggtgcaatgagaaacaggaagactttacagtctttttttaatgccttgctaatttcatgctgaaacttactgaaactacactctcctggttatgacgatcctctaatcggaaattattcatggtggagtggggggaaagtgtgtaaacatggtacaataagttcccagcaatgcccatttagctcttttttgtacccactgcatattttaaacacatttttcaggattattaaataataatcccatgatgcattgtgatgaatattataatactaacaaatgaatttcaaattcccaggtactgccactatttgtgcctgttattacatggtacagtgaatgtcctggtaagtcctgacacaaactacttattccgttaatatttgcaactactctcttattaaaatggccacaattttttcaaaggcaatattagatttacagttcaaagtatgatgacttctttcaccaactgataacagtgcttaggatcattcaggggccacataactaaacaggaaatacacatactaaaaaatattattctcgtgatacaagtttcacttgctttaatagtgctagtagcaggttctctttattagaaataaaaatattgtttaactcacaagtttaaatactgaggttacattagggatcagctactaaacgtattattcattagtcaaccatttaacacattgtcatcaggttacttactaatatctatagagacaactattttctttgagcaacaactgggatacttgcattcaaggtataaactcaagataactacgttgtaataaaatgtaaccaagttaagcttttcaaagtgttaatgctaatactacacaaatctgtagtaattttgtatctgagtcacaacatgtccaaattcctttgagggccttattatacaacttgctcccctatacttccagagttcatgattggtatatgcctacatttcccaagcatctctagaatgttaattcccctgcaggcttcatgtcctaaagaaagcattttcccaggagcacaaacagcaaagcaaaactgaccaaataattggtctgtctcctctccttagaaaagctttacatagtggagctgcactggcacattcctttcttattgcagggaaagaagagttctttttccacagtctcctaatttgagggtacaaagtaaaataaagcaaacatattgggaaacagtcctgattataaataaaaatgttaaagtgctagtttcacaaactatcttaactatacataaaactgtaaaaataaataacaaatctatgtactcatcatccagttttaacacatattaacatattttcatattggcttcagctcttttttaaaacacaagaaaaaataagttacagaggtgaagaaactccactcagaattagttactatttctaaagttaatgtatcccattcccacgttttcatatttacttttatgtactttcattagatatacacatatcaataaataatgcatgctattatgttgctttcaaagtgtacacaaatgcatcttactgtataaatcctttagcattttgcttttttcacccagtattacatacttgagatgtatatatgttggtaagtatagatctagctcattcatttttatgagaagatagtattgaattgcatgaataaaccagtttatccatttccccactaatctttacagttggattgctctactttattgctcttttaaagagctgctataatcatccttgttatatgtttgcttagccaattgccccaagtttagttaagatcttggctctacaaaaatttaggctgtggaagaaaaaaaaatcctggagtgaatgttagcccacccaaatgccattattgggtctaaaccactcccttcctgatagggaggccatgtgaactgaagaactgtgtgatgactcaaaagaaaaatatttaaaatgtgataattaagggaaacatgagatgatcaatttgtggaattaatgagatgaaagctgatcttctctctggacataattcactagcagctaagcgaaactctgccaacaaaccccagtctttttctcataggtattgagaaaactgtaaattttcttcaaatttgaaagaaatatacaatagctccaaaaactaccaatttaaatattttttcctctacccacctggatcaatcagttcagctacatgcaggcaaacatcaagacataagctaaagaaagcaccatcacatatacagatgaataagagacagggaaaggaaaattaaatgcaatatgaaaaagaaacaagccagagattgttgctattttattgatgactacctaacattttcttaaggactgacaccctacaaaaccgagtactttcttattacagacaacaaaattgtttggtcatcaatgaagggttaagagaaaaaaatctgttaaaactctctaccaggaaaattcatatcctgaatacacttgaaatacgtggtagatttaattccacaaagttataaaaagagctaaatgatttaaaagtcacaaatcctcacagcatgcctctgagtgagaaaggtacctcatagtacccaaagcgggccttcctttatacaagcttaaaaatcaccactctgcctttcttcctagtttttcaactcatactttacctagtctcacattaataaataattgtagatttttacaagtcagtcacatttttgagattatcattagaatggacccagcagctactgctttaaacccagttttcatgaaaaggtaggagattccacctaattacaaaaacactaacatcaagactcattgaagttcttagcataccctttgcttctttaacagtcaaagtgcccaaagtaagtgtttcaaatgacagcccaaattctgaaaaactgaaatttggagagaagggattcctgtttatattgagtacatttaaaaagtaaatggcctgcataatgccactcaagttttgtttttttcccaaaattatcggtttggtatttcatttttctggatcattacagtttcaaattttaacactgttaaacaactttgacgttttcttgctataattatgaattttaaatctgctaatactggtcatagtttagaaactaataaattcaaaccatgtatagattctgtcagtatctttttcacattaaaatgtccttatggaacaccaaaattactacagaacaacttgaaatcatattttatagctacttccttaaaatattcagttcccttccccatcacttaagaaaagagtcagtttggatcatgatgtagtgggaggaattaattataaaaacagctaatatgtattgaatatttaccataaaacaggcactgtaataaatacgatacatgaaccattacatgtaaaggtactgttatcaggaaaacatttttatccccaatttagagacaagagaactgaggcagagagattaaataacttgcccaaaatcaaagatgtaaatggatgtgactctgggtatgttcagatacaaagcctagaatcttaaccactatgcttatgttatcaaggttaaaacaccgtagtttactgcaaaaaatttttcactgctttaaattattcattaactcaaaggtcaaccggtcactccaaatcatatgataaatgggggggaaaatgtgggaccaataggtttgctgaagttttgtacctgctcagaataaacatatcacacaattttattccatatagccaaatataagggtaactgagtaaagatcttcacttgggtacagcagtcagttccttctccatcctaaaccagaaagaaagcactgttcttggatatgccacttcaacaagagtgttttttctcttccaccatcaaagccttaagcaatagaacgattctaccagtctactgttgcctgtctccaaagcagccctattatccgaggacgaacaccagcgtcaaggacctgtgttatttttctggcttcgcttctcaaaataacttatcttctcctcttgatgaattacttgataggctcaaagacttgcctaaactactaattcttattatcaaagctattttctttctccgcaaccgccttttcaagtagcccttggtccactcttcaacgcgatttgcaccctgtggcaaggccgccagggacactcagcagggttccaggccacggaccccagtttatcagctcagcgcctagtgtgggcattcaagaaattctcgtgaatgaatagctggaaggcagcgtgggtggaggcgggaagagggggcttgaaggaatttcacgcagctgagaccactgcagcggcgcccagtctggggagggagagaccggggcaagtgggagaacctggggccaaggcaggggccgcctcgggcgctgctggaccggcaggagcagtcgatcgcacccagagctgggaaaatgcgggcgccgtctccgcaggccccccgcagggcgctctccggcctcgaccacagcctccgcctagctccctgtccccggccttccgcatacaaggggtcccagccgataagccctccttagccaatagccaacccgggacccacactcgctcacctgaagctccaccggcagcaccgcgctccgcatccggcgcgagcttggcaacccagtgggtccgcgggatcagctgattcatggagggcggggcctccggacagggcggggctgcagggcgactagcgaaggtaaacgagggcgcgggcggctcttggaatccgagctcctgggaattgttcttgggagactgtcgacggcgtctgttgggggtcaaaattgctgagaatgcgttaggcactgcaggctacgtacttgggagcacagtctctcccttagtttagggcggagctatcagtcctgagatgcgctttgatgatgacgtagaatagagtcgtccaagcctagctacccgagcgctcccatggtaacaggcggtggtgaaagtggttgggagcagcagtcgtttgttaccacctcaaactgcaagggccggaagtataaaagtaaaaaggctgaaatattttcaaattgcctttatggacagtaccctaacagtggtcgcttctcccccctactcccgcgaatgacgtcatcgcctcgcggccccgtttcgccattgtatcctcaatgtgtaaacttactggttagttgcaaccccaaaagatggggtgggataggagaaaatgaagtggcctctccagtgattcccgtagtactccccaatatacaatcagtaaaatcagctttcttgtcccgcgcacagtttcataacactgtttttcgcagccacagtcccaccccacccagcctgcactctcaagtcctcccatgattttatgattttccagagctgccactcatgtcgcacagtgggtgcaaaccttctgctgctaggcattgtgccatcgctggacctgcaaacatgcaaatatttagaccatcaacgaswgatgtgtagtcggkttctgaaactcctatatcctattcaccaacaccctcaactcaatttcctccctgatccttcgcccacctgcaaaactgttagtctgcaacagttcaaccaaccttgctcactcctgcatcggtgcagaaaatcacacaaccctgagaattggcaccactgcgaacgaaaagtgtccaacttcagtcgggacttccacgtgcgactacgcaatattgctgagcctaagacagtcacatttacacattgctactcagattatctcctattcccctcccctgctgttcccagccctcacgctcttctaacctcttactgaactctactcactcacccgctttggtaaaaataaaaataaaaaattttgtctcttacatctctgaggaaagtgagaccactagaggtgaatttccttaaatcccaaatcccatcagccactaccacaaaacctacctgcaaccagttttgatttgttttgttttgtttagagggagtctcgatctgtcgcccaggctggagtgcagtggcgcgatctcggctcactgcaacctccgcctcccaggttcaagcgattctcctgcctcagcctcccaaatagctgggattacaggtgcccgccactacgcccggctaatttttgtgtttgtagtagagatgggatttcaccatgttggccagcctggtctcgaactcctgacctcaattgatccacgtgcctcagcctcccaaggtgctaggattacaggcgcgagccaccgagccccggctccttttcaccgagtccttttcttctccctctttcttcttagaagatcctgaactcaggatccctaatctccccaaaggaaagactttgttctgttgatgaaaaaagacaaactttataaaatatttgaagaggttaaatatactctgatcgaaacatgagtaaccatggcctgggacacagcctcaagaagtcctgagaacatgtgcccagggtggttgggttatagcttggttttatacattttagagagacagaagttataggcaaagacatagatcaatacatggggggccggtggtgctcacagattataggtggattcagagactttatgatgggttgaaaaagctaagcttttcctaaagagttgaagttagcagaaagaaatatttgagttaaaatgaagggggttatagaagccaaggttcttgttacgtagatgaagcttccaggtagcatatgttataggaccttaaaatgtgtcagactcttggttaaatctctcctggatcaagaaaagacctgaaaaaggaaagtgattctgtataaaatgcaaattccccccacaagagacagctttgcagggtcatttcaaaatatgtcaaagaaatatattttggggtaaaatatttttattttcttcagggccaactatctgtcttgtaatgctataccatagtcaggttagagttggataatcttattgctacaagagtctattttgtcagtcttatgatctctattttcatttcatgaaaatggtttagaccactttaatgctggtctaaactccaaagggagaggatataatgaggtatgtccaacctgccttcgcatcatggccttaactagtttttaaggttttctttaggatccccttggccaaggagggtggagggagatctattcagttggttgggggggctaagaatttcattttttatttacatttccattacttatcccttctccttcatgtattttcaacctctgcctgtcttcttattcctatatacttacagtgtataaacctgctatctatctcatctttaatttttttactttctgccttttttcctttccaacctcatttcctacctctactttctgacttcccagtcttcctcaccatttccttaagtctactgaaatcaatagtcatcttctcattttgtaatctaatggtactgtcatagaatggaagcattctatgcaaccatctaaaacaaagaggatgatctctatatactgatatggaatgatctggaaattaggagataagagaaaaaagctagatgctaagtcctgtccatagtagtctaccaattgtgtgttatgtatgtcttttcaggagagagataggtaggttggaagatagtgtaaactgaagaatcacctttctaaatttgagatatacaaattgtctcagatttagaaaggagacttcgttttttttttttttctgagacagagtcttgctctgtcacccaggctggagtgcagtggcttgatctcagctcactacaacctccgcctcccaagttcaagtgattctcctgcctcaacctcccgattagctgggattacaggcacgcgccaccacacccaactaatgtttgtattttcagtagagatggggtttcaccatgctggccaggctggtctcaaactcctgacctcgtgatccacccgtctcggcctcccaaaatgctgagattacaggtgtgagccactgcaccccgctgagacttcttttcttataaagagttataacctgcaaggtggccatactgacaggcttggaagtatagcctacagtagagaccattagcaggcattttgaaggaggaacgattgagtcaggagctgaatgggttggctaaacatacacattgaacagattgaatattcactaaggggggtcctgacacatgtatactgaatagcatgcatgttacatgcaccccatgttcactttgggatagagacttaacattaattgcattacataattataatatcattttgatatagagggcaattataattatgtaatgcatttaatgttgaaggtgaagcaggaatacaaaggcacttaagtgctcagccactgtgaactagccagaaccagtccatggccggtggtctcttatcaggagaaagttactgaaatcagtgtcttgtccaatcaaagctatagttatggcttgtgggacagaggctcagttagtcagcatctggtggtaaatgagctgcaattgttttaatattgcttatctcaatgccagcacttgtttagctgctaggaaaaaaaaaaagaaagaaagaaacctttggcagttagaacatagctcattcattcattcattcatctttgagacaggatcttactctgacacccaggctggagtgcagtggcgtgaacatggctcaccgtagcctcaaccttctgggctcaggcgatcctcccacctcagcctcccgagtagatgagactataggtgcatgccaccacactcagttaattaatttttttttttttctgtagagacagggtctcactctgttgcccagactggtctcaaacccctgggcccaaacagttctcccaccttggcctcccaaacaggtgcgagccactgcacctggcccagaacataggttattctttaagtgtaggggtgtgtgacaaccttttcctggtgtggccttagatcctgtttgtaatttggtatcttattgccacaaagagtctgttccatcagtcttgtgatctctattttaacggctcgtcacgtgtctaagccacagaagggaggggttataatgaggcatgtctgactctgccattgccaggaactcagtttttaaggtttctcaggggtccccttggccaaaagagggtccattcagttgggtgggggactcaggattttaattttagttatcaacaaatagataggtataacatatatttttatcctagtatatgcatgtattagctctgaaaggataaagagtggctaccactgtggaggggaatcaggaacaagagggagaagaaaattcacttttccctctatgccattttgtgctgtttaaatttttaatcatatgctctttacttatttttaaagcttttaaactttattttggcagggtcttgctccatcgccaaggctgaagtacagtggcacaatcttggctcactgcagccttgacttcctagggtcaagtgatcctcccacctcaagctcccaagtagctgggattacaggtgcacacacctggctaatttttgtatttttagtagagatggggtttcacatgtggcccaggtggcccaggctggtctcgaactcctgatctcaagcgatccgcctgccttggcctcccaaaatggtgggattacaggcgtgagccactgcacccatccctaaacattttccttaagggtctagttctcaatcgtatcttcctttcacttttttcttccttgactgccgggacacactccttccaagagtcatagcaggagtttcccccctactccttcagacctttcctttacctttgcagactcctttcacctgccccttaaattcagggacaaaataaatatttattacatacttattatgtgtcaggcattgttataggcgctgaaaagacataataatgaataaaatagacacgagtccctgatctcatggaacaaacactctggtggtgtggaagagagtctcaacacggaagtcatcacttcctccctccatgcatacaaacatcattattgacatcaagagatggatcctgtgtcctctccccgcaaatgtaggctagccttgagactttcttttttaagtaatagaatgtggcagtaatgaagttctgaatcaaggccttaaagagaactggcagcttccatgtttctctctaaaaagccagcttccatgtttttctctaaaaagccagcttccatggtataccccagattgattgaccatatgaagagagaggtcacatggataaacactgaggtaccagacatatgagtaaagccttctgggaccttccaggtcagcccagtcaccatctgaatgcagctgaatgagtggcatcagccaatgccaagtgaagcagaagaacagcctagtcaaacacttcctgaattcctgacctaaattcctgagaaataataagttgttgctttaagccaccaagttttggggtggttggttatgcagcagtaactgaaacaagtgggaagaatgggagataataaatctaaaatatggtaatgaccagggctataaagaggcaaaatagtgcagtagctaaaaggccatgctggagccagacagcctgcattcacatttcaactccagctttgtgaccttggcgcaatttgtttaacctccctgtgtctcaatgtcatcatccagaaaacggataataatgttgcctactttatggagtgatatgagatttaaatgacctaatatatataaagtgctattgtacctggtacatagtaaatgttatgtatgttgttattactattattattgagaacaacaaagaaaggtgaggaactagaaggcaaagggtctaattttatattaactggacagggaaagcctctcttttaagaagacatctgggccggatgtggtggcttacgcctgtaatcccagcattttgggaggccaaggtgggcggatcacgaggtcaggagatcgagaccatcctggctaacacaatgaaaccccgtctctactaaaaatacaaaaaattagccgggcgtggtgatgggcccctgtagtcccagctactcgggaggctgaggcaggagaatggcgtgaacccaggaggcagagcttgcagtgagctgagatcgcgccactgcaccccagcctgggcgacagagtgagactccgtctcaaaaaaaaaaaaaaaaaagaagaagacatctgaacagagacctgtaaagaagtgaggacataaaccacatggacataactgcaaaggcaaggagggtgctgctgctagagctgagaaaagggtgggaaggtgagagataagataagagccagtagataatgatctggtaatagggccaggaaaagaactaagggtttatctgagtgatacaggcaacccttggaggccttttcacagagggttttgtaatctagcttccctttttcaagggatgattgttctgctttgtggagagtagagaacagaatgtaggagtggaagattggaagcggaaagatcagtaagaggctaatgtaatagttgcagatagttatgatggcttagccccaagcggcaattgaggaaaaggtaaaaagcggtttggttctggatgtattttgaaggtagagcctgccatatttgctcattgattagacatgagctttgaaaaaaagaattaaggcctgagttattggtaaagatgagctggctgggtgcagtggcttacgcttgtaataccagcactttgggaggctgaggcaggaggatcaccagaggtcaggag

SEQ ID NO: 96728 - DNA, 164837 bp, Homo sapiens
  misc_feature (1)...(164837): n = A,T,C or G
atcccagggtcgagggcagggccacaggcagaagctgaagaaggatggagctcctgtgccttccaggaggctcatgaagtgtagaacctgccacccggtgatcgctcagaaaacggtagccaggactcttcttaggccaatgtgggcatgagctggccagctctcctttgcaataagcaccatgtgtttctggaaccaggaatgcccttcttgcccctaacgccccatggctcagggatactcatcctcagaactgtggccgaggaagctgacgtctccagaggggcctggttactagctcaagtggcagacagctggaatttgtgggggcttgctgagtacccctgtgtctgggagctctggggtgatatgcagaactgaagtgacggtttagtggcactgattttgctcctggatgttggtgtgggacagtgccaacttctgtggtggacacaccctaagattgtacaaagtctgttccgttcattgcccttccctggtagcttctggagagcccgagggtggccttcctatcctcacatggcagggatgctgccgggcaccctgctgccaatgtggctgccctcagcccaccggggacaggaccctgccacccctcccatgtccctctgagccgggacagaggtcttccttcacctctacttttagtttattatgaagaatgctgctgcgaatatgtgtgtgttttgatttctccctggtgcacccctaggagggggtagctaattggtagccccatgtttaaccttttggggaactgtcacttttccaaagtggctgcaatgtttataccatatcagccgtggatgagggtgccaattccttcacatccttgcccgtgcctggtgttttgttttgtttttttctgtcttctcaattttatccattctagtgggaatgaattggggtttttttgtgtgggaaaatacacagagcataacatttaccattttagccattttaagtgtacagttccgtggcactgagtacacttacatcgttgtaaaaacaccaccaccatccatctctagaacttcttcactatcccaaattgaaactctgaccctgttaccagaaaggggtccagatccagaccccaagagagggttcttggatctcgtgcaagaagaaattcagggtgagtccatagagtaaagtgaaacaagtttattaagaaagtaaaggaatgaaagaatggcaactccataggcagagcagcctgagggctgctggttgcccatttttatggttatttcttgaggatatgctaaacaaggggtggattattcatgcctcccctttttagaccatctagggtaacttcctgacattgccatggcatttgcaaactgttacggtgctggtgggagtgtagcagtgaggaccaccagaggtcatcttggttttggtgggctttggccagcttctttaccgcaacctgttttatcagcaagctctttatgacttgtgctgaacccccgtctcaccctgtgactaagaatgccttcacctcctgggaatgcagtagggccttattttacccagaccccattcaaaatggagtggctctggttcaaatgcctctgacggccccattaaaaaataaattcctattctccctccctagcccttggcaacctccattctacttaatgaatttgactactctagggacctcattgaagttcattttactttgatttgcattttcctaatggctaatgatatcaagctgctttccatgtgcatactggtcatttgtgtatctttcttgaagaaatatctatatcctttactccttaaaattaggttgttttattgtattacgacaagtcccttgtcagatatatgatttgcaaatattttctcccattctatgggtcatcttttcccttttttagggtgccttttgaagcataaaagtttttggttttgatgaagttaaacttatcttttttcctttgctcacttatgcttttggcatcatatgtaagacatcattgcctcatctgaggtcagatcaactcctgtgtgctcttctaagagttttatagttttagctcttacatttggctcttgcattctgttaatctatgctgagttaattcgtgtagatggcgtgaggtaagggcccagcttcgtttttccgcatgtgggtattcagttattccaataccatttgttgaaaaggtgattcttttcccattgagttgtcttggcacctttgctaactcaatcgtccataaatggatgcatttatttctggaacctcaattctattctagtgatctctgtctattgttatgctggtagcactgtcttgataactgtagctttgtagtgagttttgaaatcaggaagtgtgtgtcttcagactttgttctttttcaaagttgtttggatggtttttgttccctcatacttccctataaaatctagggtcatttctacaaaaaaggcagctgagagtttgataaggattgtgttgaatctgcagatcaacttgaggagaactgtcgtcatcttaacaatcttcttttttttttttttttgagacggagtctcactctgtctcccaggctggagggcaatggcgggatctcggctcactgcaagctccgcctcccaggtacatgccattctcctgcctcagcctcctgagtagctggaactacaggcacccaccaccacgcccggctaatttttttgtatttttagtagagatggggtttcaccgtgttagccaggatggtctcgatctcctgacctcgtgatccacccgcctcggcctcccaaagtgctgggattacaggcgtgagccatcacgcctggcccgtcttaacaatcttctaacccatgaacacagcatgtccttccattgatttaggttgtctttatttccatgatgttttgcagttttcagtgtacaagtcttaacacttctttttaaagtttattcctaagtattttgttgtttttgacgctattgtaaacgaaattattttgatgctgttgtaaatgggagttgttttctaaatttcatgatcagattgttcattatggggacaattgttttctaaatttcatcatcagattgttcataatataattacagagaaatataattaattttcaaatatcttgtatactgcaaacttgctgaattcctctattagctctacaattttatggatttcttgggattttctacatacaagatcaccttattgtaaacagagataatgtcttcctttccactttgggaggattgcttgaggccaggagtttgagaccagcctgggcaacagagtgagacctcatctctacaaaaagtacaaaaattagccaggtgtggtgatgtgcgtctgttgtcctaacttctcaggaggctgaggtggggggatcacgtaagcccaggagtttgaggctgcagtgagctatgattgtaccactgcactccagcctgggtaacagagcgcgaccctgtcccccctccaacctcccctcaaaatgatcatctaagagcctttccactgtggggtgacggttggttcctcatttgctgcgctatcattggttacttgggtcccaaggggaaggttctagaagccccaggtaccgtgaggagactcccagaagttatgtggcagttggagcccctcgagggaagggagccattttctttcctggtttgggaaagagttgctcatcagtttgcgggagaagctgtttgccttcagctggtgagcggccttcaaccatgctgggggagtcggaggccaaggtggagggagcagggaggctttcagaggatggaggtgggacctaggccctggcagacagcagaccctccacttaccccagaagtggctctgctcgccaccgggagctgttcatggctctgggaccccgaggctggctgccacgtaccagcctgaccccttccagggctccagactcttccctgctcctgggaaggccttgcctcagccccctggcttctcctggaagcccctagccccagcttcctcctgtggagtcctgaaggcctggggcatgggccacctcccagagaagccgtctctgcccctccggaagcatggcctgggacaaccctattgttaactgggacctcctggccttcagcccaggaaacggctgggtgggagcctgagatgagacctcccgatcgtgcaagaaacttgcggggtgtaggggcccctcagcccacacatgttatggcttgggaggcagcccaccccatgccgttcttggaagaaaagatgactttgtgaaagcccaaatccacaaaatcagtaaaccagaggatgtttccctccagtccagtcgcctgaccagcttggcgagacttccaatcaggaaccttccaggactcgggctcccctgagttcctgatccccctaggaaatgacgacgtgacgcgtccccgggtctcggagatcctgggtggagattaattcagcagcatgctgaaagccctgtgggaacctggtgaacgagtcatctccataaatgccacgcggtgctcctcctacttgcctggtggtgtcccctttttctttcacagatgtgcctgaatcgggtggctttgctcgtggaccgccatgtttctgccatttgctggccaaatattccccaagtcctctctcagagatgtttggagccttgaataaatctcagaccatttgaatagcatccaaatgctatccactactgcttcccatcatatagttgttttgccgatatatagtggccagggtgaaataaacctgttccgtggtattacgtgtcttttggggaactgtaggctgttacaaacttaaaagcaatagcttgggtcaaaccaaaaggcagaatttgtgagtgcttccaacgtcatctgtccaccctgatgcttttcagcagctgccaggtctggagcaggccagccccagcccacggacccccagagcagctgagtaccccagggttccccttgaaattcaggagctgcatacctcccagattgtgatgaaaacacagcatcaggcgaccctttgcattcaaccctgcccttgcagaactcgcctccaaggcccccacctcaggcctcttgccagagcctgtctttatttgaaactttgatattttgttcataaatttgtttgcattcattttgatgtttaaaaatattgacatgccttttctcttgatgactgtttgggtgtgtctttaaattctgtaagtacctcacttgcctaaactttgggacttcagggtgttctttaaggggatcccttccccccaattctctagttaaccctacccccgagcatctgagcagcttgtgaggggtctgtcaggaatttgcagctcgattcttttaggggtgcacgctgggggctggagggagaaagggtgcagagcagagtgaaagttaaggtgcaccacggctgcggctaagactgagcgctgagcctcacggcctgcacgtggggtctgcttccttcttgcgtttcacacatactctggggctgcgacgtcttttattgctttcccgggacctttcaacctgaccccccagcctcttgttctgccttttcctaccccatccccttcacactgtctggttgcggccatttccttttctctctttctccagcattcatctctatctttcccatcctctgaactttatggtcacaggattgtaagcacacaccacttttgggcagcctcactcccggggcaccccccatggcggggccggggcaggtgccagcacctgctaaagcacccccaccccaacccaaccacagctaaaaactgcacactctcgaccaactgttttgttcctgctccggtagaaacagagatttcctgcggtgccagggatgggtgggaaattggggagcccgggagacagttcgtacctgtttcttgcactcttaacagatacacagtgtaaggaaaggccaagatgacaatggccccrgacrtcagactagagtatctggaggaagttgcctccatcgtcctgaagttcaagccggacaagtggagcaagctgataggygccgaggagaacgtggccctgttcacagagttctttgaaaagcccgacgtccaggtgctggtgctgacgctcaatgcagccggcatgatcataccctgcctgggcttcccccagtccctyaagtccaaaggggtttacttcatcaagacaaagtccgagaacatcaacaaggacaactacagggcccggctcctttacggcgacatcagccccacacccgtggaccagctgatcgcggtggtggaggaggtgagtgcgtccaggctgccatcyggggtgtcgagcacgaccgacttctcgggagcggccttgagtcctgctgctcagcctggagtccctgggccagcagcagctgcagagccggggagggattggaaatgcaggcgctcgggccccgtccaccctgacctgctgagacagacctgcttgcttttggtttttaaatttttttttttttttgagacagggtctcactctgcttcccaggctggagtgcagtggtgggagcacagctcactgcagcctcaacctcctaagctcaaccaatcctccagcctcagcctcctgagtagctgggaccacaggcatgcaccaccacacctggctaattttcgtattttttggtaagagatgaggtctcaccaaaaaatagcctgttgcccaggctggtctcaagactcctgggctcaagcgatcctcctgcctcarcctcccaaactgttgggattataggcgtgagccatcatgcccggccacagacctgctgtctaacaagacctccaggtggtgctcgtgcccttgaagtctgagaagccccgagcatccccttgttctctctggacagcattgagactgccatgctgtgccgggtacggttgctgcccatggcctgggaaggtggggactgagtactggcagataggtttctccaattttgagactttgacttaagaaaggggaaaaaatggagtgtcattttatgtgtccctctgctgtcccccttggcaggtgctgtgtaggtgggggggacacactttggggattcggacctccagaatgggggtgccttatccttcctggtcatcactcttctcatctgcagcacaggggcctgtgtgcttcgcttgtacaccagacattttctcacagtcctggaggctagaggttgaagttgaaggtgtcggcggggttggttttccccaaggcctctctccttgacttgcagatggacgtcttctccctgggtcctcatgtggtcggccttctgtgcatgtctaatctcccctcctcgtaaggacacctgtcagactagggcccaccctagtaatctgattttaattaccwctytttttttttttttttgacagtatttttgctctgttgtccagtctggagggcaatggtgtgatctcagctcactgcaacctccacctcccaggttcaaatgattctcttgcctcagcctcccaaatagctgggattataggcaggtgccaccatgcctggctaatttttatattttcagtagagacgaggtttcaccatgttggccaggctggtctcaaactcttgacctcaggtgatgtacctgcctcggcctccctaagtcctaggatttacaggtatgagctaccgcccccagcccttactcacctctttaaagaccctatctccaaatagtcacattctaaggtgctgggagttagggcttcagcagatggatttgggggacacagtttgacccatcacagtcctcctaggcttttagcaaggagtgtgtgctatgggtgcaagagcttggggatggctttggtaccaccaggacagggcagctggtataaactccatgaccrgccacacctccttctggaagaaggatccagttttcccagggctccagacaccaggtctttggaatccccctggggacctggctctgtgcgggacccagttttcccagggctccagacaccgggtctttggaamcccccggggacctggctctgtgcggttgccgagctggtgaaggcacagggggcggaaccacagaagtgtttccttttaggtcctctcttctctgttaaaccaaagtgagaacatggctggatggccccaggtggtctcggaagacatcgtgaagcaggtccacaggctgaagaatgaaatgtttgtgatgagtggcaagatcaaaggcaaaaccttgctgcctattccggagcacctgggcagcctggatggcacgctggagtccatggagaggtgtgtgggcccagctgcttccggctgccgctgggtggggaagaggcacatgcttgacccccaccccccaccccactccaccccactccgacccgttgtttccctgcagagtggcttcacatgttaaagccagggaaatgcagggcaaggtggtgcgttaggtggtgctgagactgaggaagttgaaaccagggcagggagggagcaggctctgcagcccctggggctctggcacctgcaccccacaccccccgctgggtcacacatgtgtgccgatccagtcaccacccagcaagcagaaggtgtcccacctgtcagcatggccaggaaacaggaggcacagctttaagatgtgggacagggtcagtgagtgggagtgggagggactctcagcaggtacatgcaagtctgtgtagaggctgcggtgccccagaggccctgggaagcccaagggactccaaggtgtcccctcgcacctgccttgccacaatttgcaaccgccctgatatgtgagacccccgtgacaattagttccgtattttgcctcacgtgggcaagtcctccactgatcattcacaaagccccaagcaccatgtcyggtggtgacaccaggggagccatcttgaatagggtttaaatagggtttacttaattctctcccgcttccttggaggtgagcgcctccaggccctggtatctctgaccacgcccattatttccctgggctctcttcctagctgggagtcttgggaacttctttakcgtccccgaggtggctggaggcaccagggacatgagaccagacggtgctgctgctggtggtttgggattggtgggcagaaggattcatgggagagcttggtgggacccaygtgtgtgtcgccatgagagcaatgccscaaccttccactgggcaggatcccctcttcactggacaacttgctcctgcacgccattgaaaccaccatcatcgactggtcccaccagatccgggatgtkctgagcaaagactcagcccaggcgctgctggatgggctgcaccccctgccccaagtggagttcgagttctgggacrctcggctgctgaacctcaagtgcatccatgaacaggtacggcctcctctctcctgtggggctgcagcctcgtcccagctgggcgaccgggccgagctctccgcctcccagtgccaacctcccaggagtcctgagggctctgatgacctgcgtaaattctgcagctccagccagccacaaggtcaggttggcctcgccttagggtcttccaggtcaatgaaaggtggatcttcactccccttctcagctaaacagacccaaagtgaacaagattgttgagatcctagagaaagccaaaagctgctactggccagccctgcaaaacgtttacaccaacgtcactgaaggtgagcctgtgaccctgtcatgagttctkcacgaagctgtttgtgcctcctgggagggctgggtcagacttgtcaccaaccctaggatgttggcctccctctgcgagcagctttctcagccccctccacttgagaaaggccccatttcctgaaggagcaggtctcagcacatggagccgcaccctcatcgtttctgagcaatttctgctctcttaccggtgggcacttgttcttgttcygtgcagggctgaaggaagccaacgacatcgtgctctatttgaagcccctacggatcctgctggaggagatggaacaagccgacttcacgatggtgcgcaggcaagggaragccggctttggtggggagggtcttgkttcttttcttttcttttcttttttcttttttttttttttttttttgtgagagggagtctcgctctgtcaccaggytagagtgctgtggcgcgatctcggctcactgcaacctccaactccctggttcaagggattctcctgyctctgcctcccgagtagctgggattacaggcatgtgccaccatgcccagctaatttttgtatttttagtagagatggggtttcattatgttggcyaggatggtctcgatctcctgacctcatgatccgcccacctcggcctcccaaagtgctgggattacaggcgtgagccaccacgcccggcctgggtcttgtttcttcaaggcatgtggggccgtgggtttcttggctgccatcagatgtgtgggcctagggagttgcctctcccctcctctttgggaaccctctgctggatacccagtgagagccatgggaagrgaagggctgggacaccgggataaggtgcagcggccagtcccctccagtgtgcctgggcctgtctccccccagctccccaccttcattgccaaggtgctggacaccatctgcttcatctgggccacctctgagtactataacacacctgccaggatcatcgtcatcctgcaggagttctgcaaccaaatcatcgagatggtaaccctcccctggcccctgggtccccttcctcccctcctggctgggtcccctccccggttcactgttttcctgctgcccatgttccccagcagtttgaaagcaggccaagatgtcagcacaagccttttcaggccccgagctgagatggagccctcttcaaggctacctagagttcttctaggggagggtactgagggaaaagaaagrgaagacggggacrgaggaggaggtctgccctgagagtccccgtaccccgagacccatctagtgctttgtgggcttctctaatcgcacatcaaaccaccttccgtctcccttagcagagacttcttttccttcttcccattcataagcacctgctagccagccatggcgttcgagctgaagggctgtatccctgggccacctctatatawtaaaaccatgctgtggccccgtctgcaggaccagaagggcaccggggtcccctgtccctggagggcctctcatcatctgcgacccccacccatttatgctgcagccttggcaaaggatgaggggccgaggaggggaagcagctcggtcccctaaaaacggcccagcagtgggcagataggaggggttattttcagatatccatatgtcagaacagatcacaggtcctgcaggcggcgtgcctggacgtcaccccaaatggcttgtcggagctttagatgtctgtcttctcttttgcccagacacgaaccttcctgagcccggaagaggtgctgaagggcctgcaaggtgaaatcgaggaagtcctgagtggcatctccctggctgtaaatgtgctgaaggagctctaccagacgtacgacttctgctgcgtgaacatgaagcttttctttaaggtaccccttcctcgcagggcgagggccaaggcaggacgagtgagttcatatgagccccgatatttgataaacttgggacatttgaagcaaacgtggcctcatctctctttctctcytctaaggacaaagagcccgtgccttgggaattcccttcttctcttgccttttccaggataaattccttcttccrgcgcatccagaccattgaggtaaaaacagaactyggtgcatcttgacctscacttcccagactgctcctaccctaggacacctgcagcgtccatccctaccccccttgccaataatcccccaggcagaaaataagtgaggcccaaatatctgttatgaggaaaccaaggctttgcggcagcatctgccgtggccagagctgttagccaagaataaaaatgacccacttcgggtgcttctccccttatctcgtgcatcctatcatgagcgggttactgataagttaaacccccacgttcaggacgcctgggggccaacagcagtcacttagtgggactcaattattacaaatggagacttatgaaggcccccgtgcaagcaccatgtggatacacggagtgacgcacagcagataaaaacttaaaaatggtgcatggcccagcccagtggctcacacctgtaatcccagaactctggcaggccgaggagggaggatcacttgagctcagaagtttgaggctgtggtgagtcatgattgcgccactgcagtccagcctgagcgacamagtgagaccctgtttcaaaaaaaagcttcaaggcggttttctctggggctctggagagaagagatgagagggatcaagacggggtagggcaagaaagttttgccttttgtatcttctgcatggtgtaatttttaaaaactttgtgcacatataactgtataactcacatccttaaaaaaggggaaaatcatcctggaactgtaaagcattgacttaagggtggacaccattgtcagaggcttgggagaggcttgtccagttctcwtctacacctcctggggggcaggggagggaggcccgctcaggagttcaaaattgcagtcacagagcgcggactaatgcctgaaatctcccagaccgagaatgtggaggagagtcacagtcacacttygggccaaggagctctggttcccacatgactgattctgaatcagaaggaagattctgggyaggaagggactttggaggtggaggaaatggctttgctgtccaccccctgacaacaggccatgccagcttgtctgtgtcctccgcgtcgggtggaagagccaagagctcctggtcctcggtgcctgtctcctcggggtggtgttggtgcgtggcctgatgcttcctggacctgggagaatagcaccaacctcagcaccagttcaggggagtgatgtcaagtccacaggaagatctccagtctaaactctgcctgcactgtgcctggtaggtgcaggggcacagaagagcatccagggagccttggagacctcatttgggaaacaggaactgcacacacacaaccagctaacgggatgggcctgaacgtgactaaagcaaacacaagcggcgcagatgggagaccgggcccctgggaaggaatgcattgctatgggccaaaatagtcagggagcgcttcagggagagggggcatgagccacaccggcgaggaagcagaattttctacacgtgtgtccatccaagcattccagccgctttcttcttggatcaccttcgggacacggcactctgcataggatggtcttccaggtagcggggaatttaaagcttagcaagagcatcagaaatcttcagcaccattccaaccgcttcccacagcggagaaaacggaggtcccagcagagtgtgatttatttagagatgcggtttggccagtctggggtcaggacaggatcccaaactttatcctctccagctcctcctcattcacacctcatagataattcacagagcccttccttccatcccctctttctgcaggggatggaatatttgcttaaagaacagcacagacacagagggtgtcctcccacccccatggttggtgtctcctggggacattttgctccccagctcctcctgcctggggtcagagctagttttgtaactggacccgtgagttgggttgtgaagatgaattgactgtgtttttctcctccactaggaactctataaaacagcaattgagtttctgaagctggagaaaatcgagcttgggggcgtgcgtgggaacctcctcgggagcctggtgacccgtatctatgatgaggtctttgagctggtgaaggtttttgccgactgcaaatatgatcccttggaccctggagactcggtaggtcctcgggcagggttggatgaactggactcggtgagaacagcaccagcctcggtaccagcttaggggtgtgatgggagggcacacggaggaagcaggtgccaggtgatcccaacactttgaaaactgtgtagagcggtccccgcaacagcacattcagctgcgcctcagtcccgagtcctctcagcagggcaggggctggagagggtgcccttggcttgctttgcacgctgattacaaggttgacatttccatttgcttttagaattttgaccgtgattatgctgattttgagatcaaaatccaagacctggataggaggctggccacgatcttttgccaaggatttgatgactgcagctgtatcaagtcctccgcaaaggtaagcatgcagtggagacgcaggcagatctggagcctggcactgtggtggtggattcatgtcgagaacgatcytggagaccatttcatcctctccatgtagagctgatgtccagggagggagggcccgtctcctgtgcctcagagtcagtcagccgtgaacacccagtgtagctcctgatggttcttactgccacatcctagaggaagaggagcaagtgagtgtgagatggcattattttactgatacttcttatgctcactaagaaacaaggggaccatttattcttgattcagttttcccactactcaaaaggagtgaaagttaaagaggtaaagttggtgtaaaaataaaattaatgcagattttggcccactgagctgaatttatagagtgccttcgtccatgcaggctactataacaaactgctgtagaccgggtggcttaaacaacaaacatttcacttctctcagttctggaggctgggaggtccagcagactcggtgtctggtgagggtctacttccgttcctagaaggccatcttttcatttggtccttacatggcagaaggggcaagggaggtctctggggtctctatttttagttttaaggggtttgtttgttttttgttttgttttgtttttgttgtttgtttgttttttgagatggagtcttgttcttgttgcccaggctggagtgtagtggcacaatcccagcacactgcaacctccgcctcccgggttcaaacgattctcctgcctcagcctccctagtagctggaattataggcatacgccaccacacctggctaatttttctatttttgctagagatggggttttgccatgttgggctggtctcgaactcctgacctcaggtgatccgcccacctcagcctcccaaagtgctgggattacaggcgtgagctaccacgcctggcctactttttgtttctgtagagacaaggttttgctatgtttcccaggcccatgagttctgggcttgactgcttccagggcccctgatctgaacagtttagccggaccagctcccatgactgtgaaggcaattgggttggcctgggcagcctgggctggtggtcatctttcaggaggatttcaaggctgagattgctaaggacaaagatctctccccgacaaacgtcaggatgttcctttgcccttttgaatgctcttgcaaaaatgcaaatacatgagagtttgaagctccgcaaattaaggatcaagtaagtcttggatcgagttggtgttccaggcaaaatatcaatgaatgcaaattaatacagcacctccttgctgtggttgaaaaaattattcagttatacttgctaaagcaagatgaggctgacttgattcagaccttactcacgatttataccatctcaatagatacaggtgtagggagagcgatgggagctcagctttgaatacactgcaggtaagtaggaatttctagcaaaggagcagggtgggagtccatggatagaaaattacttagaggggacatcaggggttgggggattctagctaaaccaacttcaagattctagctggaagcaggttagggtaatcagacatcccctgcgggatggtggaggatggagaccctgatgagaatctttggctaagcaaagaayctggcaacattccctttctcagaaggctcttccccaggtagctgcatctagttgcagggtcctcacttccttccttccactcaaatgcccccaggctggtcccttctcagcaatggccttccctcatattcatttgtatactaatgtctgtgtgttcgttgtcttcctgactagaaggtaaactccctgaggtcaggcactggatttgagttcccttagaactgagcctagcacagggcaggcgcttctgagtatttcctgcagtgcacaactggctcttgacaagggaggctggttgttctgaatgttgttgggaggtagtttcgctctagcataagccttccacgtggagcccctgaaggataacacaaaagcgtcaggactgccccagcgcagaagggtcccaatggagccaattctttcatttggaaacctcacttttgggtctccaaaattaaagatggggcacaggctyatgggctgggcgggcgggcagctggcttctgtggctcctgcacccctaacactggctccacggggaggtgctgtgactccctgctgctgttccgatgtggaaaaatctgaaaaattaagtaacttggtcacccggccagggccagatgagtccccagagtcttgctgtccccaacatggagattgygccacctgcatctagtttggcacaaggggaagagcagataaggaccagcgtacgggtctgggctgaacctcccccagggttcactaggggatccggcagtggggagggagctgggttggcgagttcaactttgtgacccctcgggagccctaggcccctaccctgtgaggagcaggaggtcctggaagaaacccaacccgacctctgcagaatggagctagcgaggaacaaatgcagtcaccccgccccaggctttcccctgcatccctggcacctgttagggtcaagaggggcttttgggctctaaaagaaagatctctttttaaaaattttcacgtatgtttatgctcaatttaaaacaaagaaaagcggaggggagggaggcagggggagaaataactcttgtaacccatttccatcgccatctgttcacgtttctctttgacctaagaacattttccccctggtttgacagccctgtgctctaaataggatagggccctggggtttctctcccttgttgtcccttccagcccctgcctgttccggagttagttctcattatcagcaactcrcacacagccaggaacgttctagagcaattttccrcatgatctccttttggcggaaaatagaattcgcttcctttccaaaagtcattaaactaaaaactatataaacatgaaaaggaggagagagaaatgggaagacagagaaaaataaaaatgcctcccgcctcggcccctcaaagtgttgggattacaggtgtgtcggttgtctggatgatgggtcttcaggtttttggggtttttttctatttttctgacttccaagtaaaacatctaccygcattacaggatagtcataaaccattaagaggaacattttttttttccaactgccccatgtcaatgctttgaacaaatgaaactggtgacctcatacgtcagcaggcgaccgtggaggaaggcggtagctggcaggacaccagcgtttccatgtctgcctgagagtccacggctgctccatttgtacaactcacaatacaaataggtccaagggtgacaatttttttctaagcccaggagaaatcagaatttgggtaaggaagatttgaacaattttgaaaaacacaattaacttaaaaatagccgcaatcttgcatttgggaaatctgtactcttgggggcctgaaaaatctccctctcttcgcrgtcatgttttggtttttcctcctgtggccatttctagggacagtggtcacctttctcagacccaagtctggggaaagtctgagactcaggctcaccgcagctggtctggcccccattgggcgtgggttatggcagccccgggaaactctcttggatttcccactcacacccagcactgggggaccctgtttcgtgtgaggttgtcttccctctctctggtccccctcccacttggtctgacccccagagctttctcagagcgaaacacatttcctgatggtggttttcttgcctcagctgcccttgagagtggcagtgctcttcctaagaggaacgcttcctgtggataaaatatttcttcatttatctgtatcagagtagaagcccagrtatataaatgcaacgttatggctattttaaaattgtttacttggagttgttttgggtttgttttttctggagacagggtcttgctctgttgcccaggctggggtgcagtggtgcaatcttggctcactgcagccttgacctctggggctcaagtaatcctcccatctcagcctcctgagtagctggaactataagcgcacacccaaaagaatacaaaaactggaccccgctagtttcatgtattctttgtattttttatttttattttttgtagaaacaggattttgctgtgttgcccaggctggtctcaaactcctgggctcaagtgaccctcccgcctcggcccctcaaagtgttggaataacaggtgtgagccatggtgctcagcctattttttaattgtttaagtcttccttaccagaattctgatttttcctaggcttagaaaaaactcttgtagcccttggacttatttgtactgtgggattataagccaagtatttggggactcggcctaagtcaatgagaaaagcatagaggcttccactgagccagttgacacacacaaaggttccagtggattgttttgttttggcaaggtacacattctctcrctcctgaagattggccctgcccgttttgtccacagccacaggctggggaaggggaggagactgtggtgaagaggcccccttctcctttgtcctcagctcctgtacaygtgtgggggcctcatggagcggcccctgattcttgccgaggtggcgcccaggtattcagtcatgctggagctgtttgacgctgagctagacaatgytaagatcttgtaygatgcccagatggcggcctccgaggaggggaacatccccctgatccacaaaaacatgcctcccgtggccgggcagctcaartggagcctggagctgcaggagaggctagaggtgtccatgaaacacctgaagcacgtcgaacacccgtgagtcacagccctgggcaggggcaggcaccccgcctccatggtgcgggagagcgagagggactgtcccaaccccgagcgggaccacccctcctgtcgaccagactgttacctcccrgagcaaaagcccagaagagwccccttctggtcctccctcctcccctgatcaccttcttggtgggagtgctcaggagaaatctggctggtccccacccttgcccaccagcctggtagacatgaagaccacccaggcaggaacaggaagaggctgtgtatgcagctgactgagccactgttgcgtgcacttggccaagtctcctggacagccaggggccggggaggcttcacggtggacgcagggacggctgcaggggagccccggcttggcctggggaggccggtgcagctgactaggaggggggccttttatgtggttgtttggggggcgtatttgctttcatctagttggccccaggttggaagggagaaggaaagttggagaggggctggctgtcattcatccaggcctggcggtcgggagccagttgctgcgtgggttctattttggcctcctgggctggtggctgcagactgcaggtcggagttccatttgaacatttggtctggccactgcttgtttgcatattcagyctgtgagcctcgagtaattgggtggccggcygcttcggcaccccagatcgggcagcaacgatgggacgtgccgaagacaccccacaggagatatccagtggggcctcgccttcccgctctgattccagggtcatgtctggagcagaggccaagctgacctatcrgaagtatgacgagatgatggagctgctgaggtgccaccgcgagaagatctaccagcagtgggtggcgggcgtggaccaggactgccactttaacctggggcagccgctgattctgcgggacgccgctagcaacctcatccacgtcaacttcagcaaagcggtgggtgccargagtggggacygcgtcaaaggctccttgggagcggggggagggcctgccaaggttccctcagcacggatttatggaggtcgatgtttatatcacagttcgcctaaagctttacttcttaagtgttctcagggtatatttaagacatgagggaaagcagaagcaactttgacaatagcttcaatgagtatcttcttgaaagcgttcctgtgatcccaagaagaaatgacaatttgaaactggggggggggaaaaagtctttgccgaatctagataaatgcactggctggtcaaggcaggcacactggggagarttcacacttgtgggctctgggatgtgggttctatggctaaaacccggaaagttcagatgagcagaggatggaaccgaattcctacaagcacagccccagagctgcccaatctgcacgtggcaaggcagggaaaccagagatgcggctcttccttggaaatcttcccactcactaacattcattctttcgttcaccaaatacttactgagcacctactacatgtatgtgcttgggataaattagtgatccagacagtcagagagctgtctgtcctgccctcctagagcckacctccaggcaggagggcggggaggatgatcagctagcattcacgagggagtcaagtgtatgatayggtagaaggtgcaacaggttccgcggaaggaagagcaggaagggcaggttaagaagatcaatagagccggtagaaggggcaggtgcaattttagatgtgagcagagacttgtgggaggtcagagtgccgctgagcagagatggagggaacagctttgcrgcacggcatgcgggtaaagaaaaggccaggtggcgcccgagagcctggtgcagtccaggagcagcaaggaggccagtggggcgggggaatgggcaaaggggaaggtcgtaggagaagagatgagaggtgacgaggaagggccccatggaccacagagggacttggagtttggtttgagcaagatggcagcccctgcagggtgtcagacagaggtgtgctgcgattagatttctagttgtaaaggacccttctccacgctgtgaggtgcgtagattgaacggagctggggctggaggaaagagcaggaaaatcagttgggagcctgttggcacagtccaggcaagagatgacagctgggaggtggtggctggaaccagagtggcagcagtgaaggtggtggtgagcttctggacttgaatatagtgccatggagactcctagtaggttggaaatggagcgtgattggaagaggggagtcagtcccaatgttttagggtcaggtgagtagacaggtagaattgccattggccaagagggcaggtggggcagaggccacaggggaggatgggctgctgtgctttagccttgttgggtgtgagatgtcayctggacatccaaagagaggagctgagtaggcgggtggatacagaaggctggaagtcacgagagaggctggggttggagacataaacgtgggagccacccacacagagatggtacttgtagccacaacactggacatctcattacctcattcagcggagatgacaaatgggctggctggtcaaggcagctataacgttggatgacatcacacctcattcaactgagggtaaattgagaaggaacaaggtctgtggctccccatcatggacatcttgagattatcaaaagagactaataatggtgaccaggaatgtctagtgtcctggaagccaggaggacactgtgtgcccagaaggaaagagtgccagcggctgggcgatcccatgagatgaggcccgtgatgtgaccagtggattcagcaatatggaggttatctcaactttgagaatagctttgtggacagaagcactgttggaagggatgtccctgttgttgatctcgggtcataaccgggtgaaagcagagagaaaacagaaggttagattccagcgaggaaacaagtgaagacccgaagtcttactccaaaccacttgtgggtagtaggtaggagaggacagagataagaaaattaggatgatgtcagccacccatggtgatgatgatatcatccacctacaatgatgacatcatccacccataaggataatgtcacccacccgtggtgatgacaatgatgtcatacacatgcaatgatgatgtcatccacccatgagggtgatgtcatccacccatgagggtgatgtcatccacccatgagggtgatgtcatccacccatgagggtgatgtcagtgctttccggctcaggatcagccaacagggtgaaaacgtcctggtcctgccaacaaatactgcctcccaccaactttgagatcccccccggctgtcaaaacatcccagggcagatgctcatttctgttgcttgaacactgcactgttgacctgacctgctgacatgttctttgatcttcgtttgtcatttagttggtggcagttctgagagaagtcaagtatttgaatttccagcaacagaaagagattccagacagtgcggagagtctgttctcagagaacgaaactttccggaagtttgtgggcaacctggagctcatcgttggctggtataatgaggtgagttggtgagtcggtactattcctgatgcagctttgtatygttttggttttttgtcaagtttgtttgtgtgtytcagagatgtggctcttcctgggaaatcttcccattcactcaaattcattcttccattcactgcatacttactgagtacctgctatgtgtatgtgcttgggataaattcctgagccagggagtcagagatctctgtcctgccgtcctgttctgttccacttggagatcttacaccagcatttgttgtcacccaacaacttctggtgtaagatctccaagcagaacagaattaaattagtgtgtattttaatatttagacatggttcaagccagtcttcattattcatgcaaatagcagcaaagatagtgatgactcagaacagctggtgatgaatatcttattcccactgggctttggcttacgttactttttttttttttttttttttttttttgagacagtctcactctgtcacccaggctggagtgcagtggcacaatctaggctcactgtaacctctgcctcccaagttcaagsgattctcctggctcagcctcctgagtagctgggactacaggcgtgtaccaccaagcccagctggtggtagtaaaaatacaaataatttttgtatttttagtagagacacagtttcaccacattggycaggctggtctcgaactcttgaccttaggtgatttgcccgcctctgcctcccaaagtgttgggattacaggcataaggccccaagcctggccaattacatgattctttatagatctatttaccctcctgaacaaattttggataatattaaagtcattcaacattgcttccattacttctgttaatgtggggaggactggatgggcatttcctggaacccagagtaggattatcatgaggaagctgtgtgtgaggggctaggaggtggcggtccctgctcagctctttggttcaagaactcctttttggccttgattcctggcaccatctgatctagggacctgacgcagtaatcaagaggttgactttggaaaaacttcccagtaattgttggaggtggggggcggtcccgtccagcaacacagggcttgttgagggcacctccttcctggcacgaggccctggaagccgagtcgggaaccggagggcaatggtatcatacgtgttctgttttctctgtctgctttcactcggttaattattttgagttaatctatgttgttgcatgtagcaccattcttcttctttttaaacgtgagtcaattttattgctgagtggcaatgtgtcgcatggatatagcactattatccattcctctgttgatgggcattcgggttgttttcagttttcgcttttacaaataaagctgctacaaacatccctgtacaatcaggaggggcccggagagcgtggctgtggggctcagcgggcagtcactgtgcttgtcctccttctagacaccatttcttatggattccactcatataccctgggaaaggcgaccatttgtaccatacaactttgaccccaccccaagccacagtacaacagggccagtctggacactgttcatttcctgttgctgctgtaacaaatcaccacaaactgagtgactttaaacggcacatatttcctaccttctagttctggaggtcagaagtcctggatctgtttcattctgctggagtcaaggcatccgctgggctgcctccttctggaggctcaaggggatggtctgtctccttgtcttttccagcgtctagaggctgcaccttcctgggctcatggccattgtattagttagagttctccagagaaacagaaccaatgggatagacagatgggaggatggagggatggatggatagatagatcggtagctagagagataggaaagcaggtagatggatggatagattatataggtggatgaatggatagatagctatagatgggggggatagatacagatggatggatggagatggatggacagacagagatatagacatgtatatatggagatttattgtgaggaattgcctcacgcaattacagagggtaagaagtcttacagcctgctgtctgcaagttggaaactcaggaaagcaggtggtgttactctgagtccaaagcctgacaactaggggaacagatggtgtaaatcccagtccaaaggctgaagatgatgagatggcccagctcaggccatgaggcagaaacaaggggtgaattcctccttcctccgccttttgtgctattcaggccctcaacggttggatgagacccacccacactggggagggctatctgctttcctgagcccacccattccaatgcttatctcatccagaaacaacctcacgcacctcagaaaccatgtttaatctgggcaccctgtggcacagtcctgttgacaaattaaccctcgcggccacattatttcatgttcgaagcacatcactccaacttgtgcttccgtcatcacactgatgccttctcttttgaccttcttgcctcyttttttttttttttttttttttgtgacggaatcttgctcctctccccggcagccgtggcagggctccccagattctgatcaccaggggccgtaatatctttgtccatggtccattcattagaaacacagcacctttctccagctggttagattctgtctaaagagctcccgccttggactccaggtatggtaggagcaccrtgatttagtcacgagcacactaaagaggtgtgttctgagattctctcacgtagggtgtagtctcagagcagggttcctcgactgggaagagaccactgtccttgtcattgtttaacaacccaaccctgatggacggaatcctgctacacatcgtcttgctttgtaatcctgtagatgcatcctttacttctgtctggttttcagccggtaacagctcttatactctatttctctttcctaagcacctatcctacgagttaatggtcagaaaacattcgaaggcatgggtggaagtacactatttaaagcactaaaatgggctgggcgcagtggctcatgcctgtaatctcagcactttgggaggccgaggtgggtggatcacttgaggtcaggagttcgaggccagcctggccaacgtgctaataccctatccctacaaaaaataaaaaaattacctgggcttggtggtgggcgcctgtagttccagctactcaggaagctgagacaggagaatcgcttgaacctggcaggcggaggttgcagtgagccaagatcacgccactgcactccagcctgggtggcagagcgagactccgtctcaaaaaataaagtaccaaaatgtatgtaaagaattattctgaaaggcaaatcagcatctagtgtgtatttttaactctgtgattccatacttcatgtagaagggtcctagagaagtcatgaaacaagatgttgcttggtacgatgagattcctaggcctaaatggtgcttattatttaagggaatcatgaaaacttctcccttgtttgttctgttttgtaaattcaggatttcaagcattaaattaatttcttagagtagggcaaactagaacaaaactatatagaacctatactttttttttttttttttttttttttttttttttttgagacagagtctcattctattgtccaggctggagtgcagtggtgcgatcttggctcactgcaaccttcacctcctgggttcaagcgattctcgcaccttggcctcccaagtagggattacaggtgcacaccaccacaccgggctaatttttgtatttttagtagagacaagatttcaccatgttggccaggctggtcttgaactcctgaccttaagtgatctgcctgcctcggcctcccaaagtgagaaactatactattgttaacactgatccattaacaacttgaatagtttctctgcagatcctgggttttctgttgtataactgaacttcaggctttaggctgggcaccatgactcacacctgtaatcccagcactttgggagactgaagtgggaagatggctggagctcaggagtttgagaccagcctgggcaacatagcaagatcccatctctatattaaaaaaaagattttgagctttagattgaccagggaaagggtctgagccaagaaatgctcagtgatccacatgtatttctttggcttagaatcacaaaaagaaatcaagtacaaacctttgtgattatatactgaggatttatgtattaaaagtaayggaaaagatggcaattacttttacaccaacctatacacagttaattcttaattagtcatggtatgggctagaaagagataggaatactataacataaaacagtaaccgtacataaatcctcagtgataaaagtcattctaaaaattgtggagtgtcctgaaatacgatttccaaataaaaaacaatcatcattggctttgttggtgtattaggctgttacattgctataaagaaatacttgacacctgggactttgagaggccaaggtgggtggatcatttgaggtcaggagttcaagaccagcctggccaacatagtgaaaccctgcgtctactaaaaatacaaaaattagctgggcatggtggcgcatgcctatagtcccagctactggggaggctgaggcaggagaattgcttgaacccgggaggcagagattgcagtgagccaagatcacgccactgtactccagcctgggtgacagagtgagactccatcttaaaaaaaaaaaaaaaaaaaaaaaaaaaaaaaaaaaacacaaaaacctgggactgggtaatttataaagaaaagaggtttaattagctcatggctctgcaggctgtacaggaagcatagtggtttctgtttctggggggacctcaggaaacttggaatcatggtggaaggtgaaggggaagcaggcacatcacttggcacaagccaggatcgagagagaagtgggggaggtgctacacctgtttaaaaaggagattgcacgagaattcattcactatcccaagaacggcatcggggggtgatgctacaccattcatgagatcattgtccccatgatccagtcacctcccaccaggccccacctccaacactggggattacaattcaacatgagacctgagtggggacacagatccaaaccgtattagttggtgttgaggaataaaaggtccttaccagagaacaatttaaaatctggttggactcggaacaaaacctgtcacctctgtttttcagataaagactatagtgaaggcartagaatttctactaataaagtcagaactggaagcaattgatgtcaagttattgagcgctgaaacgacattattctggaatggcgaaggtacggaggccacattcctcccacattggattaaacttgggagtccaacctgcccagcatctgtcctcaaacaccactagagtggtcacttctgcctcctggctgtgtggatctgctttaacttcaagggggctaaaggatagttacttccacctgcctgcccaggcaaaaaaaaaaaaaaaaagcccayctgtgtcacttagaaacggaatccggcaaagactccctgggaactgccaagaggtttccaagtttcccaaactgggcttgctggaggcccagtttccactgttggtttatcaagcatgcacagagcatgcacagctggtgagcagagctggtgcacatcttggctaactcagggcagacgtcagcaaagtaggaagaagtgtagtcacgagtccctgtcttcccttcattccaccactggacgaggcagaaggcccccgaccccctggccccatctctgatgctcccagaggtggaaccctttaacgtgaggagtctggggctcctacgtggggtgaagggtccacacattctccaaaccctatgtccaaagggacactatatttgtgattccttggcatttcatttcagagaacgcccagcgatttcttctgggaatcatgttccagaataggagtattttcccagggctgtctcatagtgatgagtgttaagccaacccaagaaaagttttcatcctgctgaatttttttttttttttycctgagatagagtctcactctgttgcctgggctggagtacaatggcacaatctyggctcactgcaacctctgcctcccgggttcaagctattctactgcctcagcctcccgagtagctgggattacaggtgcccactgctatgcccagctaattttttgtatttttagtagagatggggtttcaccatgttgcccaggctgstctcgaactcccgacctcgtgattcgcctgccctgacstcccaaagggctgagattacaagcttgagccaccgcgcccagcctgaattgttcattttgtaagattcctctacatttccattttaggtgtgtttcagtacattcaagaggtgcgagaaattctgcacaacttgcagaacaggatgcaaaaggcaaaacaaaatatagaagkartttcccaggctatgaaggtaagcaaggggcagagcacagagtggggctttgtgggggcctggggctgccctggggcaaaccaggctacgtagaggcccatggaaagtgctgcgatgtgtggggtgcagtgggagctgccgtgcagtgctctccaccggtaggatgatatcagagtggtcccagggcagaaagagcccagttgctctgtgaaattcagttctgctccattctgctgagctccacaaggccccctctgtgccaggccagtgccagtagcaaggggtggaaagagatctgccaagactcacccccactgggaacgagcccgttgctcagtacagaagcagtacagttctaactcaagctccttccggagcactgggggaatccttcattagccttctaggtggtctggtctgtcactgatgctctaatgtgcaaaaacacttgcagcaatatatccaaaaggaattttgtttttgtttttgtttttttagtggagatgaggtttcaccatgttgcccaggctggtcttgaactcctgacctcaaatgatccgcctgtctcagcttcccaaagtgctgggattacaggcgtgagccaccgcatctggctctgattcaattttcaattgacgggaataatttctcacgcaatttcctcagaaagggctcattgatagcatactttgagtcctcccttgtccaaaatatctttcttttgacctcatctacaatgatcttgtccaggtcaggggtttcttgatacggtccttttctttcactgctccagaaacggccctgtgtgtgtttgctagggcggccatcacaaactgccacagtctgggcgacttcaacaacagacgtttctcttctcacagttctggaggctggaaggccaaggttaaggtgtcggcagggttggctcccccaggactctctggttagttatagatgctgtcttctccctgtggcttcacagggtcctccctctgtgtgtctgtgtcctcatctccttgtctcataaggacactggtcatgctggatgagggcccacactaatgacctcatattaacttaagcacctctttaaagctctcatctccaaatgccattgcattctgaggtatgggtgtcagggcccctacacacggatttggggggcacagttcagcccctaccagccctgcctcagtttcagtgctgggcaggctggcagtgctctgcctccttcctgcatgagcctgtcctctctgtctggggcgtgcagagttcttcgttatctttagggtcagaaaatgtcaccaaagtgtccagacgtgtgcctccttgtgttaatgtccgctggacgtcgtaacattcttctagcctgttgatggcgttgtctcgccagctagtgggcatgacgtcgctcctcctcctccccacgcctccccacacctccctgtctgctctggcacacaggccatttccccagtgtctcaggtctgggggccaggtctcttgtctgtctctgcacgtgtggcttctcgatctcttcactttgtttcatgccaaggggtctctgtcctttctgttacctgcaatgctcacccagcctcctctgtggctgttctctctctctcctctactgaactgttaaatccagaaaccaggccgttcaaaccccacgggcttctgaatcttcagcaggggccgcagcaggtgcagggtctcagagggttggctgcaggctctgggcggtggggagcgagcaggagacgggaggaggcccactctggaggcagatcctgcagagattcctgctgcccctgaggccccagcttgaccactgcccaccacccgctacagaggaccagggcagcactttctctctgtctctgagacccactgtcttacataaacccccctttacctgagctagcttgtttgcaccagaagtttttaactaaaccacaaagtatttgctttctcctggtgctgagctgagatgctgaagcccggtagttgggtctctgggcaccaaggaaggaatgatctgtttgccaattctgaggttgttgggttcaggggtgagttttgaagaagttcacctctgcatcagaaaagcaaaggtgacctccgaggagggaaggcaaacacttgggcccactgtcctggtcatttcaggaggctacaagaaaatactgcagactgagttcctggtgagggccctcttcctggtgtgcagacggctgccttctcgatgtgcctcacgtagtagagagaggttgctctggtgtctctttctctgcttaaaggacactaacctcatcaggggtgggccctactctcatgatctcattatctcatctaaacccaagcacttgccaaggtccctgcctcctattacaaccacacaggagctaggactcgaatatgtgaattttgggagatgagagaacacagacgtgcagttcataacactcacccaataggggctctgctaacccccattataaggagaataatcactaaactggtcacagaatcagctgacctcctgtgtctccatccccatcactttcctcatcacgtccattctgaagctgcagcagctgcacagtgaccaggctgaaagccaaggggcttggtggaggggaccagcatgctctgcacttaggtgcggaagcagagccggggagaacactggctcccaggcacatgccctcagatgccgtctcaaaactagcaaaaacagacatgacagccagcagcatctagctccccagcttagtgagaaaaccaagcaataggaaaagaaaatggctcaaactcagtccatcaggcctggaatcaacaattcctgtttggagtttgtacattctcaggctgtgcccttagccctcaggtgtgaacagcaaaggggttaggaccaaaaggaggctgttcaaagattgtgcagcatttgagagtaacaagtcgtttagatatctcagaaaaacacagaccgactgaagctctttrtttagtaaacctaagacattttttcttaaattaaaaaggccgtggccgggtgcagtggctcatgcgtgtaatcccagcactttgggaggccgaggcgggtggatcacgaggtcaggagatcgagaccatcctggctaacacggtgaaactccgtctctactaaaaatacaaaaaattagccaggtgtagtggcgggcgcctgtagttscagctacttgggaggctgaggcaggagaatgttgtgaacccaggaggcggagcttgcagtgagccgagatcgtgccactgcactccagcctgggtgacagagcaagactctgtctccaaaaaaaaaaaaaaaaaaaggccatgacatctacgaaataacaacagaatgagaactaagaacagaatgagaggaaagcagagaagggaaaggacatggctaagaaagtcaaaactgcaaaagcagaattaaaatatactgaagcaccagttagactagaactagtgctgtgtaacagtggatatattaaacggaggacaattttaggaaattgctaatatgcaaagggaaataacaatagataatgtgtaagatgagggagacgaacaacataaaaatcatagttgttactaaagaagtaataggctgggcatggtggctcacacctgtaatcccagcactttgggaggccaaggcaggccgatcacttgaggtcaggagttcaagaccagcctggcccacatggcgaaaccctgtctctactaaaaatacaaaaaggagccaggtgtggtggcacacacctatgatcccagctactagagaggctgaggcaggagaattgcttgaacctgggaggtggaggttgcagtgagctgaggtcacaccactgcactccagcctgggagacagagtgagactccatctcaaaaaaaaaaaaaaaaaatagtaatgaacaaagatgtaatagaagaaaattttctcaagctggggagacaaaaattaaaggaaggcctgagtgtggtggtcaaagtgggtaactgatttccaggccagatgacacatgtagacatattctgaccaaagtttacaatcccaaggatacagaacaatattctgcatgtttctaccaagcaggtagcccacacagaaacaaaaatcaggcagccttttgactttacacagatctccagaacatgataaaaatggccagtcttgagaaagrctcctgacaattatctgtgaatgcagcagtaaagtcatcctcacacatgcaggggcttggaaaaataccatttggatacccttcctgagaaacctattccaggatgtattccaggataccaagaggtcaaccacattctagagtaccaaggagagcattaacatttaaaaagactagcratgagcttggaaccaattaaatataaagaggtaagtatataaagagataaatacggttgtaaaaggttacattccaaagtcaaaagcaatacttgtagaaaaatataaatggtagaaaccatatccatggtgataaacatgattgataattggtagttaggaggaggaaaaaagttggggcagggaagttaaccatatcctgaattcctaaacgtggataatgagaatcaaaagcaatttttttttttctttcttgagatggagtcttactctgtcacccaggctggagtacaatggcacaatctcggcttgctgcaacctccgcctctgggttcaagcgattctcctgcttcagcctcccaaatagctgggattacaggcatgggccaccatgcctggtaaatttttgtatttttagtagagatggggtttcaccatgttgttcaggcaggtctcaaattcctggcctcaggtgatccatcagccttggcctgccaaagttctgagattacgggcatgaatcaccatgcccagctgcaatttttatttccaaaattagagaaacatttaaaagacttaataaacttaatggcaagttctagtggaattagaaacaggatttctcctatccaaatcagtaaagaatataaaagcaaataagctatagtttttaaagcaaaataccacaacaaagggaaayggtgagaaagcagaaaggataaaacgtgataacaaagggcaaacattagttacagtatatataaastatttaaaagcaaaatagattgtttaaaaatgtagttatatgctacttccaagagatatctaaaacraaatggaaaggttgaagataaaatgattgacaagtaggtgaaaccatatgaaacttccaataattgaccatttttgacctttaaaagatggcagttctcacagccgagctcaatggctcatgcctgtagtccaaacactttgggaagcccaagcagsagtattgcttgagcctagggccttcctatgttgctcaggctggacaacacctgtggtcccagctattctggaggctgacgtgggaggatcacttttgagcctgggaggtcgaggctgcagtgacctgagattgtgccactgccctccagcctgagtgacaaagcacgaccctgtttcaaaggaaaaaaaaaaaaatttcaaatggtagtcttattcacagacatatatacatccttgcatacatacatacacataaaatattaatcagcaaagaacaactagaggcaaaaatatatatttagctaaccatacaaaatcaagtaaaatctatataaaaattatagttgtcctaaaatgttgtgttcccaatgagaatattgttaatatakctatataaataaaagcaaaagctattagaagagttgaaaaatgggcagaacgcaaatgtaatgggaaggctaacacaacattattatactgccatggactgtacgtttgtgactctcaaacactcctttgtggaagccgtgatccctgctgtgatgggtcttggagacgtggccctggggaggcaatcagaacatgagaatagagccatcacgaaggagattcgtgcccttatagcaacagacaygagagagctcactctgcccctccgccatgtgaggtcacaacaagaaggcggccatcatcatctgcccaccaggaagagagccctcacctggaaccaaacatgccggcaccttgatctcagatttctaacctctaaacctgtgagaaatgtctgttgcttaagccccctagtatatggtattttgcttatagtaatctaagctgactaagacatatacagaacgcgtttttctgaccatgaagcaataaaactgctaataaaaaaaggaaatccttctaacaaggtaaacacaggcttaatcatatcgtttatgttcacacaaaagcatcagtagaaaaactataagtactcacgtaaatatcaaacactggccagaggagggaggcgggtgatctaagtcttcatcgttcaccccagagtcacagaggcagctgagaaacagctgaattgatgatgtagagtccgtaaatgataagagtgacagaggcagccgtgaggaggaggaaaggtgaggttccctcatgtttccagtgggggatgggatggaggtagggagatatggccaaagactgttttttgacaaaaaaaacttattaggtgttttgttaccatatatgtatcactttaatggagatgtgtagggaaaaaaaatctaatgacagataacagtaaagtccaaatcataattaaaagtggccaccacccccaccttttttttttttttttttttttttgagactgagtctcgctctgtgccccaggctggagtgsagtggcgtgatytcggctcactgcaagctctgcctcccgggttcacgccattctcctgcctcagcctcctggtagctgggactacaggtgcccgccaccatgcgcggctaattttttgtatttttagtagagacagggtttcaccgtgttagccaggatggtctcgatctcctgacctcgtgatccgcctgcctcagcctcccaaagtgctgggattacaggcatgggccaccgcgcccggccaagtggccaccacccttgtggtagaactcccacttgcaggggagccagggtcctgaccctactctctaccctttcccacccttgtcggcagatcagtggcccccacaaaagggacttactcccacgtggccctccgtttgcagctatggacgatccacccagtattgaccacacactcctcgacsctcrggtccttccgtccccctaaagagagaattagatgctcctttcctgagagtgaccccattctggcccagttgagtgaaacatctcaatggtctttctgtggttcccctaggccctggttttggttttgagctaaattatttaaggttctctggtcaacagtcaattaggcacaggtccttagtagcccctgatgggcatggatcgtggagaactagactccaatccaagatcaggcagcagtgacgaaactcacatcaaaagcacacagcaaaggactgcgactgaaagcagtttctccagaacaccttttctcactcctgtgctttccttccaggactggtcggccaacccgctgtttgaaagaaaggacaayaagaaagaggccctgttagacttggatggaagaattgccaacctcaacaagcgctacgcagcagtcagggatgctggagtgaagatccaagccatggttgcagtaaggaaacacccaggaggttttttgagaacccacttgcttttagcagggaggagagagtaaacccagggctggagatttcataaaaatgattagtgacacatttcttgtagtcatagaagtctgtgacctggctggatgcagtggctctcacctgtaatcccagcactctgggaggctgagtcgggcggatcacctaatgtcaggagatcgagaccagcttgaccaacgtggtgaaaccctgcctttactaaaaatacaaaaattggccgggcgcggtggctcacgcctgtaatcccagcactttgggaggccgaggcgggtggatcatgaggtcaggagatcgagaccatctggctaacaaggtgaaaccccgtctctactaaaaatacaaaaaattagccgggcgcggtggcgggcgcttgtagtcccagctacttgggaggctgaggcaggagaatggcgtgaacccgggaagcggagcttgcagtgagccragattgcgccactgcaatccgcagtccggcttgggcgacagagcgagactccgtctcaaaaaaaaaaaaaacaaaaattaaccgggcacgttggcacatgcctgtaatcccagctactcgggaggctgaggcaggagaatcgcttgaccctgggaggcggaggtggcagtgaaccaagatcgcaccactgcaccccagcctgggtgaaagagtgagactatctcaaaacaaaacaaaacaaaacctatgatctttaatccaagcgagccttatctttaagtagtagaccacccttgctgtacacttccaagcctggttcctcttatgatgggcctgccctctgctaagggtaccagagccctcgcccagcacaatgtgggtatggccaagtaacgtcttcatactaggtcaacaaatcttgtcttcccaggatgagctgccgagggtgggcaccgtgtgtttatcggtatcccccgtggatttcccatccatgagtgtgggtagggaacagtaacatgggaagagcgaggaccattygaacgtgcacagggtgtatcactacctgcatatgtgaatgggtagaatgtgataaygcacgcctgctttgctacctaggatgccagctggtccttcttgccagtagtcccaacagcatatgactctatgtccctaccagcctcctgggagcccccatggttggcacattcagtgggagaatgcagaacagtagactggcattcctgggtgctttgtctggagtcctgacattgtattgtaggggttttcatatcctcctcacttggtagtaatttcacccagcttgcattttagtttgtctctgaggagaatgtgaaaggtggagctttgcattggcttgtaaaagagaatattctcccttgagctcaaataacggctgggcgtagtggctcacgctggtagtcccagcactttgggaggccgaggtgggtggatcacttgacgtcaggagtttgagaccagcctggccaacatggtgaaaccctgtctctactaaaaatacaaaaattagccaggtatagtggtaggaacctgtaatcctagctacttgggaggctgaggcaggagaattgcttgaacctgggaggcggaggttgcagtgaaccaagattgcaccactgcattccagcctgggcgacaagagtgagactccacctcagaaaaaaaaaaaaaaaaaagtattttagggcagtttttggggggggcggtttccagtggrtggtgcaaatcagtggtgtggactttaatgatgagtcacatcatctagacagaccagcaggccacacccgggggatgggccattattggctgttcctattgtcacatcattgctctaaagatcgtcaccccaggaagtgacttgactgaaccagagtctgttgtgcctcattcccagttcccatccctcccctccctgccacggtgccagtagctccctctgaattaaaatgctaaactgcaaaaatgttacttggaagagttaactgattagcttgttaacactctcagaagggttggaaacagagcacaggagagagatttgacttagggttagkaaagtttcagagggcaggagcatagcaagagggcaggcgaggaggcaggactgggctgaggttgaagccaagcagcagggacaggagcctaagaggggcagaggcaacaagccagcctattctgttccccaactgtgatgagatggtgttgtctcttgtgcacaactctgtcaccacgtatggctactctcatgacagtcattagagccatttctttttatcttatgctgaagttatttgagcccaagtcttctctcccttattagaatagacctgcctgagggtatagactgagtgaaattaatctttgagtttccctatagcacttagtatcctagagattcatccatccatccaaccatccacccatccatccatccatccatccacttacacattctacccaccacattcatctgtccacttcatccacnnnnnnnnnnnnnnnnnnnnnnnnnnnnnnnnnnnnnnnnnnnnnnnnnnnnnnnnnnnnnnnnnnnnnnnnnnnnnnnnnnnnnnnnnnnnnnnnnnnnnnnnnnnnnnnnnnnnnnnnnnnnnnnnnnnnnnnnnnnnnnnnnnnnnnnnnnnnnnnnnnnnnnnnnnnnnnnnnnnnnnnnnnnnnnnnnnnnnnnnnnnnnnnnnnnnnnnnnnnnnnnnnnnnnnnnnnnnnnnnnnnnnnnnnnnnnnnnnnnnnnnnnnnnnnnnnnnnnnnnnnnnnnnnnnnnnnnnnnnnnnnnnnnnnnnnnnnnnnnnnnnnnnnnnnnnnnnnnnnnnnnnnnnnnnnnnnnnnnnnnnnnnnnnnnnnnnnnnnnnnnnnnnnnnnnnnnnnnnnnnnnnnnnnnnnnnnnnnnnnnnnnnnnnnnnnnnnnnnnnnnnnnnnnnnnnnnnnnnnnnnnnnnnnnnnnnnnnnnnnnnnnnnnnnnnnnnnnnnnnnnnnnnnnnnnnnnnnnnnnnnnnnnnnnnnnnnnnnnnnnnnnnnnnnnnnnnnnnnnnnnnnnnnnnnnnnnnnnnnnnnnnnnnnnnnnnnnnnnnnnnnnnnnnnnnnnnnnnnnnnnnnnnnnnnnnnnnnnnnnnnnnnnnnnnnnnnnnnnnnnnnnnnnnnnnnnnnnnnnnnnnnnnnnnnnnnnnnnnnnnnnnnnnnnnnnnnnnnnnnnnnnnnnnnnnnnnnnnnnnnnnnnnnnnnnnnnnnnnnnnnnnccacccaccccacccacccaccagcccctgctctgtgctaggcctactgctgagtgctgggggtacagtggtggagaggatggtcaaccttcaccttcatgaatttgggcatcaaaagggcatgcagaccaaagacaaagacaaataaaataattctgagtggccctctgagccatggtaggcataaataacagtttgctagaggaaacccaactagagatggaggattcctttgggaggaagggacatttgagctgaaatcaaaaagattggaagccagacccagcaagaaagtgagggagcagccgtgcaaagcctcgagtaggaaggcggccagcaccagcaagatgctcaaagcagccccgtgtgtccggcgtgtgaacatggacgggcggtccagagaggcactaaacagtgtgatcaaagagcaagcacagccagtgaagtgaggcccaactgtgcgcttctgtttgcaggaaaacgcagaactrttcagggcagacacastgagcctgccctggaaggattatgtcatctacattgacgacatggtcttagatgaatttgaccagttcattcgcaaatctctgagtttcctaatggacaacatggttatagatgtaagttatcaacataaggtaatatatttatgtatatgtattcttatctgttagaatctrtagtttctagtttcttgrtgaacaggctatcattttataaatagacttattaaaatatatcttatgcaatctacttgacctggttttaaacctggaagtcctgcattccagaatcccctcagtcccaggcactcaggaccactggtcactttaaatctgccataacataaattggctgcagaaaacctcaagagacctaagaggctggtcctgcctcactgccaggtgaaggaaagtggacaccactgccccctactcatgtggattggggggagggtctcctgtcagcaacaacagccactcacctacttgattatatacggctgagtagaaggtaaaccagtcagcaaagaggttgtgctggttaatcccatggaggcatgctttccatggcaatggcccctttcctacctgtatcttctttttattttatttttttatttttttgagacagagtcccgctctgttgcccaggctggagtgcagtagcatgatctcagctcactgcaaactccacctcctgggttcaagcagttctctacctcagcctcccaagtagctgggattataggtgcccgccaccacgcctggctaatttttgtatttttagtagaggcaagggttcaccatcttagccaggctggtcttgaaytcctgacctcatgatcgaccaacctcggcctcccaaagtgctgggattacaggcgtgaaccactgtgcccagccctgcatcttttttgttgwgatggtttctaaatgattttgagtaccgccaggaggccaagatcaaaggctcccccaggctaccaacaacaaaggaacgtggcagtgtcgtgcccttgtaccgaccagggagggtggatggtgtttgagtctggcatatgggtctcagatgccagctggtaaccagtcacagacccaaaattcagttgacgaaagtagtcgtcactacagactgtcccagtgaaagcgtctcaacaaaaaccataaagaagtcccagtaacaaagggttctcctcaaagagttccagggagtcctcctactttgtgagtagcctgggggcaggagccgacctgagtctttagagaagtctggtcacacaattgaccgtttgtcccaattagcacctcactcagatactgatacagccccctcctgctcatagacaaattggggggctcaaaagctcataacccacaggtccaatggggactcattcagggggagatcagtggccacagtgtgatctcacagcctggtggatcctggcccacattttgagaatcgttagtttggcaggaagagcacttgggttctcaatcccatcactgtaaaccagagcagcacctgcagccctgcagcctcacaggggcctccagaactctgtaaacggggacttccaagggagagggacaggcaggcttggccagcccctgcagtacctgctttgtgtgtcagtgattcatttagcccctgtagtaacccagaacaatggaaacaatgtctccattctttttttttttttttttttttttttggagacagagttttgctcttgcccaggctggagtgcaatggcrcaatctcagctcattgcaacctccgcctcttgggttcaagcgatttcctgcctcagcctcccgagtagctggggttccagacacccaccaccaggcccagctaattattttgtatttttagtagagacggggcttcgccatgtgggccaggctggtctcaaactcctgacctcaggtgatccacccgccttggcctcccaaagtgctgggattacaggcatgagccactgcgcctagccaacaatgtctccattctataaaatatttagcctcattttatatatttggggaaactgggagttaagtgactccccaaggcctcagagctggcaagtagcaggtgtgggctttgaaccgaggtctgagttctacctgatcctgcccctccccttgccccaacctgcccctgcctgcttttggccttgtggctgtacatttggctctgtagcgattgctcaaggagcggggtgcgctgagacacgagctctcagaagcttcccagataagtggaaggcagtgacacattgatggtacggagtggatgatcagggcactgagaatcatccgatggaggacagaggtgttgaccactgccaaccccacccctctttcaggagagtatcgctcccctgtttgagatccgcatggagctggacgaggatgrgctgaccttcaacccgaccctggaggtgggctcagatcgcggcttcctggcactgatygagggcctggtcaacgacatctacaacgtagccaggctcatccctcggctggccaaggacaggatgaactacaaggtcagtcctggcctcttctggccgtacacagggtcatccattgctttccccatttggtgttgccgccctaactcggcaaggcttcgccgtttaccttttctttttttctttttttttttttgagacggaatctcactctgtcgcccaggctggagtgcagtggcgcgatcttggctcactgcaacctccgcctcctgggttcaagccattctcctgcctcagcgtcccgagtagctgggattacaggcacccgccaccacacccggctaatttttttatttttttttagtagagactgggtttaaccgtgttagccaggatggtctggatctcctgaactcatgatccacccgcctcggcctcccaaagtgctgggattataggcgtgagccaccgcgcccggccctgcttaccttttaaatgacatcgtgtgacctctaggatgacatggccacttctctccccactcccacatctgtcgtccttcccaaagcagcttcttctcagtcaacctgcctgggtttcattccctcatcatccttccaaccccccgacacgatgccaagagggtaacctttcccaacttcctgactgttcactcagtcctgtaatttttttgagacaaggtctcactctgtcacccaggctggagtgcagtggttcaatctcggctgactgcagcctctgcctcccgggcccaattgatcctcccgcctcagtctcccaagtagctgggattacgagcatgcatcaccaagcccagcttggtgatgtatttttttgtagagatggggttttgccatgttgttgcccagrgtggtcttaaacttcttaatttttttattttttgagacagagtcttgctctgttgcccaggctggagtgcagtagcataatctcagctgactgcaacctccgcctcctgggttcaagcgattctcctgcctcagcctcctgagtagctgggactacaggtgcatgccaccatgcctggctaatttttcttttttttwatatatttttagtagagacggggtttcaccatgttrgccaggatggtctcaatctcccgaccttgtgatccacccgccttggcctcccaaagtgctgggattacaggtgtgagccaccgtgcccggcctcagtcctgtaatgtaaacactgattctcccagtactcaggcaatttgacaaatgtgcctcccactgccttctgaaatcatctcgtctaaacgcatcaaacaagacacacggagagcctggccaggctctggggtaggaaggacaacaaaagtcatgggaaattcagctccccgcttaagggargtttgaggtggtgtgtttgtcaaagcacctatttgtatagcaataaaaaaaaatctgaaaagacttaagtgacctaaatgtttgtggaagaggggagtggcttgaccaattctggcccaaacccagattctgtgaattgtcacaatgagccaaggatggaaaggtgttgtgacaggttattagacatttatcaagttacagaacaatgtttagaatatggtttcatttgcttaaacaagcaaaaatctgggtgagtgcttaccaggaagggaggaaggaggggaggggagagggatgtggctgcaggcgtttcctctcatgcatttctgcgttgtttgaattgtaaaataatggacacgtatgatttgtcataacatatatttacagcgagatgagctgtcctgtccaggagggagggatgtgcgtgtgctcgtgtgtgtaygcgtgtgcttggatgcatatgtgcccgtgtgcgtatttgcatgtgtggtggggaggcatgcttgtacagaggtgacatgaggacacgagggaacagctaatgacctgagaaggtcaaggacagctcctgagaggagtgggcgtgtgagcggattctggaagggtgggaggaggtttccatgctgagaagatggctgtgattttaggcccaagtgcaagcagcaagctgttccagagttgagaatagaatttgccccagttatgcagacgctaggttagcacatgtcctcagaatcagtgtgtcccgggtgtgcccctcccactgtccccaaagcaggctgctcttgggcacccacggttgctgcagacagagctgctccacccctgggctctgccagcacaaacactcaggctgccttgcagacaccctgggacgctcaggcagaacattccagagctgaagggcctgttgcccaggagaagggtccctcgaaagcctgctggtctagcagagtcttacctggtgccaagctgtggaagacaatgagagagtcaggcatctagactgctgggtcccagggccacttcccagagacccaagtaccctagcttggtggcagagagtacccaagggatgcttcccatgggtaccagggtggccaacccagaggagttgggtcaggacaaggaggagatagaatgtgggccccaggctrccacagggatttagagagctgagctgcccacaggggacaccagcaaggggcagagaccccaggcagcaggtctcacctgcctctggtatgccaggctgccaccagcccagcccaactggaacttggatcccacctggggagatccaaaggactgcaggggacaatctcagctggagcaggtagatgcctggaagttacaacactgaaatccagaagcacctgcctgtgctctgaacactgcactcccaaccctgagcagaaagaggggccatgaggaggggtgggagccaaatgtcaggcacaggcgagcccatggctgaattctgaagcacacaccaaatgctttcctgcagccacgaggagcttcaggtttctctcccctgtggcttctttccatccacaacttacatgcagggtggcccggcccagccctagggccaaccttccccttccatcccagccccactgacttcacctcctcaattacaccgtttcctcgtgccaccccttaccaacgaggtcccctgcacagacaagatctccatgcacatctgggtcccgatggggcctctctgcagctgtcatgtgggctctgggctataggcygtcttcagttgtctggtacctgaccctgggtgatttagggcaggggaaatactggcttggtgtgagagttgggtaaaggggagtggttgagggtcggctggtttgcatatgcatgcccccagatgagccttttgctatctcaaagaattgcctagccctgggaaaggccggctcttcctggcccataaggtttttttattttatttttttaagatgtcaaaattgggctgggcgcattggctcacgcctgtaatcccaacactttgggaggctgaggcaggtggatcacctgaggtcaggagtttgagaccagcctgaccaacacggtgaaaccccgcctctaataaaaatgcaaaaaattagccaggcatggtggtgggagcctgtaatcccagctatttgggaggctgaggcaggagaatcacttgaacctgggaggcagagggtgtagtgagctgagatcgggccactgcactccggcctgggtgacagaccgaaactctgtctcaaaaagaaataagatgtcaaaatttcataagatgcagacaataaaaatgtgattaatacacacaccgaccaccttgggattctccagtcctgtatataagccaacgagttctctctttgcttaaccagtttgggttgggttttctgtcactggcaactaaaaagatccgtatagcactggcctctcgtgctctctgctctagccaccgacagtagacttcctttagttcccctaacacgctgcctcctcccaccacggggcctttgcacgtgctttgctgttgccaggaaagccgcttctcttgctccttgtctacccatccatcagctctcagaccaatggccatttcctcggggccattccctgacctgctccccatttcacctgaagcaagggggagggtggagatgcttttttctgtgattctttgatgaatgtcagaccccattcctgggctgtacactccctgcctgtgccccagtatctatcccagcatgtggtacgcagtgagagcgagctatcgaatgaatgaatcaatgtgtgagtcatctcggggttccccagacaaacgtcacacttggcataccttcccatggcagaatattgcaaatcggcaaaggttcctatttcccgtggtgagagcttgggccaggcacagtggcacgtgcctgtggtcccagctacttgggaggctgaggcaggaggatcgcttgagcccaggagttctgggcygtagtgtgctatccactaagtttggcatcagtatggtgacctcccaggagtgggggaccaccaggttgcctaaagaggggtgatcggcccaggctggaaaaagagcaggtcatcatgagagattggaagccctttcgccaacagagaaccacttctcaaggccgagaggacaacacctaaattatgaaccaggcaacatacctcccctttttgcttctcccytgcccctttcagatggacctggaagataacacagacctcayagagatgagggaggaggtgtccagcctggtcatcaatgccatgaaggaggccgaggagtaccaggattcmtttgagagrtactcctacctctggacggacaacctgcaggagtttatgaagaatttcctgatatatgggtgtgcagtcactgcggaggacttggacacctggacagatgacaccatccccaagacaccrcccacyctggctcagttccaggagcaggtgcrtgcagacctcacccaccagcctccttgtctccagagtcttccaggagaggatcaccaggcttgctttaaaacttgggtgaattgttttaagatgcaggtttccaggtagggcaaggcaaacatcaggaggtgaccaccattagaaaggcagtttgttacttacagttcccaagaagggggcatagcacaccacacaggcctgcacggggtagcatcagggtcagtcaggaggcagagggagctggggaaaatgtggggaaaataaagagcctttattgtggcttccagggaaggaatgggcagaggtcacaggcttagggttggcaagtttgaataatttcagcaggctctaggctataggggctgtctggtacctgacctcagggagatgagggctgagggctagtgggtagcagcccagaaggtaaaaccctgtgagagccccatcaaggggatggtcggaggtgtgggctccgggttggctcatttgcatatgaaaccacacccccaggtgaattgtttgttgtctctcaaaattgactaggcctgggaggggtcgtccatgggcaaggccccagatgtcagagcatgaagaacacagaaaatcacacctgtcagtgtaataacctcaaatgtaaatggattcaattccccacttaaaagatatagattgtctgaatggatgaaggtaaccccaatatatgctgcttagaagaaactcacttcacctgtaaagacagattgaatgcaaaagaatagaaaaagagattccacacaaacagaaaccaagaacaagtaggaataactatagttacatcagataagacagactttatgtcggccgggcgtggtggctcacgcctgtgataccagcactttgggaggccgaggcggttggatcgtgaggtcaggagatcgagaccatcctggctaacacggtgaaaccccatctgtactgaaaatacaaaaaattagctgggcgtggtggcaggcgcctgtagttccagctactcgggaggctgaggcaagagaatggtgtgaacccaggaggcggagcttgcagtgagtcaagatcacgccactgcactccagcctggtgacagagcaagactccatctcaaaaaaaaaaaaaaaaaaaaagacagactttatgtcacaaacagtaaaacgagaccaagaaggtcactatgtaatgacaaaaggatcaactcagcgagaggatttaacaattctacatatctatgcgcccagcaccagagcacccagatatataaagcaaacagtggtagatctaaagggagagaccccartacagtaacagttagggwtttcaacaccctgctctcagcgtcagacagatcatctagacagaaaatcagcaaagaaacattggagttaaactgcactttagatcacagggaccaacagacagctacagaacactttacccaacagctgcagaaagaatgcataaaataagaaaacatagttaacgcacaaacctctagctctgttcccaatgcacagtgagaaagagggccccgtgggcaagggtgacccatgcccaggggtacattctgtagcacagggttggggcagcaggaggagtgacagaggcctcaggtagaaggatgagctagggatgccctttaggagcctgtgacctggttcacctcttgaagcttctgtcctacccagcttcagaagtcctgctgccatgaccccttctgcccctttctgatggactggcaccttctggggctagactctgsggctggaaggaacaataacttggaatgagggcccccatgtgtcccgtactgccctttgctgaccctggccccagagtggccggcaggtgagcagcgcaggtgcagtgcaggaaggccctggactgaggccctgtgctgacgccccccctaggcttgcaggctatgacaggccgccggtggccgtgttttccagatcgactcctacgagaagctgtatgaggaggtgtccaagtgcgagaacaccaaggtgttccacggctggctgcagtgcgactgccgccccttcaagcaggccctgctcagcacaatccggcgctggggcttcatgttcaagcggcacctgagcaaccacgtcaccaacaggtgggtccccagccatgtactcggggagcccaaggaatgtgcagagcaccagggagtggccttccacttgagtgggtggcatttgtcaggtgcctcctctggggtagcagggggtggaggctgggyttcaaggccaactaccccaccaagcgtgagcagaaaggtgtcaccgggctgcgagcaaacattatcccttctccaaacccggtgtaccgagcacctgctctgtccgggtgccagatgcggaggaaaccwgaagtctgtcagggaaggctggcgctgaacaaacagactggcagctgtgggattataggcggccatcagggccatgatgggcacagtgccaggagagagcattgcctggctgaattccatccgggaggctagtgaaggcctctgggatgtggccgtagcttgggacttgaggatgggcttgagctaagttgctgaggcttggggtgatgtctgggcaggggctgagtgagctggagggatccaaggtgggcaggggcgctccctccccrcctggggccttcagtgatggccagttgacctcaccgyggtcgtccccctctcatggggctccgtaccatcaagggtgggcctaaggggggctgggsccacacaaatggtccccttgtcccttagcctggctgacctggaagscttcatgaaagtygccagaatgggcttgaccaagcccctcaaggagggggactatgatgggcttgtggaggtgatgsggcacctgatgaaagtcaaggagaggcaagcagccaccgacaacatgtttgagcccctgaagcaaaccatcgagctgctcaagacctacrgggaggagatgccagaggagatccacytgaagctgcaggtacgtggtgggtgggtgtggctgcgtccaggtgagcagggagagccatcccggccgcgaccatggaccagcccatcamacgcaaccatgggggatgctgtgggctagatcctctctggacatcagatccccatggaacagggaggtgcagggaggaggtttctgggggacaggagaccctggggactgcctccacggtgaggccagtgctccctccgttccattggtgttttgttggattaaaaatgtcttcattgtaatcccrgcactttgggaggccaaggtgggcagattgcctgagctcgagtttgagaccagcctgagcaacgtgggwgaaagcccatctctacaaaaatatagaaaattagccagctgtggctggctagtgtagtctcagctactcaggaggctgaggcaggagaattgcttgaaccagggaggcagatgttgcagtgagctgagatcgcaccactgcactccagcctgggcgacagagattctgtcttaaaaaaaaaaaaaaaatacaaaatgcctttatgtcccatgtctcctcctgagtgtctggtgggagtgctggtggaggtgggtgccaggatggtggagagagaacaaggtcagggggaccctggggagggattaggcagctgaagggggcggggctggcagctgcgtttgcacagcacttgatagcgaattcaaagaacctcagctgtcagcgtggaggggtgtgtgcaggctgggcgagggtgggaggatggagagggtgtgtcctagagctgcctcccagccacgtctaggtgtggccaccgaggagaccccgctccctcatctcttgagtctggcctggagtttccaactcctcccagcccgtccacccctcctcccgccctctccccttctctgtgtccagccacagacagggcccaccctcctgtcttatgcaccgactccagacagtgcccaagaccccacagccctgggggtgacaagagggaggggccccggcctgggcagcacaggaaaaccctgtctctacaaaaaatttaaaaaattagccaggcatggtggcgcacacctgtagtcccagctgctcaggaggtgggaggatcagttgagcccaggaagtcaaggctgcagtgatgtatgattgtaccactggactctagcctgggtgacagagccaagaccctgtgtcaaaagaaagaaaataaaaggactgagcaggttctcagccgtcccaccctgaggtgctccaagccacacacgaggcaactggggtagtaaaaatgcagacagaaaccatacagccagcaaccatagaagaactagagaagtctccactgcaggcaaaaagttcatgggctgggattttttttttctttaaaatattttatggcccggtgtggtggctcatgcctgtaatttcagcactttgggaggccgaggcgggcagattacttgagccaaggagttcaagaccagtctgggcaacatggcaaaatcccatctctactaaaaatttaaaaattagccaggcgtggtggcaggcgcctgtaatcctagctgctcgggaggttgaggcatgagaatcacttgaacccagaaggcagcggttgtggtgagccaagatcgcaccactgcactccagcctcagcagtagagtgagactctgtctcaaaaatgaataaataataattaaatatttacaactatagtatttacccaagtgtggggaacttgggaaataccaaaattcatctgattgttgcagccattctggaaatgacaacattatagagctggagaagagcttagcggtccccaggggcaggattgtggtggagggatagaaagggaattcctctgttgtaatggacaatccatatcttgattgtggcggtgtttgcacaaatccatacgtgggataaaattgcatgggagaccacacccacacccacacccacaaatggattcaggtttaaaaacatgatgaaaggtgagtacattctctggtctagttaacagagacaccaatgtcaatgtcctagttcgccattaaggaggctggtttttgtttttgtttttttgagacagggtcccactctgtcacccaggctggagtgcagtggtacaatcttgctcacwgtagsctctgccttcctagtccaagtgatcatcccagctcagcctcctgagtagmtgggactacaggcccatrtcatcacgcccagctaaaatgtttttgtattttttgtagagatggggtctcactttgttgcccaggctggtctcgaactcctgggctcaagtgatccttccayctcagcctcccaaagtgctgagattacaggtgtgagccaccgygccggcccctgcactgtttttgcagcttcttaccagtctctaattatttcacaatagaaggtttaagaaaagaaatgagaaaggagccctcctctgcctttgcttcccgcaggagctgccggagcactgggcaaataccaagaaactggccattcaggtgaagctgaccgtggcaccactccaggccaacgaggtcagcatcctgcggcggaaatgccagcaattcgaggtattatacctggggcagggtggcgggatttccggggagcagcgtggggctcacccagggccctgcggcatacagggtggggccacccttggggcaggtggccgccccgtgactctctgtacttygcactcttctctcgcagctcaagcaacatgagttcagggagaggttcaggcrygaggccccgttctccttcagcgaccccaacccctacaagtccctgaataaggtatttttgctcaagggtgagatcagggggtaagtctgggaaccccactgctttcttttctcaagtagttatcmtttcaagtccagaaacgtggtctccgccggactgaccttggggccgtgcacgagtgctcttatgtgtatgcatgcacatacgtgtgcgagcacatgcatgggtgtgtacgtgaacatgcaaaccgagcagccccccagaccacatggtgtcccctctgtgtctcgcagctcagagcatggctccaggcccacggctcaggccccttaacaccctgtgtgacccatagtcccttagcctgactccgccccctaatctccactctgttcacattcagcagcttcctgtcccctgggcttaatactcacctgccatctctccctgcctcctgcctctcctgacccaccacatcgggcagcagccaggcttcactcgtgttcccactctgttcccactgtccaagttcatggtcacgtccagtgcacaaattcacacagccctggacctggcagcccactcaagctcaggcccaaaagrcccttgtgggcaggagcrtgtggggtgctcagggcccaggggggcctcttggggcccagtggggcccttgtcagttcctctttgctcccagtacggtgcccaggtactgctgggtcggccccacctgcacctccgcctcacagsctctagcaaatgtgaaccccagggtcctcagggttgcctcactcttcccctccctgagcttcggctctttggcctccagctccaatccgaccyttcctcatggccgtttcctcatgtcgcattcctcaagccacratggagatgcagccattctctccctagggccccgggctggattttctggaaagatttggggtgaggggtgccccatgcccatccaaggggagctgtggagctccagctggtgaccagagcaggcagtccctgcgtgtccatgtgtgtgcacacgctccgagcccacctttgccacagcctgcctgttacgtgtccacgcaaacacacccactatcaccaggtgctacgatggccaactcttagtcatgggatttgagaggacactacggatttttcctctttgcttatctgaattatctcattttcaaagcattacttaagtcatttttaataagataaaaatataatatgaaagttgaagaaatgctgggaaatcagraactctcaggaggaaatgaggcatttaccatgcccattgggagtcagtccccacgctggtgtgggtagaggtcacccgccctcccctgcaggcaggacccaggaggccttgggggatggagggctctgtcctccctccaggtgggacaccgttgtatggacacctcctcccagaagktttatcagggagggcacactggagagacgggcagaacgtcggggagtggggtggggcaccgctgagggtaggtagccctactgacggccccctcgccgcccctagcaacaaaagagcatctccgccatggaaggcatcatggaggcgctgtccaagtccgggggcctgttcgaggtccccgtcccagactacaagcagctcaaggcctgccaccgggaggtccgcctactgaaggagctctgggacatggttgttgtggtgagtgcagggcaygccgcgtgggtggggcccgggattctgcagggagctgcccccggcaacaagagggcaggctctgggcaccctttggttgtaagaatgtgacaagaaggtttctggtgttgggtggaggcatccgaagggccctgagatcgcgaggtggggtccctccgctaaagcaggatatgttcacctctctctgtatgtgggtgggggctcgcctttgactgcccccctttcttttttcccctcccttcgtctttttcctcctcctctcattctctctcacatctcaccttttttaaagaaatttttttaagtaaggaataccacttagtctgttcaaggtgctctaacaaaatcccataaactcagtggctcataaacaacattttattcctcaccgttctggaggctgggaagtccacagtcaaggcagatgtaatgtctggtgaggacgcactttgtggctcatagacagtcccctctcactgcatcctcatgtggtggaagtggagcaggccggggctgagaaatcgctccagggtcccttttataagagcatgaatcaggcccggtgtggtggctcatgcctgtaatcycagcactttgggaggccgaggcaggtggatcacytgaggtcagaagtttgagaacagcctagccaacatgatgaaaccscgtctctacgaaaaataygaaaattaactgggcgtggtggtgtgcacctgtaatcccagctactcgggaagctgaggtagaagaattgcttgaacctgggaggcagaggttgcagtgagccaagatcgtgccactgtactccagcctgggcgatagagtgagactccatctcaaaaaataaacacataaataagagcacaaatcacattcctgagggccacgccccgatgacctcatcacctcccaaaggccctgcctcctaatacgaggtaaggatttcaacagagaaattttggggggaatattcagaccatcagaggctcaatctatgagaaagattttgtggtttcatttgtatttcctactgactaacgatgccagcatattttcttttttaaaaagtatttttatttatttttgagacaaggtcctgctctgttgcccaggctggggtgcagtggcacgatctcagctgactgcaacctctgcctcctgggctcgagcaatcctcctgcctctcagcctcgcaagtaactgggactacaggcttgcgccactacgtctagctaatttttacatttctatgtagagatggaatcttgctgtgttgcccaggctggtcttgaacttctgggctcaagcgatccatccgtctcagccttctaaagtgctggtattacaggcatcagcctccagtatcttctcatgggcttatttgacatctatatatcctccttggtgaactgcatattcatgtcttttatccattttctagttgactttttttttccaattgactttttttaagtttttttaatccagttattcatatacagtcccttgtaaaaataaaatacaataaaaacaaactgaaaaggagaggcagggtaaaattgaaaaaggaggccaggcggggtggctcacgcctgtaatcccagcactttgggaggccaaggcaggtggatcacctgaagccaggagttcaagagcagcctggccaacatggtgaaaccccgtctctactaaaaatacaaaaattagttgggcatggtggcaggtgcctgtaatctcagctactcgggaggcggaggttgcagtgagccaagatctcgccatcacactccagcctgggggacagagtgagactccatctcaaataaatagaaaaaggaggctaggtgtagtggctcatgcctataatcccagcactttgggaggccgaggcaggtggatcacttgagttcaggagttcaagaccagactaggcaacatagcaagacccctgtttctactaaaaatacaaaaaattagctgggcgtggtggtgtgcacttgtgatcccagctactcaggaggctgaggtgagaggatcacttgagcccaggaggtggaggctacagtgagctatgatggagccactgcactccagcctgggctataagagtgaaaccacatctcaaaaaaaaaaaaraaagaaaaaggaaagaaaggaagaatttaatgcttttcctcagtgtcttccttggtctcctctttaccaaaagagcttctagcttttccaccactttttcggcattattgtttttgcctggtcctttcttttgtctctctttgatgtcttttttgcattctctgaactttggaatttccgtgcatgctcagcattcaggaagcagccggccagcagctctggcctgggcactcatgggtgaagtcggcgtgggtgttgcagacccaggcccagtggctgcctgcgttgggcttcagctccaacatgggtgtgacttaggggctggcagatcttcagggtcttgtccctcctcgtgaggcccctttctccttgtgcttcaggagcttgatgttgccagtgcctccacccttccattccagaagattgttccctgaaacaaatcagaatagttkcactcacatattaaaaagtccctcttcctcttcctctagcattttaatttcttgctcaggartagaaactattggctcatactgagggtcctggttggacttgtctgcattctcagtggaggtactgtggttctcgtgagcgtcctcggtagccgccatggtggccgtggctcggctcagctgggctgggttctccacagccactgggagctccttccctctgcagccagcaccttcctcctgcccggcaaccaaaactaagttttttactgttaaattttgagcgttctttatatgttctagaatctagctatttgtcaggttgtgattgcgagtaatttctcctagtctgtaacttgtcttttcattctcttaacagggtatttcgctgagcaagagttttagtataattttggttttgaggcggagtctcactctgtcgcccaggctggagtacagtggcacgatctcaactcactgcaacctctgtctcctgggttcaaggattctctcgcctcagcctcccgagcagctgggattacaggcgcacgccaccacacttggctaatttttgtatttttaggagagatggggtttcatcatgttgaccaggctggtctctaattcctaagctcaggcaatgcgcccgccttggcctcccaaagtgctaggattacaggtgtgagccaccatgcccggccagttttagtataatctttaaagtttttaatatgaaacttgggtataatccattttatcaatttttcctttcatagattatgaactcttttcctagatcctaaagattttctcctatgcttttatagttttctgctttctgtttgtctatgagccattttgagttaatttttgtataaggagtgaggtttattggrttaaggttcatttattatttttgtttgtttatggatgtctaattgctccagcatgtttgtagacaagtcggtccctccattaaaaaaaattctttttttctttgagatggagtgtcgctcttgtcacccaggctggagtgctgtggtgcgatcttggctcactgcaacctccacctccccggttcaagcgattctcctgcctcagcctcctgagtagctgggattacagacacacaccactccacccagctaatttttgtattttcagtagagatggggtttcgccatgttggccaggctggtcttgaactcatgacctcaagcgatccacctgcctcagcctcccaaagtactgggattacaggcgtgagccacagcgcctggccccgctccatttaatttattttgcatctttatcaaaagtcagttgggcaccttagactgctgctgttgatgggttctgtgctctgttccattggtcttcgtgtctgtccctccatgatactgcacagtcttgattcctagagcaatctagtaaggtttgttatcagagcgattcctcccactttatccttttttgtcaagattggtttgctcttctaggacttgtacttttccatataaattttagaataagcttgttatgcttataaaaaaataaaaccttattggggtttttataggaattgcgttaaaactattaatcaatttggagagaactgacatgttgactctgtctcccagtccataacataatgtatctctccatttatttggctcttctttgatttttttgtgatttcattttgttatagcatttaagatcctatacatgttttgttacatttatacctcatgtgtctttccttttctttttagaagtgattgtattaataagtggcgttgcatcttaaattttggtttgcacatgtttgtttgggtatatacaaatgtgaataatttttatgtgtttgtttttctcttgtggccttgctaaactcacttactagttctaggatggcttttttagactccttagggattttgtacatagacaataatgtcatctgcaaataggaacagttttatttttcctttccattctgtatgtcttttacttctctttcttgccttattgcagtggcctgaacttccagtactctgttgaataagagtggtgagttcacacatccttgcattgttcccaatctaagaggaaaaccactttgccattatgtatattagctgtaagttttcaaattgaggaaattctattccttttctttttattcatcatgaacaggtgttagatcttgtcaaatttttytgtgtttactgatatgattgatttttgtttagtctgctaagataatkgattacactgactttttttttcttgaaacagagtttcgttytatcgcccaggcctggagtgcagtggtgtgattttggctcactgcaacctctgcctcctgggttcaagcgattctcccacctcagcctcctgagtagctgggattacaggtgcccaccaccacacccagctaattttttgtatttttaatagagacagggtttcactatgttggtcaggctggtctcaaactcctgaccgcaggtgatccacccacctcagcctcccaaagtgctgggattacaggcgtgagccaccatgcccggccatttccatgagatttttagttacaaattcaatttctttaatggccatacaggcttgttcacgttggtctgtttcaaatttgtgaaaatcttggtagtgaattttggtagcttgtggtttttgaggaattggtttatttcttctaaattgtttaattcaagcaagcataaagttgtttatactagttccayactatcctctagatggctgcaagctcagcagtggtatcttctatttcattcctagtgttggtgacttatgtcttcactcttcatctttgtcggtcataatagaggtttataaactttattgatttttcaaakaaaaagatttttgtttaacttttgtgctgttttattttaaacttcatcagtttctggtctttattattttgttccttcctttgctttgggtttatcttgctcattttctagtttattgaggtagaaacttggattattgatttgagaccttttctcttttctaaaggaaacacttcgtgctataaaatttccctctctacattagctgcgtcccacgtattttgatattacattcagttctgtgtgttttttaatttcttttgaggcttcctctttgacccatggatgatttagaagtatattttacatttctttttttttttttttttttttttttgagacggagtctcgctctttcacccaggccagactgcagtggcgctatcttggctcactgtaagctccacctcctgggttcacgccattctcctgcctcagcctcccgagtatctgggactacaggtgcccgccaccacgcccggctaattttttgtatttttagtagagacggggtttcaccatgttagccagaatggtstcgatctcctgaccttgtgatcagcccacttyggcttcccaaagtgctgggattacaggcgtgagccaccacgcctggcctgtattttamatttctaagygtttasagattttcctgtttcctttctattattgatttctagtttgattccattatggtcaaagaacacactgtatataactttcattattttaaatgtattaagctttattttatggatcaggatatagtctgtctgggggaatgtcccatgggcacttgaacagaatgcgtattctgcttctgttgggcggagtgttttatacgtgtcaattagatcctgtcagttggttgtgttgttctgtccttttatagtcttgctaattttctgtctagcagttccataaactgctgagagtggggtrctgaaatctctccaactataattatagatgtgtttatttctcctttcagctccatcagtttttgctttgtgtatttygaggctctgttgcttggtgtgtacagatttgggattattgtcttcttataggttgaccctttttcccattatrtaatgttccttttgtctctaggaattttctttgctctaaggttggcttgatctgatactagtatagctacttctgttttttctattgtttttgactagtgttcgtcctgatctttctccatttttaaattttcaagctacctatatttttgtgtttgaactgagtttcttatatacagcatatgattgggtcatgttttttcgtccactctgccagtctctggcttttaattgatctgtttagaccattttgcatttaaggtaattattgtcatgttacagcctatgtctgccattttgttttctgtttgttccctttgtttcttattcctctgactctcttttattttaacatttttaggatccatcctgatttatttagagtgattctgaacatagcgctttatatagttttcttagtggctgtttgacagtcactgatatcaacattttgtcacttttgtgtgtagaaacctcacttccatttagatctctttgccctcacctctgcccctcttaactataacataactgtcttatgtatttcctcaatatatgagtaatcttccatggtcttgtttgttgtgatatgtccaaggtttttcagttgtaagagagagaagctggaagtaacagggctgctccatcttggcagaactgaaagaactgacaactttttaaagaatgccagcaggctttttgtttgggtcagatgctaagacagccctgaggaaatgggaatttgggtaggttgtggagagggtgatattcagggagaagaggaggcaattcgggagcctgggaatttgccaaacgagggcagtctggatcatgtctctgtaggctgccatgtggcctcctaggcagcagaaagataaggacaggccaagtctcagtgtgtgaagggaggctggactccaagcacagggcctctttttcccaagtatttcttcttctgtgtgtgtgcatatgttggtttctgcctttctgtctcctcgtcactcatctgttttcaaaaatagttgaactctttcctcttttacttttttgaatgaacttttttcaaatccggcctggtgcggtggctcacgcctgtaatcccagcactttgggaggccaaggtgggcggatcacttgaggccgggagtttgagaccggtctggccaacatggcaaaaccccatctctactaaaaatataaaaattagctgggtgaggttgacatgtgcctgtagtcccagctactggggaggctgaggcaggaggatcacttgaacccaggaggtggaggttgcagtgagctgagatcacgtcactgtactccagcctgggcgacagagtgagtgagactctgtctcaaaaacaaaagaatcatttgtcaaatcttcctcccctccaaaaggaagctattatgactttaaatggaattgaattaactcatttgaggaaaattaatctcttggcagtattccatgttcccatacaagagcgtgctctgtctcttcttttatttaatttttaaaatacattatagtaaatgtcttcatgctgaccataccaagtctacatatttcttacacagggggagaaacatgtttggagacacaggctttattacagccaggccttaacagaaggtacaaattgaaggcctcttgatactttttcaacaattaactgattttgagtctgtctctctctctttttttttttttttttttttctgagatggagtcttgctctgtggcccaggctggagtgcagtgatgtgatgtccactcgctgcaacctctgcctcccaggttcaagcgattctcctgcctcagcctccccagtagctgggattacaggcacctgccatcacgcccggctaatttttgtattttttttagtagagatggggtttcaccatgttggtcaggctggtatcgaactcctgacctcaggtgatccacccgcctcggcctcccaaagtgctgggattgcaggcgtgagccgccgcacccggcctcaagtttcttttacatgagtggcattacagaacatagcaggcatctgagagaatgggatatacgctttcccatgacaaaaaattgtttgtgtagacaggagaataaagtccacatttcccaggagatgacagcatttgcagtcaggataattcaagaaaaactctccaaaacacactagccaagacattttatgataataggatgcagggtaatctcgaacctgccagaaaaagccatcaactcctgtgtagattaaggtttcaaatcatcgtatcttcaaggcaaacatcttgtgaacactcccagtttttacgttctcaagcacagatgtttctcaagtccagatcttctcactgtaagtgcccatgtcaacaatctctcattccctcaatgactagcagtttccagcttcacagccattttcatgtttatactgttggtggggttattcctgggtagtttgtatattttgtttcatattgttgtgagtgaagtttcttctgttgtctttttaccagtcagtggaagctgcgttactgtgcggtaacaaccccacacatctctgtgtactgaacaaaagtgtatttctcattcatgcaaagtgcatgctgtagttccaagcagttgtttcctgggaagctacctgccaaggactggttccacagtgcaggctgtatttcggcgatgcccctttgtgattgccaaggcaggcaaggggaatgccaagctgggtattgtcaggcatcactcacctttccttggccaagacaagctacatggacatactgagaagtgagagaaaactgggtcctggccagcaacagcagggccctaacacagccttttgctaaaatgccttttaactgctaacttttatttttatttattttttttgagatggagtctcactctgtcacccaggccgaagtgcagtggcatgatctcggctcactgcagcccttgtctcccaggatcaagtgattctcctgtctcagcctcccaagtagctgggattacaggtgtgcaccaccacacccagctaatttttgtatttttagtacagacggggtttcaccatgttggtcaggctggtctcgaactcctgacctcaggtaatctgctcacctcggcctcccaaagtagtggggttatagacgtgggccaccgtgcccggccaactgttaacttttaaatcttaccttttgtgacgccayggttgttttttcttgtatctaatcactttactgatctcgggtattagttctaaatattcctcactgggctttgctccctgcgagtaagtgcagaaaggtaagagggttttcttcctgaattctccttgatgagagtggaaggagaaacgggatgttttcgtttcaggtaaataccagcatcraggactggaagaccaccaagtggaaagatatcaacgttgagcagatggacatagattgtaagaagtttgccaaggacatgaggtctttggacaaggagatgaaaacctgggatgccttcgtggggctcgacaacaccgtgaaaaacgtgatcacgtccctgcgtgccgtgagcgagctgcagaaccctgccattcgggaacgccactggcagcagctcatgcaggccacccaggtaccatgcaccatggtgggcggaggggaccgcccctggcggccagctctgctgcaggatgggctggcctgagctgcctagccaaggtgttcagggcccgatgctggtaaagccaatgtgggcagggctggcttcgtgcacaagtgacctgygcagtcacactgggctccacgctggttgggggtggtggggcaggctccgtttaccatctcaacttcaccatctcaaaattcttagtaattttctttttcttttttttttttttttttttgagacggagtctagttctgtcaccaggttggagtgcagtggcgcgatcttggctcactgcaacctccgcctcccaggttcaagcagttcttctgccttagcctcccaagtagctgggaccacaggcacccaccaccacacccagctaatttttgtatttttagtacagacggggtttcaccatattggccaggctggtctcgaactcctgacctcatgatccgcctgcctcagcctcccaaagtgctggcattacaggcatgagccactgcgccagccaattcttagtaatttttgaacaggagttcccgcatttccattttgcactgggctctgcaaattaggtaggccgttctggttgtaggttgcatgttcataaggctcaggaagtttggggcaaatgaacagcttcgctagggtcctcatgaccccaggaactcagagtcttagcacctgaatctttccaggaatatcccacagtactggcaggcactggccttgacacctccagaaggctaacaggaacgctcccctctctcagccaacactgaacaaaatgactttaagcagctactctgcagaggccccacctagctgcaaaggatacagagagacaggagacatggcccctgctctcaaggaagcagagaaataatagtactgacaattacagcagaggaaaaaaattatttttccatctatccatcttaggttccctggctggggctcctgtaaattagactgatgagagacagattaaatagaggaaagccgggtgcggtggctcatgcctgtaatcccagcaccttgggaggccgaggtgggtggatcacttgaggccaggagtttgagaccagcctggccaacatggtgaaaccccatccctgctaaaaatacaaaaatcagccgagcgtggtagcgcacacctgtagtcccagctacttgcgtggctgaggcaggagaatcgcttgaacctgggaggtggaggttgcagtgagccgagatcatgccactgtactctagcctgggtgacagagtgaaactgtgtctctaacaaaataggaaaagaccaggaaagagaaggggattctctacagaatgcagatttcccctacaagagacagctttgcaggactatttcaaactatgtcaaagaaacatattttggggtaaaatactgcgatttctttcagggcctgctatctgtcatgtgttgtatcatgttgctacaaacattctgtttggtcagtcttaggttctctgtgttgatgttaatgctggtcagctgtgcctgaatcccaaagggaggggggtataatgaggcctgtcccccarcctccttcccgtcatggcctgaactcatttttccggtttactttggaatgcccctagcagagggggggttcattcaatttgttcgggggcttaggattttatttttgctttacagcaggatgaggtgagcttcagtaaggtgcattgtgtagattcctccccttcctctgggctgataaggggctgaagctgtctccattaattcttttttttttttttttttttttgagttagagtctctctctgttgcccaggctggagttcagtgacacaatctcagctcactgcaacctccacctcccaggttcaagtgattctcctgattcagcctcctgagtagctgggattataggcacatgccatcacgcctggctgatttgtttgtatttttagtagagacagggtttcaccttggccaagctgrtctcaaactcctgacctcaggtgatccaccagccttggcctcccaaagtgctgggattacaggtgtgagccaccgcacctggcctccattgattaacttctatcattcttggtagagggggcggtgggactccttggcaaatttatttcctgcttgtaggcaaataggggraggacagagagcttctcttgtatctgcttcttctcaagtgycttcagctcaaaataaaccttaagccaaagtggcgtattttggtggcaaattctgccarcctccataatcaggtttgaatgccaagtgcaggagatatttagtgatgatcctgagacctagaggagggtgccaccttcaagcggtgggaagggaaggaaaagctctgagtgagtgtgaaatttggcttgggccttgggagtgagaactgtgaagacaagcagaaaggctgggacaggtcttggcatgaaagaatgcaagaacaacggtgagaacataccccaaggaccaagggcagcatggcccaaagcctgcacagcggcaatgcttagcccacggcttcccaagagatccgtacctatgcaggaagtaggagaatggggacaaatggttccctccatctctcattaagtcccagccagcccaggagggtgcccacctaggaggagtgttagaggctcctgctccgcccccaccacactgtccagggcccttctgctccctaggcccaaggaaggaaaagcaaacccagctatgcaggccaccctgagggcacaggggcacccacttgctccccagggatctgggtgtctgggagccagcccctgggggtgcctttcgagtgttgagacaaaaaatttcccggatgyctggtaacaggttcatgtgccccttccgggtgccctgggagagacgcttgggcggtgataaacaaccagctaaatatctccatgaaaggagctgggcacagctgaggtcttggtgagcctcgggcacatatgtccccaaatgtgattagagatgcaaggttccatctgttggttaaaattccacagtgggctcagaatcaatgctcagaaacatctgactatgtgacaccaaaaagaatattagacaagggacrtggaagcgatttgggaagtgggtggcactaggcaagtacctggtatgttcgtactagactaacggtgatctggtactagagtaacagtacctgtgattcggccactgccacagagcgctttgcctattgtgaatgcggcagctgccaaaggtggtggattcacttcctggggctgccatgacaaaggaccacaaaccaggaggcttaaaacagcagatctagccgggggtgcggtggctcatgcctgtaatcccagcactttgggaggctgaggcaggcggatcatctgagttcaggagtttgagaccagcctgtctgacttggtgaaaccccgtctctactaaaaatacaaaaattagctgcacgtggtggtacgtgcctgtagtcccagctacttgggaggctgaggcaggagaatcgcttgaacccgggaggtggaggttccagtgagccaagatgcactccagcccaggtgacaaagcgagactctgtctcaaaagaaagaaagaaaacagacctgtgttttctcacagtgctggaggscaggactctgaaatcagggtgtcagcaggctgcactccttctagaggctccgggggagggtccttcctgcctcctccagcttctgggggctccaggcattccttggcctgtggcygcatcatgcctgtctctgccttggtctcyacaaggccctctttcctgtgtgcctcagatstccctctccttcctgtcaygaggacacttggccctggatttatgtctcaccggaaaatccaggatgaactcacctcaagatccttagtatctgcaaagaccctatttccaaataaggtgacacgtgaaggttctgggcggatgtgaattttgcgggggsggccgcaattccgcccagtgcaggtgcgttctgctcttatgcggttttacagggaaggaaggkgaggcttggagaagtcacttcctcaagtctcagagctgaaaatggcagagcagagctcgcctccctccctccagcagcccgggatcgtgccccggcaatggctctccrtgaaggatcatgacgtctgcccactgcagagtgcacatgacctgaaatgaatcctgcytggatttttttcccttaggtgaaatttaaaatgtcagaagagacgaccctggcagatttactgcagctgaacctccacagttacgaggatgaggtccgcaacatcgtggacaaggccgtgaaggagtcgggcatggaaaaggtaggccgtgctggcggtgctgtctgtgcaacgtgggatcagcctgaaactgccccctccaaccactgagagcgcccagaggggtcctgcagccccaaggctctcacgggaagtctggcgggcctttcttacccaacctgtgacaaatcttaaaaaataattctggaatctatttgtttgtttattattttttattgtttttgagacagagtctctctctgttgcccaggctggagtgcagtggcacgatcttggctcactgcaacctccacctcctgggttcaagagattctcctgcctcagcctcccaagtagctgggattacaggtgtgcaccaccacgcccagctaattttcatacttttagtagaggcrgggtttcaccatgttggccagtctggtctcgagctcctgacttcaactgacccgctcgcctcagcctcccaaagggctaggattacaggcgtgagccactgcgccagcctacttctggaatttttcttagaaaacccaatttgcggctatagctctgcccgccccgtacatgcaatagtttggracattttgtaaataaccagaactcgcatttcctttgcctcaagcgtctttgtctgtggtcccgtctgactcctccatggacgtcagttgtttcttctgactccgcagctgacgggagggttggggatgggtgggggatggcccccagctggtacctgaacttgttaatgcgccactggctaccggcagttccagtatccaggaaaactccttttgcggttcaaatctctctcctcagcctgttttgtgagtttgaattgtcacattttgacttgctttaaaaacaaaaataaaaacaacaacaaaaaaactttattagatataattcacataccatacagttcgcctgtttaaagtgtgcagtggcttttagcatagttacaagtgtgtaatcagcacatattcaacagcagagggtgggggctcctgcctataatcccagcactttgggaggcaggaggagygcttgagcccaggagttcaagagaaggccagcctgggcaacataggcagaccccatctctacaaaaaaaataaataaatttaaaaaaattagcgggggaccgggcacggtggctcacgcctgtaatcccaacgctttggggaggccaaggtgggtggatcacaagatcaggagattgagaccagcctggccaacatggtgaaaacccatctttgctaaaaatacaaaaattagccaggcgtggtggcgcatgcctgtaatcccagcgctttgggaggctgaggcaggagaatcgcttgaacctgggagggagaagttgcagtgagctgagatcgcgccactgcagtccagcctgggtgacaaagtgagactccatctcaaaaaaaaaaaaaaacagctgggcacatgatgacacacacctgtagtcccagctacttgggaggctgaagtgggaggatgaattgagctcaggagatggaggctgcggtgagctgtgatcatgctgctgcactccagcctgggctggaccctgtccctaaaaaaaattataatttttaaaaaaataaaaataaaaaatagaattaacaaattttagaatattttcatcacctcaaaaagaaacccatatcctttagccatcatcccctacccctttcctctcacatgtccccatctccagctctaggcaaccactaatccactttccccctctatagatccccctcttccacactttcataggaatggcatcataggtagaggaggcaacattttcactatgcttttagggttttttccagctgggtctgagaattccattgacgtaagatagatcaagaggagaaaagtatgcaaattatttaaatccaagttttctgtggtatgggaggaaaggaagactccaaaacrcagttagagttgaacacttaagtaytgagttgcagaaagcgtaagttgtagaaaagtaatctgtgtaagaggctggaaggtgagagctgttctaaaagggtctgagcrgacaggattctttccgcctccacytcccatcctagtgatgagaatgatcgtttcattctggtatcagaagagcatcattcacctgggaattgcatctcctgcttcccaggaacagcatgaggctcagagagagagtcctgcatctgctgcccttcaagtgcctctgactcaaaattgtcaattgcaggatggcatattttggggtggcaygttctgatctcctttgcgtgcactatgtggtctgagcgtgtggcttctttcactcagcctagggtcttcaggtttatccgcgttgtggcaggtgtctgtacttcattcctttagtggcttatgttccattatatggacagagatcgcatgcatccatcattgggggatgaaggttcgggttggatctgcctttggctcctgtgaatacgttggtttgagcctttttgctttctgatcatggagcttcagtctatgtcctggaaactctgggtcctgcctgagctttgcatgccaaatgctcagtgaccttatttttctgttcccccaaaaggtgctgaaagccctggacagtacctggagcatgatggaattccagcacgagccgcacccgcggacaggcaccatgatgctcaagtccagcgaggtgctggtggagacgctggaggacaaccaggtgcagctgcagaacctgatgatgtccaagtacctggcccacttcctgaaggaggtgacaagctggcagcagaagctgtccacggcggactccgtcatctccatctggtttgaggtccagcgaacctggagccacctggaragcatcttcatcggctccgaagacatccgcrcccagctsccgggggactcccagcgctttgacgacatcaaccaggaattcaaggtgagcacagcccggtggttcccacgcacttcagaaatgactgtgtgtggcgatccctaatgccttggcgatccccttctcttcccaggccttgatggaagatgcagtgaaaacacccaacgtggtggaagccaccagcaaamccggcctctmcaataaactggaggccctgaagaagaggtgcggctcacacctatccagaccaggggagtcagtggtgcagattccctaagtcttaagtctgacggracttaagtcttgtgcagcctgctggccaggacagggcaaaaccatgggtcctgggttaatcaattgcctttccctggggagcacacactccccggcctcatcccaccacgtgatgccttggccttgaaggaagcaatgacccggagaataaatgatgctccctcttgcctaggagtgcccacaaggtcaggggatggcaaagaaacgagagcctccggtaggagattctgaattaaaccaggcctgtgaacagcagtccaggcatctccaggatgatcagtttccttcgccgacagggtgggtggcagacatccctacagagtagggtcaccggcctcctctacttccttccttcctcccagcttggccatctgtgaaaaggctttggcagagtatttagagacgaaaagactggctttcccccggttctattttgtctcctcggctgacctcctggacattctctccaatggcaatgaccccgtggaggtaggcggggccccttgcattccggtgtttaagccaacatcatgccagaccccaggtgggcacctctrcctcaaccgccctagggtggggtaagtgtccttggacgtgccccatcatctccaggaggccctctgcaccagaagctgccctggggtccccagccatggcagaaacgtggcaggactcgcctcacatcctgctctgcacttggcctggcttttgagaagttaatttgcctctctgtgcctcattttccccttctagaaaatgggtcgtatgccagaggcttagtaagacactgtttctgaaagacacacctctcagtgggtcttgctctggtcagctggttaaatctcagggtcccaagagcaaggaacaggtgcctccttggggctattctaaaagagaaaagaggtcaggcacagtggctcacacctgtaatcccagctactcaggaggctgtggcatgataattgcttgaacccgagaggcagagggttgccgtgagccaagatcgcaccactgcactccagcctgggcgacagagtgagactctgtctcaaaaaaaaaaaaaaaaattggtgaagggaaagcgcttgcattttattttgaccataaggttagaggttacacaagaagaagggatatgcaagaatagactgagtgtgtggcttgggatctgggacagaaccttctcaaaaagaagaaatcttatttattaattttttttattttgagatggagtttcgctcttgttgcccaggctggagtgcaatggcgcgatctcggctcaccacaacctctgcctcctgggttcaggtgattctcctgcctcagcctcccaagtagctgggattacaggcatgcaccaccacgtctggctaattttgtatttttagtagagatggggtttctccacattggtcaggctggtctcgaactcctgacctcgggtgatccacctgcctcggcctcccaaagtgctgggattacaggtgtgagccaccatgccccaccaaaaagaaatcttccagaatggatgtttggcttagaagggctgcggttcctggcctggtttctgtgtcctgactcagagcagtcttcgctggttccttttgttgacttagtcatgtttagtcaacrttgatcaaagatggggagtatattccaaaaagaacgatgcctaaaaccacccacggaaagcccaagccacgcacatgcctttcaaatcccccgttgcataattcccgcttcttgcctcctcccaggtgagccgccacctgtccaaactcttcgatagcctgtgtaaactgaagttccrgctcgatgccagtgacaaacctctcaaggtgggcctgggaatgtacagcaaggaggacgagtacatggtttttgatcaggaatgcgacctctcggggcaggtgagtgtgtgcgcacaccacacagggaacccaggacaagggtgcagcacgygtgtgggccacacgccctcagatggcgatgtccggagaaccagcaccctgtgcagctgccagcccgcccctgctcctctcctctccctctctagaaaacacttaagggatgggcctctttatagaatttccagcccagccttacccatatagcaccagtgtatccttagggagaaaggggaggggaaaggacgggagaaaagccctgttcgggaggctgaggcaggagaatcgcttgaacccgggaggcagaggttgccgtgagccaagatcgcgccactgcactccagcctgggtgacagagtgagactccgtctcaaaaaaaaaaaaaaaaaaaaaaaaaaaaagccctgttaatatcattgaatcctttccatggcttttgccaaagggactgctttaaaaggggttgcacatctctgaactgccaattcccatcacctgtctgaaataatcggctgcacagcccaccactcagagtggtctccacagcctcttccttccccagcaagcgcgtcccccggctcagggcgggctccttctgccgtcagaaaacttccgggctgccccctcccctgtctcattacccaactattgatcaagcaatagaaaccattttaacatcagcctgaggaaaatacaatgcagaggtaaatcagttgtaggaagaaraaaaaaaaatctcgagaaaacctgaggttcaaagagttgaacacagcacacacgtggcctgctctacgtggatggggtgggtggggtgnnnnnnnnnnnnnnnnnnnnnnnnnnnnnnnnnnnnnnnnnnnnnnnnnnnnnnnnnnnnnnnnnnnnnnnnnnnnnnnnnnnnnnnnnnnnnnnnnnnnnnnnnnnnnnnnnnnnnnnnnnnnnnnnnnnnnnnnnnnnnnnnnnnnnnnnnnnnnnnnnnnnnnnnnnnnnnnnnnnnnnnnnnnnnnnnnnnnnnnnnnnnnnnnnnnnnnnnnnnnnnnnnnnnnnnnnnnnnnnnnnnnnnnnnnnnnnnnnnnnnnnnnnnnnnnnnnnnnnnnnnnnnnnnnnnnnnnnnnnnnnnnnnnnnnnnnnnnnnnnnnnnnnnnnnnnnnnnnnnnnnnnnnnnnnnnnnnnnnnnnnnnnnnnnnnnnnnnnnnnnnnnnnnnnnnnnnnnnnnnnnnnnnnnnnnnnnnnnnnnnnnnnnnnnnnnnnnnnnnnnnnnnnnnnnnnnnnnnnnnnnnnnnnnnnnnnnnnnnnnnnnnnnnnnnnnnnnnnnnnnnnnnnnnnnnnnnnnnnnnnnnnnnnnnnnnnnnnnnnnnnnnnnnnnnnnnnnnnnnnnnnnnnnnnnnnnnnnnnnnnnnnnnnnnnnnnnnnnnnnnnnnnnnnnnnnnnnnnnnnnnnnnnnnnnnnnnnnnnnnnnnnnnnnnnnnnnnnnnnnnnnnnnnnnnnnnnnnnnnnnnnnnnnnnnnnnnnnnnnnnnnnnnnnnnnnnnnnnnnnnnnnnnnnnnnnnnnnnnnnnnnnnnnnnnnnnnnnnnnnnnnnnnnnnnnnnnnnnnnnnnnnnnnnnnnnnnnnnnnnnnnnnnnnnnnnnnnnnnnnnnnnnnnnnnnnnnnnnnnnnnnnnnnncctcccaaagtgctgggattacagacatgagccactgcgcctggaccccagccacattttttaagtgagtctttgattagccgggtgtggtggtgcacacrtgtagtcccagttgcttgagaggctgaggtggaagcatcgcttgagcccacaggtggaggctgcagtgagccaggactgcagttactgcacagcagccggggcagcagagcgagatcctatctcaatttaagaagaaaatatgtggccgagcgtggtggctcatgcctgtaatcccagcactttaggaggccgaggtgggcggatcatgaggtcaggagatcgagaccatcctggctaacatggtgaaaccccacctctagtaaaaatacaaaaaaaaaaaaaatgccgggagtgggggcgggcgcctgtagtcccagctactcgggaggctgaggcaggagaatggcgtgaacccgggaggtggagcttgcaatgagccgagatcatgccactgcactccagcctgggtgacagagcaagactccatcttaaaaaaaaaaaaaaaaaaaaaaaaaaaggtgtgtcactgttactgctctgtaaaatccttgacctgtctgcccctgggatgaggatgatgagaaatgtttttctttacaacaaatacaaacaaaattattggaactagaggcaggcacacatggctgtattggtcaccgtggctcccgtccccaggtggaagtgtggctgaatcgagtgctggaccgaatgtgctctaccctccggcacgaaatcccagaggccgtggtgacctaygaagagaagccgagggagcagtggatcctggactacccagcccaggtctgaggcgggtgggggctcggcggcgcctcgtggctgagataaggggcgagtttctytgcgttcatgggctccgctgttaactgtggtcccctggaaaaccatctaagctttcagcaggaaygtctgcgttagcaggcrccagcgatcgctcactgcgtgggcaatggggggtatgtactttcaggtggccctgacttgcacccagatctggtggacgaccgaggtgggcctggcatttgccaggctggaggaaggctatgaaaacgctatcaragattataacaaaaagcaggtgtgttactagtgtgtagttagttacgtttttaaaacttgtttaaaaagcaggtgcatgggcccgtgtatccttctgaaacctgccgggckagtacctggagcrgcttcttctcggaggctgagccccgcaaaaccgtcgtttccacaggccaaataacagccacgcaccacagccccaggcacctctccccacgagtaacagacaccttcagaaatatgtactttgatttctcgcctgaaaattggcagatgctactgagagtcyttaaaaaaaaaatgtccttggttagaaatatggaaacaaaagatcatcttgaaaagaaggagaatttacctgtaattccacaacccaagcatgacactgcagggcccttatgcaacctgttactctgtgtgtgtataattgatttatatgtaaaaatatacagactctggatggcgttaaagtcagctgtttttgcttctcatccaccctctctcgtggccytgaatttccttctactacgtccatgctagccactgccaggtgtcccatcagggccgcaccctggtgaaaccagtgcctggctggggcctaccgagggcgctcttgtttttcattactgtaaacaaaagcatggtggtgttccctatgcagctgtgggcacccagccacaagaccccccagtgcatgtgggcacccgtggtgtctcatcgaaggcactctcccccgcagattagccagctgaacgtactcatcaygctgctcatkgggaacctcaacgctggcgacaggatgaagatcatgaccatctgcaccatcgatgtgcacgcacgggacgtggtggccaaaatgatcgtggccaaggcatgagygcccstgtcccaggggccaggggaagggcaaggggacrccgggttcagggcagtgcattcagggacttcagaccctgccacttcctcttcctggggcactgactctgttgctggctgcagctgcctcctaacctccttgcccggactcacccctggtgagcaacacacagcagtcagatgagcggtgcccgcccattggaagtgccattctgtagcgagattccactgagggtggccatacagttggatgtgggtgctggagggggaaagagrgccagggagggttmcctgggcagcaggggaccggccttggaggcatgytggccttccttaggcagccctagctcttgtattccacctggcaacaagagctccggctcatcctgcaggtggagagttctcaggccttcayctggcaggcccagctccggcatcgctgggacgaagagaagcgacactgctttgccaacatctgcgatgcccaaatccagtattcctatgagtatctgggcaacacgccgcggctggtcatcaccccactcactgacaggtgaggcccgtccctgagtaactcacatgtgctcttggtgggtcccttccgcatgattcttggaactgtccgacttggaggtcagctgtggaggctggaaggactgggcatttgcgtcaggtggacctgtgttcacattcagttctaccacygtgtccttgttctrgcaccggctgtgtggccttgggagagttcctgcacccctctgtgggcctgctgagttggggtcatgttttatggaccctcatgagcagactctggttgtcgtagcagtgcccacctccctgaatgccacaggtgggaaaggcacctgggctgcctctgctccacggttgtggttcctccttcacacctgaaggttttctgccctctcccatgtgtctcctggggctcatgcctgtaatcccagcactttgggaggccgaggtgggtggatcacctgasgtcaggagttyragaccagcctggccaacatagcaaaacctcatctctactgaaaatacaaaaattagccrggcatggtggcgggcgcctatagtcccagctacttgggaggctgaggcatgagaatcatttgaacccaggaggcagaggttgcagygagccaagattgtaccactgcactccagcctgggtgacagagtgagactctgtctcaaaaaaataaaagcagggaggccatggggtcrctggcacacacgcttacctgtggtcacttgcaggtgctatatcaccctgacccagtccctccatctcatcatgggtggagccccygccggccccgctgggaccggcaagactgagacgaccaaggacctgggcagagccctgggcaccatggtctacgtcttcaactgctccgagcagatggactacaaggtacgcggccggggtccggaggaggsacccagagtcktcttktatagaagcagatcytagcaccctgtcctccgaggccccacagtaaactcyagatctctggatacctgtgaatggcactggagaggaggtgccagggcccccacttgctggtagcatccccctcaggtggtccctctggaaagacttccagggtggacagaygcagccccaaatgtcctgccccagcccctgccctggaggtgaccctctctcaatttcagttgttaagattgccccgaactggggactccgcacaggggtgascacctccctcatggttcagcatggggtggggtacaagcagtgtccaggtgggtttgggaggggagcaggggattggcccggtcccatcagtcattagagcctgcacaggacatcgtcggctcacaggaggccagggaggggaaggggatacctcggagctccaggctgcagcagcctcttgcaagacgggaaggcaagggggatggaaccctgagttttggaccctaggcctgcagagggtctcccctccccagcttggatctgagccccacaatctgggggccccctcctgaggctgaggatgggaccagcagcccatgttcactgtcagggccacgcagtccacatccgcctcctggattttagaaaagtgaaatctgaagttggatctccctggaagggacttaacatccacctggaatcccaggtgtagatgggacgagtccttctgattggcccaggtggggcctagagagacacagatgtcttgagggaaagcctccggcctgctagacgtgcccccatcccgccttagaggactccctctcctctccacgcaagaaagaaaagggctgagaaaacatgcaaggtttagaacttaaatgtgcttgtctgagccccttattagggactccaggaagtccccatcctggggtctgggaggcaagggtgaaaggatggctcttcctcgtgtccagccctccacggtgttaccctgggcrgtaagctgacctgcctgctggcctgcggaaggctccaatgcaccggggcctgagcaagctttgggaagagaaaacacagccgaagaggcagggggaggcccctgcagcgcccgccctccctgtcaccctcccagctcttcctttctccatctcgccctttccagtcctgtggaaatatctacaagggcctggcccagacgggagcctggggctgctttgacgagtttaatcgcatctcagtggaagtcttgtctgtgattgccrtgcaggtaaagtcccctgcctgcggcctcggggtcacgtcgggtractggctcgtcagctttcctgtgacctcacacgccagatagaccctccttgcctctctgcaacgttccaagcaccgaagggtggtgtggtgccattgagctcttgccctccagggtcccaaagcctggttaggcaaacacattgaaaacagaatcagattacaggttacatgtatggtagcaaacgtgtaacaaaawacaggtgggagaataattaattttgcttaggaaagaaagacaaagtgctttgttattggtatcagcggagctgggcataggaggtgctgaaagggaatggcargaaagaaagaaaggagggggagagggaggaagaggaggagggaggaaatgcgcccgtgtgttttgggaacaaccatgccggggcacagagcgtgcagcggagtggctggggcgacctgggtgcagggacttcggattggggagcagcctgggccagcgccccacccccactgatgcttgttaaaatctccagcgtgggccccacttgttaggaggagcatttctgcattttaaacaaatgcctcaggtgatcctgacgcatgctgggggttgagaagcactgggctgtctaaggtaagtggaggccgacctagcggcctgggacaattgtgctcttccaaaaggaaatgcaagtcagggcgttggcggtgtcaaggtcctcccaccacaggatagaccaggagcatgtggggtgtggacgtgcaaatgcctcctgggctgcttaagccccacaacctgggtggagagcctgctttatttatttatttatttatttatttatttatttatttatgttttgtttttttgagacggagttttactcttgttgcccaggctggagtgcaatggcacagtctcggttcactgaacctccgcctcccgggtttaagcaattctcctgcctcagcctcccgagtagctgggattgcaggcgtgcaccaccacgcccggctaattttgtatttttagtagagatggggtttctccgtgttggtcaggttggtcttgaactcctgacctcaggtgatccacccacctcggcctcccaaactgctgggattacaggcgtgagccgttgtgcccggctgagagcctgctttatacaccaacttaacccctgactctcggcttggcagtgatgtggactccctstgcctccaccttctaacctgtaaggcggtgttggtgacacaggtctgccagcaggattagaggtgcctggggtggctgcttcctcctctccttatgctccctctgcctcagtcattccccagccccagggctggaggccccatgaccaagagaatggggaccccaaaccatgggcagtgmtggctkttrccgtggggaccctctcccttgcccccagcacaggagcagagctgctgagcacctccgacgtccatgaacaaaccccagaatatttatatagcccctactctgggcactgaatgttcaygggctccartggagaccacaggagaggcttggcctagctggaagcggtgctgttccgaaaggccccagtcctgccaggggacaagctgcacgctcagcagactgggcatgggggtgtctgggatcaccagggcaccaggacttggctgtcctggggaagacagggaaaggcaggtgctgggagcagctttaccgcgagtattgggccccctcaagtggtgacttggagagacacagctgtcttctgcaggtttccagaggagacctcaagcaggcaacggcccctgatgctctaggtttaacctcgtagctgacagttggccttcaagactgtctgatacggaggtggccgctaaccagtcctctgacaggtcattgccagagtagtaacaggacagaaaagggctgggagtggaacccaactcagcagggacaaggtgttgaaatacttactggttcctgcaacagcctgggtgcatctccagagaattctgctgagtgataaaagtccatctgggggccgggcgtggtggctcacgcctgtaatcccagtactttgggaggccgaggcgggcggatcacgaggtcaggagatcgagaccatccttgctagcatggtgaaaccctgtctctactaaaaaatacaaaaaattagccgggcgtggtggcgggcgcctgtagtcccagctactcgggaggctgaggcaggagaatggggcgaacccaggaggtggaggttgtagtgagccgagaccacaccactgcactccagcctgggcaacagagtgacactcagtcttaaaaaaaaaaaaaaaaaaaaaaagtccatctgggaagatcgtgtatgatacaattccacttatataacatccatgaaatgaccaaatcacagaaaaaaaggacatggttgccaggggtcaaacggagggaagggggcaagagggaaggggtgtggctataagagggctgtcaccccatggtgacagcaatgctggyctcagtgtcgcgcccaycctccccccgcccaccacccccgctgtgactggtactgttattaggcaagatgttcccatcaggctacatggggcagagagtacacagaattgcctttgtatttttttttcttccccccaatcactgtcttttgtattttttattgagacagggtcttgctatgttgcctaggctgggctcaaatcatcctccagcctcagcctcccaaagtgctgggattacaggtgtgagccactgtgcctggccctctgtattatttcctacatggcatgcaaatctacaactttctcaaaaataaaaggcttaatttaaaaaataaactaggaggtttgaatttgcaggcgcaaattcgcagcctcatgctttaacatatgtgaaggcctctctggtgtgtggaagctggccatttccatgctaacatgtctgtgtcaccaaccgtgcaggtaaaatgtgtccaggatgcaattcgggccaagaaaaaagcattcaatttcctgggagagatcataggcctcattcccaccgtcggtatcttcatcaccatgaaccctgggtacgcyggacgcgcggagctgcctgagaacctaaaagccttattcaggtacgtggcccwggtgaaagtgagtggctgcagtgagccaggccggccacagcaacgtcccagtgccaaggagtgggcagaggggaggggcagagggcaagctggggagggaagaagtcatcaaaagctcccaagatggccgggcacagtaactcacttctgtaatgtcagcactttgggcggctgaggagggtggatcacctgaggtcaggagttcaagaccagyccggtcaagatggtgaaaccccgtccctactaaaaatacaaaaattagctcggtgtggtggtgcatgcctgtaatcacagctactcaggaggctgaggcaggagaatcgcttgaacctgggaggcggaggttgcagtgagccgggatggcaccattgcactccagcctgggcaacaagarcaaaactctgtctcaaaaaaaaaaaaaaaaacactcccaggatgaggcaggcgagggcctccttagaaagcactctgtcttcccctgggtgggaggaccgcacctgggacacagtgatggaaagcagggttggggggttggggtggctctcagaggaggggccctgaaggtgcacccagtggatgatgtgggaggaggagggaagtagggagcaggcgggctgggagcccggctccaggacygaaggttcaacactctgctgtggtctacctggcagtcgaggtgtgctctcctaggtgaagagggacaggcaggggtgtaggttggggagggagtgggyagaagcccacaggcacygctgacctccccaggccctgtgccatggtcgtccccgacttcgaactgatatgtgagatcatgctsrtggccgagggctttctggaagcccgccttctggccaggaagttcatcaccctgtacaccttgtgcaaggagctgctctcgaagcaggtgtgtgtgtcctggagctcacggcgggtgtgggtgggagtttgagatgygggyagcagccasggttggcttccagacctgcctgctggccacaggaaggtgagctcacgtctgcccacctgtgcccactgcccgcaggatcattacgactggggcctgagagccatcaagtctgtgctggtggtggccggctccctgaagaggggcgaccccagccgggcagaggaccaggtgctcatgcgggcgctgagagacttcaacatccccaagattgtgacagacgacctgcccgtattcatgggactgatcggggacctcttcccggctctggacgtgcctcggaaacgggacctgaattttgaaaaggtcgggactcctgggtctcaggtctgtccggagaagcctgcctggctggggcttccttcccactgatgttggacgggtggagacccgtgtcacacacgcacgtttcccgatgctacaaagagacctctgagccacagctgcctccgtggccctggccagccccaccctgtcagtgctgggggaggtcactctctcaactgaggctgggggggcttcaggcaaaccgaccccctgcatgaggtcgcggtggagctatgtcaactctcggcattgacagcagaacttgcagacgcacgtgcatcggagggcaagggcgcctttatcatctcccccacggggcaggaagccccccagcctcccagcgagaagaaagaaaagctgcttcagttcctcacccagcctcatccatgtctccccagatcatcaagcagagcatcgtggagctcaagctgcaggcggaggacagcttcgtgctgaaggtggtgcagctggaggagctgctgcaggtccgccactccgtgttcatcgtcgggaatgcgggcagcggcaaatctcaggtgtgtcacccgctccagggaccttgcagggatcyggcatggtgggggagggctggggcgaagggtcggccctccatcactccccgccaccccggagaccccaacccagtacatcctgggagccctccggcctgagtcatgggccagggaggaagctgggggccgaggaggaggggaggagctgccacagcccctgatccctgatccctgggtgaggcctccctccctgttcctccttgtcttcctgctcttctctccttgacgtcagtcacttgtctccctgtccctgtggccggcccaacccatcgccctcctgtcacctgccatggcctagggagtggtgacatgtggagggtggtggcggatgtgactgatgtctgtgatgtggaaaattccatgccagccaagtgtccggacagaggcccacaggctggacccttctgctattgtttgagatcactcccaccgccagtcacatggggaagctcaccagaagtgatgttttaaaaggcagaggccgcatggacccagtttcctaaaagggaactcggacatacacatacaggaaatgtcctcaaccgtgtctttaaagctccttttccctgaatggaggattgtggggagttttcctagatggtttttcagtgagtgcgtattacttgtaccatgaggaagaaaggaatgtgaatgttttcagagcctcgcacagtctagggcaagcagctctctgcgggctgcagacacgcacagtgaacagttagcttcccatcacccaggcctccttcgcctcagccatggttggggggtgtaaactcacctgtgtgtctccagagcaaacgtgatccagagaagggttcagcctggtggttcataaaaggcatccagggccgggcgcagcggctcactcctgtaatcccagcactttgggaggccaaggcgggctgatcacctgagatcaggagtttgagaccagcctgaccaacatggtgaaaccctgtctctactaaaagtacaaaaattagccgggtgtggtcatgggcgcctgtaatcccagctacttgggaagctaaggcaagagaatcacttgaaccctgaggcagaggttgcagtgagctgagatcacaccactgcactccagcctcggygacaagagtgaaactccatctcaaaaaaaaaaaaaaaaaaaaaaaaccatccaggcccacccatggtcctgaggctagtggggcaggatgtgccaggaacatggagtcacacgtgagtgacccccaccttcgccaggtcctcaaatccctcaacaagacctatcagaacctgaagaggaagccggtcgccgtggacctggaccccaaggccgtcacctgcgacgagctctttggcatcatcaacccagtgaccagggaatggaaagatggtaacgagggtggtcccgggacaggctgcaggggcactcctggtccagtgcagtgagcgtgtgctcagcyrttcccacgtggaaggccagcctccccaggctagggtggggcacacaggcacgtggcctgcaatggtggcaccatggtaacaaagtttatggggagcagtgggcacgtagcacccgggctgggggataaggaatgggrgccacaggagctgggacggtgaggactgcaggcctgccccgagcaggccaaggggagagggcagagcaaggacaggtgtgacccgtgaggagtgcatgggagcccagacatgcaggctggaggctgcccggggagccctggcctcagtcggtgggctctggggagaagcttcccccaggaggtggcgtcactgggtttgcactttatgaaaggaactccggaygttggagagtgggctgcagaaaggagctgcgagagctgaggagkmgtcagcgggagcagggtggtcctgaccaggagcctaggggagggctgtgcctagcctgtcccccgcaccctacccatcagaagtggccctacccctgacccgctttccctgtcccccttcgctggcttctgcatgtacagctcacttcccctactagaagtcaagctctgtacccccagcccccaccttgctccattccatgcctgacgcatgaagcgtgctccgcagacttctgctgagcgtgtgagtggacagatggacagagctgggtgcacaggtgctgcgccccgtgggatgttgagcctggaaaaactgagccagccagggccacaaagaggggctgacagggagggtgcagggtcggaggaggacaggcagggcctcaggcatggagagggcacgtaggagggaggccacagagaacggagggcagggagcctgggcacctcatgcccgagggcctctgctgttcctctgaagtaggggacaggctccctcccagagagagaggccagggtcaggactggtggggactggaatggggccggagtgaagggcccggggtcataccacgcgcctcccccaggcctgttctccaccatcatgcgagacctggccaacatcacccatgacggccccaagtggatcatccttgacggagacatagaccccatgtggatcgagtctctcaacacagtcatggatgacaacaaggttcgcgggccctggactctaagccccaaggccacccaaggcagggacracgggggctcacagggaggcgcctacggagcactcaggccctgcatgccaggcttggcgcaggtggcgtgtctggatctccacaggaagctatgagtgaggggcaccttgtcgtgagactttgtcacrtgcgttgtggttttgcatgcgcctcaccttacattttagcaggatgggttcagagtaaaggcctgggaagcagaaatggttatgtagaattgtctagaagccattttctaaaaatgctcctcagttggatgcaggaaggaacacaatactttccaggatggggaggggtgatggtttgagaaagcagccctgactccatgctgcagccctcacggtgtgggcgtctagaggctgctggattcagggaaggcagagaagccctgggccaagggactagggctgtgggccaggggtggcagggctggcctgggcccctcctccttgctcggaggtttgctccgagtaacccccaccccagaacaccattgggatggcaggtgtcgccttaggaccccacgggctgctgtccccctcctaggtcctcaccctggccagcaacgagcggatccccctgaaccgcaccatgaggctggtgttcgaaatcagccacctgaggacggccaccccagccaccgtttccagagccggcatcctctacatcaacccagcygacctgggatggaacccgtgagtggggctttggctttcctgttccaaacctcggcagggaaaaacgaacttgttggcctgtttcagagttgcatattcattcatcattcatgtcacaaactgtgtatcaggccctcaccaggcaccagtgtcacagcagtgaaggggtgagagacagacctgggaataaatggtgtaaattcacagtgacacgaggcagggcrgctgagcaarcggatgtttgcacaaagtgccagggaacaagggctggtgtgggaagggaggtcttggcctctgtggaggtgggaagtcttcccaggtgattgaagtttgggctgccatccaaagggtcaggctgcctctaaggggtgaaaacagagaagcacaccagacaagaacccgcgttcacagggcatggtggggagtggggcattgccggatgggcagtggtcgggttctcctggccagagcataaaggcggaggctgctcctgacgggaaggcgctgatgctgggccaaggtgcaagtgtccctttccaatgtgacgagggaaaagcagctggtcatgccagcaagatgggggcctctagggatcagagaggaagggatgggtttaagaaatatctgaartctggagaaatggaagacttgatattgattccagaggcatattttcgggcttggacacgtggctggtgatwgacagagtaagggatttcctggggacatagaaatgacagctttgtgcaaatgtcctgcgtggacttaggcagaaatcccagtgaggtgttcctgaggcwagaggctccagaggagcgtcttggctggaggtcacagttcatccatccmtccatccatccgcccacccacccactcacccatccattcaccctcccgcccacccagtacttcgcacacctgccatgtgtgtccaaccccaggatattccatgctggggagctgggctctccaggaaagatgtagagagtgatgaaaaaagctggttttctgagaaaaaccagcacygtgggggaggaagaagaatatgtgagggattcacaggtggaacaaaccaaaggcagaagggaacccaggacgcrtcatcccagacacccagcaacaaaagcttcaggagggagcaytcacctcagtaggatggcacccagagtcaagccaaggacagaagagttcccattgcatttgggagctaggcgcayctccatcactcagggagaacagcttcagggcgtgttgagggcagagccagatggcaatgaggtatggaggaggcagcaggaggcgccagaagtgaggcgagtcctgccttggagtgctggagggtagggctggaacaagaggaatgaagctttgtagtatttgtcgagacaagaatgatgtttggccatgggatgcaggcatggctgttttcaggtgcatgcaagtctataggcagagaaaattaagtttccggagttcatgctggtgcacttctttgctctctgcgtgggaagtgagaccctctgctgggaggcaggcagcacagtgtggccagggtttgagagggataccaagtggaatgttccctatggggacagggccaggagctgctgagcctgggtgcctctgtgccggcttctccagcaacacttgcctgcttatacagcattctccagctgctgaaacaatgaccactaatggggcagcttcaaacaacagacatttatcctctcccagtgctggaggccagaagtcaaggagtaggcagtgctggttccctctgaggctctgcgggagaacctgtcccaggcctctctcccagctcctgggggctctcggcggtccttggcatcccttrgcttatggacacacccctcccatctccgcctctgtctccacgtggccttctctgtatgtctgtgtccaaatttcccatttgcttataaggacacagtcattggattcagggtccaccctaaatccaggatgatcttgtctcaagatccttgatgacatctgctaatgccctttctccaaatcagggcacattctgggttctgggtggacattcttttgtagcaccaccatcctacccactgtaccatgtgtgggagttttcagggtaggcaaagacaatgtccggggaactgaaatgaagcctgggtaggagctgctgagacacggggacaggaaaaagacaggatcgtggagtcctcagggggacaccctatgggagcagagaagagggagccagaaacgaaggcagcgtgggccaaggcaggaactggacacctccaaggagtgacctggaggaagcaggaggaggagacctgagtattggcagaggagagaatggaaatgggcgagaagcagacacagggtccccagacagcaggagcagccctcctataggcaactgccaggggcagggatgccggatgcacccaggatggccttggggacagggcaagaagccgtatggaccagaggtgagaaagtcggcctgtctcrcaagcatgtgtctctcctggggcctgtgctacgcatatcagagacagcacacacaycgacccgcactcagtgactcctaccaaggcagcatcacaaatttttgacacaaacatcttcaaagtagaaggcagaaagcagcagcctctgcgtagatttgcaaatcaatctcccctactgaagaccaactggacttggaattcagttcttagttgcgacaggcatggagacaccctgattcgcttagggacatagaaaggtttactctattacgctggataatacagggtgctatgcggcaaagacgttcagctcttaattctctcttgtgatagaggttcaggaagaagcggagctcccccagagcacactcacagaagagtgtgtgtctggccaagcacrgtgcctcatgtctgtaatcgcagcactttgggaagctgaggcgggcagatcatctaaggtcaggagttcaagaccagccyggccaacgtggcgaaaccctgtctctactaaaaatatgaaaattagccaggtgtgatggtgcacgcctgtratcccagctacttggaaggccgaaacaggagaatygcttgaacccaggaggcagaagttgcagtgagccgagatcgcacccctgcactacagagcaagactccatctcagaagaagaaaaaaaatgagtctctgtctaaagaggcacgtctgccggtcagcrcagggcaggctggctgtgtgtgttaacaggagcttcctgcttaggccctgggcatcctggaaatgatgcacgtgctgagctcactggcactcgagggggccaggcactagtgatgctttcagcagatgctgatttggcaacacttaccctggaccaggcccccttctctgagctttaaaaatatcagcccatgtagtccttggaaatgagggtcatggaaacatcacccctgtttacagatgagaaaccagggactcaggcatgtgcagtaacctgcctaaagcagcagctggccatggtagagctgactcaagcctgggcagtcaggccccagagtccacacccctcaycgccgtggtgggccacctccacacgagccacccagagatgtctgtggccaacagtctggcacggctcttcaaggattgctggttgtattgatttgtactcttacactgaacatggcaaattcaactcaaactaactgaagcttaaaaaaaaaaaaaaaaaaaagcaccaaggggtgcttcaggcatggctggattcaggagtccagatgatgtaatgaaatgtccctgctcctatccttgtctctcctttctgctcccttactgtccccaccttcgtgccccccacatgacatcatgagatctttctccttttctgttctgccccatccaccagcccttggtatgtgcttcccgtgtggtagcaagaatggcttcyaactgttctagacctacagcacccccatagctagcaaccccagagagggcacagcccccacgaccctggcatcctcctccgaccctttcagggcctgcaactggcccctctggcaccctcgtttggacccattgccatgcaggcatggtgaccctgagggcagccccagcagaattgggtggaggtagggaggggcgtttaccaaggcagggacactggcagacccagagcagcggctgtgtcatcggcgcctcctgtcacccccagggtggtgagcagctggatcgagaggcgcaaggtgcagtcggagaaggccaacctgatgatcctctttgacaagtacctgcccacgtgcctggacaagttgcgctttgggttcaagaagatcacgccagtgccggagatcayggtgatccaaacratyctgtacctgctggagtgcctgctcacggagaagaccgtgccccccgactcccccagggagctgtacgagctgtacttcgtgttcacctgcttctgggccttcggtggcgccatgttccaggaccaggtgatgcacctggggggcccggccacccacacagggtctctcagcatccygcttagctgggccctgatttttacttctgtgtctcaacagcttgtggattatcgagtggagttcagtaaatggtggatcaacgaattcaagactatcaagttcccctcgcagggaacgatttttgactactacattgatcctgacacaaaaaagttcctgccctggacagataaagtgccctcctttgagctggatcccgatgtcccactgcaggtaactgtccccaaagcagggccaccgactggtgatttagaggcrggaatcggtgcagtaccctccacacgcctgcacggaatgtccaaacacaaccgattttcaacattaggacctgttcggtagaacatggcctgcacacccacgagaggcagaagtgtctgagaatcacagctccctccccttccctcccctgccccaggcctctttggtccacaccacggaaaccatccgcatccgctacttcatggacctgctcatggagaagtcctggccggtgatgctggtggggaacgcggggacgggcaagtcggtgctgatgggggacaagctggaaagcctgaacacsgacaactacctggtgcaggctgtgcccttcaacttctacacgacctcagccatgctgcagggtgaggctggtccggccacgcccygcctacccggctgccccccgccagtccccgttccctcctgtcccctctcactgcaggcccaggcactcactagccactttgcacctcctcacttcccrtgccccacccgctggcctttccttcctgagtcggagacagaggaggagcagccgggacccctctttctggtgctcccttgtgggcatggtgatggggtttatgatggccagtcgaggcagcaggtcccccgggagtgtctcagccaatctaaggcgacccaaaggtgacggagagcaaggttcctgccaccctcgcctctgatcgctctgtttattcctggggctgtacccggtgccccctcaagggccactcccagggcaggtacctttggtaaacttggatcccagccaggtcccaccttctgtcctccggggaagcaggtagcgcccctccctacctaacaggctctggctcaggaggcgcaggcgggcagctgaccctctgccctctctaggggtgctggagaagccgctggagaagaaatcggggaggaactacgggccgccaggcactaagaagctcgtctacttcatcgacgacatgaacatgcccgaggtggacaagtatgggacggtggccccgcacaccctcatccggcagcacatggaccaccggcactggttagacggggcggggccggaggggaaggcgtggccccggggcggtgagggcggggccagggcggggcgcaggaagaggcggagccccagggcagtagggcgggactggtgtggggcggtggggggggtgctgcaacgtgggtagggagacacgggtcgtagctgggcccccaagcttgtggggccacaaggcattgaggtagggccagggtaggggagaggttctatcagtttcgtccatcrcccatttcacaaacatgcagcagtggcctagagcccccgcggaggggggatcctccttccccccttccaccgaggtgtctgtcccgccgggagaggaagaagcacattacccggtaaaggaagagccctgaggaaaacccccagtgcagtcacagaggagcctcccagctgggagccccagcagagagatgcccctggggagatggtgcacagctggaagctggcagcagtgtcctgctggctgtgggaccttagagggagagcattctgggtggagagattgccacgtgtaaaggccctgccgcacgtgaagaagcccaggaaggccggtgtggcaaggatgtgagagccagagggagagggtgcccagggcagctgcagccagaatcccagggcctcgggacagagtgcagattttctcctaacggcaccgagaaaccgaaggtggcacgtttaggtttgcagtttggaaagatgagaacattcagttcagttgtcttttttttttttttttttttttttttttgaggagaaatctcgctctgtctctcaggctggagtgcaatggctcgatcttggcttactgcaacctccgcctcctgggttcaaggaattctccttcctcagcctcctgagtagctggtaatacaggtgcccagcaccacgccggctaatttttgtacttttagtagagaaggggtttcgccatgttggccaggctgttctcgaactcctgacctcaggtgatccgcccgccttggcctcacaaagtgctgggattagaggtgtgagccaccgtgcccagccatagttgtctcttaaaataagcaagtagctcaggccaaaagagcctagaaactagtctgctcgttcgtgaagcccggcctcatgccgagaaaggcaggcatggggggttaggttgcctacttgaggtcatggtcctaatgagtggcggagctggattattattattattattatttccaagacagagtttcgctcttgctgcccaggctggagtccaatggcgtgatcttggctcactgcaacctctgcctcctgggttccagcgattctcctgcctcagtctcccaagtagctgaaattataggtgcctgccaccatgcccacctaatttttgtatttttagtagaaacggggcttaaccatattggccaggcaggtctctaactcctgacctcaggtgatctgcccgcctcaggctcccacagtgctgggactacaggcatgagccaccacgctcagccagaactggattttgagttcagatatgtctgactccatcacctgccttttcctcactaaacgacactcccagagctcacgactataggaagcctactctgggctgcaggctgtgatgtggggacggaggcatcagaggtggctccctgggggaggtgacaaagctgccactctgaggagggagcctggagagagtttgacatcatttgaggagaacctaacgtggtgtggggtgggagatttgagggcacccagacaggagaggagggcaggtgcatgcatgagagcccacccgttcctctctgcaggcaggtctactgtgagggctgtggcggctcagcctcggtttccctgcaactcgcgaggccccttccaagggttgcacacggtcatgtgcccttgtaaaatttgtttaagatttttgctttcttttcctcaaggaggagcctccacattcttaagcttcagccctaggtccacatctgccctggagtttaccctgaaggatcttcaggaggggtggcagagtgagatttgagttttcaaaagatccctctagaatatcagattaacatggccccacgacaacagggaaggatggactgtttagtggatgtgtcaggaaaatgctcacctgtggaagaaaaaggcagacaagggtggggcccgtgggaaggatgggcccgcagggaaagggtgagctgtgaggtgggcagaagcaaacagggacaacatctgtgacctgagaagtgtgcacaggagaggactgcgcaggcaaaagtttcagaggcacacacagaagggcaaaaaattgatggctgtgatttaaatgaaagttaaggaattttgctcagtgagagacaccatggacatatataatggagaaataaaagaatggaagaaaacatttgcaatgtataaaattgacagtggattaatatctgaaatayacaaggaattactagaaactaacagacgtcaacttccaacacacaaagtgcataatgggggaaaaaaacaaaagtgctgggcgcagtggctcaggcctgtaatctcaacactttaggaggtggaggcaggaggatcacttgaacccaggtcatatagtgagaccctgtctctacaaaaacttagccgggcatggtagtgtgaggctgaggttgggaggacagcttgagcccaggagatagaggctgccgtgagctgtgttcaccactgcactccagccggggtgagagagcaagaccctgtctcgggggaaaaaaaaaaaaaaaaaagtaactagtgtagtgtgacatcaaggaaattattcagcttattttattttatttttgaaatgaaatcttgctctgttgcccaggctggagtgcaatagcatgatcttggctcactgcagcctccacctcccaggttcaagcaattctcctgcctcagcctcccaagtagctgggattacaggtgcctgccaccatgcctggctaatttttgtatttttagtagagatggggtttcactatgctagccaggctgatcttgatctcctgacctcaagtgatctgcccatctcagcctcccaaagtgctaggattacaggcatgagccactgtgcctggcctattcagcttatttaataatagcagccattaataattatcctgataacagggatggtgaacatttattgcatacttattgtatgtcaggtactcttcccagtgttttttcatatgttagctcattttatcctcctcatgacccattgcacaggtgagaatattaaggcacagagatgttaaccaacttcccagagccccagcactgcttaggggaagagctggaacataaaccccagcctgctctctgagccactcttttgcctcttgtttcaaaatttctctggagagcatgaagtcacagcagctgcttcacatattatcagtatctgtggagggtttttaagaccacatggagtaatcccagcatttgggaggctgaggcgggcggatcacaaggtcaggagatcaagaccatcctggctaacacggtgaaacccagtctctactaaaagtacaaaaaaattagccaggcatggtggcgggcacctgtagtctcagctactcgggaggctgaggcaggagaatggggcgaacccaggaggcggaggttgcagtgagccaagatcatgccactgcactccggcctgagtgactgagtgagactccatctcaaaaaaaaaaaaagccgggggatggggggcgggcgtggtggctcacacttgtaatctcagcactttgggaggctgaggcgggcgcatcacgaggttaggagatcgagaccatcctggctaacacggcgaaacccygtctcaactaaaaatgcaaaaaattaggcaaagcttgcagtgagccgagattgtgccactgcactccagcctgggcaacagagcgagactctgtctcaaaaaaataataataaggagggcattcttgggagcacagtgggggcaggggatggttcctccaggccaggrgcacaacatgaatgctggtttcccccctcaggtatgacagacataagctgacgttaaaagatatccataattgtcagtacgtggcctgcatgaaccccacttccggatccttcaccatcgactccaggcttcaggtaagcagaaaccatactcatycccgtcacctgccatgagtmtgaggcttgcttctggcaaatgagaggaaaagctttggtttagggtgttagggctgcaggccgacattttctggagaactchttaactttgcagaatgtgtcagaaaattccagggcatggagaggatgagcagctagccagcyttccctgtgacccggtcaactggcagagttagcaaataaaattgcagttaaatccaaactccagataaataaatatgtttttagtctaagtatgttacatacaatatttgggacataccgttctttttttgttgttttgtttttgttttgaggmtgagtctcactctgtcacccaggctggagtgcaatggtgtgatctgagctcactgcaacctccgcttcccgggtttaagcaattctcctgcctcagcctcccaagcagctgaggctacaggtgtgcgccaccacacctggctaatttttgtatttttagtagggacggggtttcmccatattggccaggctggtctcgaacttctgacctcaagtgatctgccctcctcggcctcccaaagtgctgggattacaggtgcgagtcmccgtgcccggcctgggacatactattctaaaaaaaaaaaaaaaaaaaaaaaaaaaaaaaaaaaaagtacttgttgtttatctgaaattcagatttagcagggcatcctgtattttatctgtagcccttacccagacagactttgcctctaagttatctaaacacacagagatctggatttaaacccaggcctgtactctgagcccatctcttgcctttgccaaaattcttcttgagagcatgaagtaaatttgtctgtttcatgtgtaatgatacttaatgcagttttaccacatgcaaggcacaaggagggtaactgcccattctgacaatgcccaaaagaccttagaacatgaggacaggggccactctcccgcgaaggtggccctggccccaggcaggtccccaagagctggctgactggagtgtttggttgttttggggtagcgccatttctgcgtgtttgctgtgagcttccccgkccaggaggccctcaccaccatctacaacacaatcctgacgcagcacctggccttccgctcrgtctccatggctatccagaggataagcagccagctggtggccgcggccctgggtaagctggctggcctcatcccctctcccatcggtaaaacctatggctctgtgggctgatggttcttcacattttcccttgataaatattttatttayaattctaaatcaatatcttaaaaacgatgctatgtttcgacaggagaaattgtgaaatacaattgcttcatggggaggtaggggctaggaaattctatacacaaatgatttaaggagaacagcaaattycctcccacttcaaagagctgtgcagatttcttactccagttgtcaccatttcgtagtccattggctttagaaacttgaggcttgcacttcctggggccatcaagagtacatgagaattgacacgtccttttcctctaacagctttgcatcagaaaatcacggcaacatttcttcccacggccattaagtttcattatgtyttcaacctcagggacctctccaatattttccaggtactgctcttgtagctttatgtcatgcctgccttacggyccagtgcctgatccacaggtgctttcctcatcacagctctcagggaggtgtggactgatgatggtggtgatggtggtaatgataatgatgataataatggtggtgatggtaatggtggtggtgacagtggtagtgatggtggtaatggtgatggtcgtgatgatggtgatgtgatgatggtggtagtgatggttatgatgatagtgatggtgatgtgatgatgatagtgatggtggtgatggtgatgatggtggtgatgatggcaatagtggtggtgatggtaatgatggtaataattgtgatgatggtggtagtgatggtagtgatggtggtgatggtaatggtgataatgattataataatgggggtgatgacggtggtggtgacagtggtagtgatggtggtaatggtgatggtcatgatgatggtgattgtcatgatggtggtgatgatagtgannnnnnnnnnnnnnnnnnnnnnnnnnnnnnnnnnnnnnnnnnnnnnnnnnnnnnnnnnnnnnnnnnnnnnnnnnnnnnnnnnnnnnnnnnnnnnnnnnnnnnnnnnnnnnnnnnnnnnnnnnnnnnnnnnnnnnnnnnnnnnnnnnnnnnnnnnnnnnnnnnnnnnnnnnnnnnnnnnnnnnnnnnnnnnnnnnnnnnnnnnnnnnnnnnnnnnnnnnnnnnnnnnnnnnnnnnnnnnnnnnnnnnnnnnnnnnnnnnnnnnnnnnnnnnnnnnnnnnnnnnnnnnnnnnnnnnnnnnnnnnnnnnnnnnnnnnnnnnnnnnnnnnnnnnnnnnnnnnnnnnnnnnnnnnnnnnnnnnnnnnnnnnnnnnnnnnnnnnnnnnnnnnnnnnnnnnnnnnnnnnnnnnnnnnnnnnnnnnnnnnnnnnnnnnnnnnnnnnnnnnnnnnnnnnnnnnnnnnnnnnnnnnnnnnnnnnnnnnnnnnnnnnnnnnnnnnnnnnnnnnnnnnnnnnnnnnnnnnnnnnnnnnnnnnnnnnnnnnnnnnnnnnnnnnnnnnnnnnnnnnnnnnnnnnnnnnnnnnnnnnnnnnnnnnnnnnnnnnnnnnnnnnnnnnnnnnnnnnnnnnnnnnnnnnnnnnnnnnnnnnnnnnnnnnnnnnnnnnnnnnnnnnnnnnnnnnnnnnnnnnnnnnnnnnnnnnnnnnnnnnnnnnnnnnnnnnnnnnnnnnnnnnnnnnnnnnnnnnnnnnnnnnnnnnnnnnnnnnnnnnnnnnnnnnnnnnnnnnnnnnnnnnnnnnnnnnnnnnnnnnnnnnnnnnnnnnnnnnnnnnnnnnnnnnnnnnnnnnnnnnnnnnnnnnnnnnnnnnnnnnnnnnnnnnnnnnnnnnnnnnnnnnnnnnnnnnnnnnnnnnnnnnnnnnnnnnnnnnnnnnnnnnnnnnnnnnnnnnnnnnnnnnnnnnnnnnnnnnnnnnnnnnnnnnnnnnnnnnnnnnnnnnnnnnnnnnnnnnnnnnnnnnnnnnnnnnnnnnnnnnnnnnnnnnnnnnnnnnnnnnnnnnnnnnnnnnnnnnnnnnnnnnnnnnnnnnnnnnnnnnnnnnnnnnnnnnnnnnnnnnnnnnnnnnnnnnnnnnnnnnnnnnnnnnnnnnnnnnnnnnnnnnnnnnnnnnnnnnnnnnnnnnnnnnnnnnnnnnnnnnnnnnnnnnnnnnnnnnnnnnnnnnnnnnnnnnnnnnnnnnnnnnnnnnnnnnnnnnnnnnnnnnnnnnnnnnnnnnnnnnnnnnnnnnnnnntactctgagtcagagattgggtttggccccttacattcccattttctccttctccaacaacacataagtttggtgcttatatccccattttactgagcaggagtttgtggctgagggaggctaagttatgcccacctcctcccacgtaaagtatcagcccagccgggtgcagtggttcatgcctgtaatcccagcactttgggaggccaaggcgggcagatcacgaggtcaggagttcgagaccagcctggccaacatggtgaaaccctgtgtctactaaaaatacaaaaattagctgggcatggtggagtgtgcctctgtagtcccagctactcgggaggctgatgtgagaatcacttgaacccaggaggcagaggttgcagtaagctgagatcgtgccactgcactccagcctgggcaacagagtgagactacatatcaaaaagtatcaataaaaaaaaaaataaagtatcagcccaaatgccatgctctcacagaggccactcctcagccctcacactctgtcttactgccctgggtttgtcattcagagcatacaccatagtgtgcaattaccttatttctttgtgtacctggccacctcccccgctagcatgtcaactccacagcgtcaggttctgttgcatcatcgctgtgcctgggaaattccaggccctcaataagctcttgtcgagcttgcctagagtcacttgcttagtaaatggccaagccaggactggaccagataggcttgctgtggtacccaagcttgtgacctgccctrtggcatcggtcacctgctttcctttgcaattagcctcccttgtccctcctccaccattcactcttctggaggatgaggccccaaccctgtcctatgaggaaaactccacatctctcaggacacacacacacactggcatccgggatttttgggacctcygtgatgagtggcttccctggccccargtgaatgctgtgccaacagctgaacaggtcccctcrccccgggggagggggctgctcctcagggtcatctgtgtccagctctgggctcgccttcrtaacagctgacggtgctgatcatccygtgtttggggcagggactcttattttccacagcagaagttctgaaaaccccactggacctygtccgcctttggctacatgagactgaacgagtgtatggtgacaaaatggttgacgaaaaagaccaggaaacattgcatagagtcaccatggcctccaccaagaagttctttgatgtaagtcaagctgcccagtccctctgccgagcccagaatggctccaggagggtggagtgtcggcggccaatgagaactgcagccctctcagaagggccctttgttgggggtgggaagatccgtgttaggttccacgcgatcattccagcaagtggctgtggatcggttccacgcgataactccggcacgtggctgtgggtccgagggttccacgygataaytccggcacktggctgtgggtccgagggttccacgygataaytccggcacttggctgtgggtccgagggttccacgcgataactctggcacgtggctgtgggtccgagggttccacgcgataactccggcacgtggctgtgggtctgagtgaggaggaattgagtgctcagtagatcagggtgtgatcacctccctctgtccacttggggtggagaaaggccctgcttggctctgtgtgcctcgctggtgtgtcccrtgtrttcttggtggaatcatttctttggactatgaattcatttctgatacagtggggatcagaccctcccactctaggaaattttgccccagtggtttgctgggcccacggcagcaggtttgggcccctggagacttggcctgggaccccgtggtgacctcctaggccaccttggcaaagtactgaattgctgttaactatctgtgtggtcatggtggcaaaaaccggaagtatcgtctttttttttctttttctaggatcttggtgatgaactcttatttgccaagccaaatatcttctgccactttgctcaagggattggcgatcccaaatatgttcctgtaaccgacatggctcctctgaacaagctcctcgtggacgtcctggacagctacaatgaagttaatgcagtcatgaatttggtgagcaggctggagctgatagcaagggcacgggacctggaccgggtcaccctctccggttgcattatcgayayccgagtggcattgtgtggggctgcgtggcacacagtgcacacctcagcatgtgcagagtccgtgctggtgacagaggtgrttccaggtgctacaagatgttgtgggatctctccggtttctgcaggtgctgtttgaggacgccgtggctcacatctgcaggattaatcgcatcctggagtctccccgggggaatgccctgctggtgggggtgggcggcagtggcaaacagagcctctcccgcctggcagcgtacatcagcgggcttgacgtgtttcagatcaccctcaagaagggctacgggatccccgayctcaaggtgagagcttactgttcaataggctscctttcagggtagggtcagggagtaaagaaaaacttcactcccttttccaaaatgaagccagcgagtacagggaatccgagcatcaccaatagtccttatccaaagggtctttatcttagaaagcagaggccagaaaaccttccagccagcgtgcgtgcccgtgtgactgaggtgaagagtgtgaaaccttccagcccgtgtgactgaggtgaagggtctgaaaccttccagccagtgtgcatgtccatgtgactgaggtgaagcgtgtgaaaccttccagcccatgtgactgaggtgaagggtctgaaacctttcggcccgtgtgactgaggtgaagcgtgtgaaacctcccggcccatgtgactgaggtgaagggtgtgaaatcttccggcccgcatgactgaggtgaagagagtgaaaccttccggccagtgtgtgtgcccgggtgactgaggtgaagagtgtgaaaccctccagcccgcgtgactgaggtaaagggtgtgaaatctggccagtgtgactgaggtgaagggtgtgaaaccttccagccagtgtgcgtgtccgtgtgactgaggtgaagagtgtgtctgtcaactactcgatggacacaagtccacagaatcaacccagatcacagaggcagagaggttggatccctgcccttggtcactgagtgttycaaattgttacctattctctccagactacagaattcagagccatgactgggtgtctaactgcatgcctgagatgctgaatggctgcttttggaatgaatgaaataaacattagactaaacataaggtctcccatgcccaacacacactgctgagggtttttattgatttcttgttcctgaaaatctgctctcccaggcaactgcgtgccattagttcagaaggaatcatcgtgcttgagattagacctgaaatcgattgggccgtcctacacrgccatgccttctctgtgtgctggggccgctgttgtggggccaggacgatgccagacccaagggggaacctaaggggaccctcccgcagtacgtggccctcagacagtcgctgggctggtggctttagcaggcagacctggagccagtgatgctgggagcagtgggaggtgtctgcaggcagagaccctggaggggcagtgcaggctgtgccagggacggccaacctctgggagagcctccagtttctggctggctgttctctgccttcccagcagattctactccatgtataaaggggccggcctgctcttttttgaactcctcagatgggcactcctgaacacagccctgtcctctggacccatgagcggtagtgtgtcatgggttctcagcgcatctgatggagttagttcacattggtatctgcggccactcaagtgtcatttgaacctggagccgtatggttttactgagctttctccattgaagtctctagtctattaactaaatcaygttggtttacgttcatgacggcatcgtttccttgctctgcgtccctgcggggattttctccctgatccttcctgttggggctgattgtgggtgctcagcctcagcctcagcctcagcggtactattttattcatcagctgctgtggctctgtgatctgggctgtggaatttcactgtccctgcacccatcacaaatcagctttgctatcactgtcatttcttttttttttttttttttttttttgagacagagtctcactctgtcgcccaggctggagtgcagtggcgcgatctcagctcactgcaagctccgcttcccgggttcacaccattctcctgcctcagcctcctgagtagctgggactacacgcgcccgccaccacgcccgtctaattttttgtatttttagtagagacggggtttcaccgtgttagcctggatggtctcaatctcctgacctcgtgatctgcccgcctcagcctcccagagtgctgggattacaggcgtgagccactgcgcccggccatcactgtcatttcttaagccgcttctgtggattcagaactaagggcagaggtaaacagggctataagttcctgaattgtattgggggagctagactcctgagccattcgacatgattatcgttctaatggtgctgccatagtaataggctcacccctatgggggtaacatatatgtttgtgattatgtaatattataaagtaggtcccggaagctgtggcacctgctggaggctaggggtgcacaggaaaggggtggagggtggaccctggaggacagtgtgccgtgtgaaaagccctgggcttggtcccaagaaaacgagactacatcaagatgtctgatcaggggatagagcgggcaggatgtggtagtgttctaggacacaggaaggatagtttgaaagcacagaaactgctgaagggtgacctgggtggagctggggcacaagctctgtgaccccacaaaggctgaaagtgggcaggtgcgacgagaagggagaacggagggggaggggaaaccagggccagygagggctgtgcctgccgagacagcgtgcgtgacctcggggactcggctggggtccaggatccgaaaccttcaggtgctaccccagctcccctccccacaccccacacacagcccccggggccaggcggtggggagtttttatttctgtgaaaccttcaccccagcctgagtcagcagccagagctgggctgccccatgaagaaagcctgtcagcagaatgaggggccgtggtctcagcggctcaggtccccgcctccccgccagcttcctgcaaatgagagggaaggggtgagaagcagccatcgggtggggtgggggcttggcctcatgttattctcagggaggaggccttgctgcgtgtctcgcacccgccactcccaaatcctaaccctaatcctcgcacccccattccctaaccctaaccctcgcacccccactccctaaccctaaccctcgcaccccyactccctaaccctaaccctcgcacccctactccataaccctaatgtctcacacacccccactcccaartctcggctccstgtcctgcctgtctactgccagtggcattggctatggcaaggaaaggcactgctgctgatgttttggccaaagaaagggaagcctgtgccccttattaatggctggtccctagacgggcctagatacaggtgacgattgccgtccttggctgacagtgatgatagggacgcaggcagatccagcttcagtagcaccatggggctctcaaccaagataggagggagggtgggggagaactgccctggggccaggccyggaggagatgagatacctggggatgaggcggccatcgcacagcgggacacatggggctgggaagtgcagggayaggatgcgggtagagatgtgggggccagcctcagcagcataagaggacgggagtggaggggactgtgccagagagtgagcggggaaggtgaggtggggacagcccagcggtcacagtgggcagggtaagggccactccatatgggacagtgtggctgtgaaagccagacgggccgggagcggtggctcaagcctgtaatcctagcactttgagaggccaaggcaaggaggatcccttgagcccaggaggtcgaggctgcaataagctatgatcatgccactgctctccagcctgggcgacagagtgaggccctatctctaaaaaagtaaagtcagaaaaaggaacaaaaaaggaaaagatttctggtatggtcagtctccacccaatgtccttgctacactgtgaaatgagaagagtgattcgtctttgactcaaggtcattgctggctctcacactacgctccttacctcgaggcagggtccaaggacatagccttggctcaagtcccacctgcggcccacctgctgcccacctgcttttccaggctcagagcttccccttgctttttcttagcttgtcaagagataggagatttgaggctggcttctgaccccagtcagctcccaaagaggaggcctggtgaggtttctctgaacagagagatttcagggagtcggacttgcttccgaaggatggagcagccactggggtgcctatatggacacttttaaagcctcttcaataagtacagaagcccataggtcttgttttttaaattaaatattatagataagcaaatcgccaaaacgctggaaatacacatcactacttggatgaaactggcaggcatttctgaacatatatatacatggaaatggcatattcaaaaataacgagctattcctactgctctgtaaaatgctttaaaaaaaacttttcatttattcttgcaaaattcctatgaaaccatcttctcgccctgtccttaaatcctgctgtggatgactctgaaagggggttgcctgttaaggctcccagtccaagcctgcagtatatttattcagggcctcttttagggtctccatttannnnnnnnnnnnnnnnnnnnnnnnnnnnnnnnnnnnnnnnnnnnnnnnnnnnnnnnnnnnnnnnnnnnnnnnnnnnnnnnnnnnnnnnnnnnnnnnnnnnnnnnnnnnnnnnnnnnnnnnnnnnnnnnnnnnnnnnnnnnnnnnnnnnnnnnnnnnnnnnnnnnnnnnnnnnnnnnnnnnnnnnnnnnnnnnnnnnnnnnnnnnnnnnnnnnnnnnnnnnnnnnnnnnnnnnnnnnnnnnnnnnnnnnnnnnnnnnnnnnnnnnnnnnnnnnnnnnnnnnnnnnnnnnnnnnnnnnnnnnnnnnnnnnnnnnnnnnnnnnnnnnnnnnnnnnnnnnnnnnnnnnnnnnnnnnnnnnnnnnnnnnnnnnnnnnnnnnnnnnnnnnnnnnnnnnncggcctgttttttaatttttttttctaagacaaatagacattttcggctgggcacggtggctcatgcctgttatcccagcactttgggaggccgaggtgggcagatcacttgaggtccggagttcaagaccagcctggccaacatggtaaaaccctgtctctaccaaaaatacaaaaattagctgagcatggtggcacatgcctgtaatctctcaggaggctgaggcaggagaactccttgaacccgggaggcggaggttgaagtgagccaagatcgcgacactgcactccagcctgggcaacagagtgagagactgtctcaaaaaaaaaaaaaaaaaaaaaaagagtaagacattttcaccacttttaacatctagttcggtggcatgaagcacattcacactgttgtgtgaccatcaccactgtccctctccaggaccctttcatcttcccaaacagaagctctgtctccattaaacaactccccattcccccagccccgcccctggcaacctccattcttctttctgtccctgactttgactactttagggacctcatgtaagtggaatcacacggtatttgtcctttcgtgtctggcttattttactcagcgtcatgtcctgaaggtctgtccgtgctatagcacgtgtcagaatttcctcccctttttaagaccaaatcatattccattgcacagatggaccacgttttatgtacctgttcatgcatggatggacacttgggttgtcctgatggctgctgtgaacctggctgtgctctgttcaaggttttgggtctcctgcacccttcttttattcttttccttagagacaaggtcttgctatgttgctcaggctggtcttgagctcctggcctcaattgatcctcccaccttggcctcccaaagccctagaattataagcatgagccaccrcacctggcctgtgtttcttagaaagttgtccctgtgggccgggcacagtggctcacacctgtaatcccagcactttgggaggccgaggcgggtggatcacaaggtcaagagatcgaggccctcctggctaacatagtgaaaccctgtctctacttaaaatacaaaaaattagccaggcgtggtggcgggtgcctgtagtcccagctactcgggaggctgaggcaggagaatggcgtgaacctgggaggtggagcttgcagtgagccgagattgcatcactgcactccagcctgggtgacagagcgagactcagtctcaaaaaaaaagaaaaagacagaaaaaagaaagttggccccatggcggcgtgtgcctgtaatcccagttacttgggaggctgaggcaagagaattgcttgaacccaggagacggaggttgcagtgagccgagattgtgccattgcactccagcctgggcgacagagcgagactccgtctcaaagaaaaaatggccctgtgctctggttggttgtggaggatgtctctaattgagcatctttttaccaaggcccctaagcgtgtcctcactccrtccagattgacctcgctgctcagtacataaaggctgccgtgaagaacgttccctyggtgttcctgatgacagactcccaggtggccgaggagcagtttctggtgctgatcaatgacctgctggcctcaggagagatccctgggctgtttatggaggaygaggtggagaacatcatctcctccatgcgaccccaagtcaagtcccttggcatgaatgacactcgggaaacatgttggaagttcttcatcgaaaaagtgcgcagacagctcaaggtggggctcccgtcttcggcagggcctcaagagcccagcttggtgcccgtggcctacagggtatgggtttttgctctgcatagagcaggaggactgatccttcatgggatgtgaaatcctgttaggagagtgtgaggggtggggctgtctgatgaaccggagcctggagactttttcacgtgggtcgttagaggtatcttggggccaaaagaaatgttttacagtcgtcctttggtatctgaggaggttggattccaggaccsccatggataccagaatccacggagggatggatgctcaaggscccgatataaaacagtgtcgtatttttgaagatgctcccctctactttaaatcatctctagattacttataatacctaatataatgtagaatgctatgtaaatagttgttatactatatttttatttgtattattttttattattttttttttaacaattttcagtccatggttggttaaatccacagatgtggacagacaaccgactctatgtggaccccctccccacacagctagtttaagtagataaatgcaccttgatactctctctctctttttttttttttttttgagatggagtttcacttgtcgcccaggctggagtgcaatggcgtgatcttagctcactgcaacctctgcctcctgggttaaaatgattctccagcctcagcttcctgagtagctgggattacaggtgcccaccaccacacctggctaaattttttatttttagtagagacagcatttcaccatggtggtcaggctggtcttgaactcctgacctcaggtgatacacctgcctcggcctcccaaagtgctgcctggccacaccttgattttcgacatcacctctagggtaagcaggctaaactcccctagtaggacagagaaccccttggacctattggccccgtcctctccagagttcagtggtgctgccctttgcggggtgccaatcccatagctctcctggacacctgccggccatcgttttcccctgcttgactcaaacagagcagggtcctccctcccctctgcgggctgcatagcccaattagtgaatgttatctgtgagccaaaggcatcccctgataggtgctgcctgctcctggatcctctttggtgccctgccagtgccggctctgtcctgcaccctcacgtcatcacgcagtgaggggtgcaaagtcagctaagcagtgagccaccccattcaatggcagcgtccgtgcaacacctatgccacgaaaggggactagagagcaagagcagctgggaggctgagacccattacaagggaggtccttatctagccagagagccccccaggcctgtctccacagcaccttctccagctgggatcccagggactccctgccctttctgggaattagccactatccctcagggcccagcggggacccttcctgctgaaccgaagggcttgggagcccggcccgttctggggcctcatctgcccaatgtggatgcccactccccattccttcctttgcccggccttttttagagaggcaagggccccttccagagggattgggactgctagcgagaggcatgaagccagatgagcatttatccacggcaatgcagcggccgcccttcaaacccagaaccaggactgtgctgcccaggccctgggcggctgagcccggcagggcgcgttgctttctggcagagctttctgcagagtgatggattaggycccagcactgcagtcccagtaggcagcgcatctgtgtctcccacacccaggtgatcctgtgtttctcccctgtgggctccgtgctgcgggtacgagccagaaagttcccagctgtggtcaactgcacggccatcgactggttccacgagtggccrgaagatgcgctggtgtccgtcagygcccgcttcctggaggagactgaggggattccggtgagtcactgaggccacctctgcctgagtgtagagcccagaggacaaggacaggcccaagggctggctccctgggagaaaagggcgctgggattagggtgagccaagtgaggcgtccgccttgggctcaacgtttaagaggctgccagaaactcaggcatcaagataagtgaggttttattttttattttttatttttttttaatttatttattttttattgataattcttgggtgtttctcacagagggggacttggcagggtcataggacaatagtggagggaaggtcagcagataaasaagtgaacaaaggtctctggttttcctaggcagaggaccctgaggccttccggccttcggcagtgtttgtgtccctgggtacttgagattagggagtggtgatgactcttaacgagcatgctgccttcaagcatctgtttaacaaagcacatcttgcaccgcccttaatccattcaaccctgagtggacacagcacatgtttcagagagcacagggctgggggtaaggtcacagatcaacaggatcccaaggcagaagaagttttcttagtacagaacaaaatgaaaagtctcccatgtctacttctttctacacagacacggcaaccatccgatttctcaatcccttccccacccctcccgcctctccattccacaaagccgccactgtcatcctggcccgctctcaatgagctgctgggcacacctcccagacggggtggtggccgggcagaggggctcctcacttcccagtaggggcggctgggcagaggcgcccctcacctcccggacggggcggctggccgggcggggggctgaccccccacctccctcctggacggggcggctggcctggcgggggctgaccgcccccacctccctcccggacggggtggctgccgggcggagaggctcctcacttctcagacggggcggttgccgggcagagggtctcctcacttctcagacggggcggccaggcagagacgctcctcacctcccagacggggtctcggccgggcagaggcgctcctcacatcccagatggggcggcggggcagaggcgctccccacatctcagacgatgggcggccgggaagaggtgttcctcacttcctaggtgggatggcagccgggcggagacgctcctcactttccagactgggcagccaggcagaggggctcctcacatcccagatgatgggcggccaggcagagacgctcctcacttcccagacggggtggcggccgggcagaggctgcaatctcggcaccttgggaggccaaggcaggcggctgggcggtggaggttgtagcgagccgagatcacgccactgcactccagcctgggcaccattgagcactgagtgaatgagactccgtctgcaatcccggcacctcgggaggccgaggctggcggatcacttgcggttaggggctggagactggcctgggcaacacagcaaaaccccgtctccaccaaaaccagtcaggcgtggcggcgcgagcctgcaatcgcaggcactgggcaggctgagtcaggagaatcaggcagggaggctgcagcgagccgagatggcagcagcacagtccagcctcggctcagcatgagagggagaccgtggggagagggagagggagagcgataagtgaggttttaatgtaatatttttgaaaatcaaattagcgctaaaaaattcatgatgaacaaatcatcagaattgtaaaccaaggtggrctgttgggtttttttgtttcattgtcctgcaatcctgtgccagggaggggtggtttccaatcagccccggcgcagccaaggctccagggccagttcaggaaggctgaggacatgcagcgtgcggacagatcgggcgactcaggctttctgccttgcctcgagcacttggctggaaagcctgtatttgctggaataagtatacacaagggcacacaccattgccttgtgcacctcagaggaaagacgggtccgacattctcttgcagtctcttttcattgaaagatggtgccgagggctgggggcagtggctcacgcctataatcccagcactttggggggccaaagcgggcagatcacttgaggtcaggagttcgagatcagcctggccaacatggtgaaamcccatctctaccaaaaatataaaaaattagccgggtgtggtggtgcatgcctgtaatcctagctactccagaggctaaggcaggagaatcacttgaacccgggaggcggaagtttcagtaagccaagattgtgccactgcactctagcctgggcaatagagcaagactccatctcaaaaaaacaaaaaacagtgaaagatggcgcccatgttcactgtttgagctcaatgcttgcctggaaattacccataaaccctggctcacttttgaccaactcagtaggggggatgagcagcccttggaataaacctccctttattaccatctcttgtttcttttgaacacatatccagttattaagtaggacagaataaacctgaaactagcttctctttttcctagtttttaaagatgggaaaaagagcctacttgccattagagcattcatttatgagactggccactcccaggaactctgcagttcaaaggtgtcccttggagcatagatttgggtttctagttcccaaggcagagacttcctagaaacaggcattggccccaccaccagcactatatatatataccctgaaatgtctgtgttggatgaattcattacttttcaaaatgtcctgaattaaaattaacattgctgagacaatttctggggcaaagctcccagtgcctgcgttcaggtaggtgggcaggcccagagggctggggaaagaagttctaaatcccaggacccagccttggtaatgaacaataaatatttgcagaattacctgggatatgaaaacacattctcagccttgtactttttcaggtatgcaggtatgtgaatgcacatgcacgtgcatataggcaggtatgtgaatgtgtgtgcatgtgtatatgtgcaggtatgtgaatgcatgtgcacgtgtacatatgcaggtatgtgaatgcatatgcacgtgtatatatacaggtatgtgaatgygtatgcacgtgtatatatacaggtatgtgaatgcgtatgcacgtgtatatatgcaggtatgtgaatgcgtgtgcacgcgtatatatgcaggtatgtgaatgtgcacatatacgtgtgtgtgtatgcatgtgtgtgcatgtatgcgtctgtgtgtcagagataatgataataagctctgctgtgtcctgtgcgctgagctaaacccttccatggtgcagtgcycacaagggccccaggatctgttgctctcaggagcccctttgggcagttgaagacactgaggttgagagcggtctcagggcaccttgtccagggcccctggtgagtctggggagccccactttgctgatttgcaggatggggtcccagggatgactggctgtctcatctttgtagtgggaagtcaaggcctccatcagcttcttcatgtcctacgtgcacaccaccgtcaacgagatgtccagggtatacctggctactgagaggcgctacaactacaccacacccaaaacctttctggagcagatcaaactgtaccagaacctgctggccaagaagagaacggaacttgttgccaaaatcgagaggctggagaacggcctgatgaagctgcagagcacggcttcccaggtaggagaggggggytggcygccagctcctgtgccgttccctggaggcctcgcaggagctgctactgtcasaggcatccacrggctggtcacactggggctcagcactgcctaaagtaagatgagcacgcttcctgcctttgagaagcatttactcctaggccagagttagtatacttgtcgtaacaaaaaacagactcaaaatgctttcacaatgttgattgtatggagggcgcattacacaggggatggcacctgccccatgtcgggtgagatttgatcatcatgcccaatgcagtcaatacaaatgcatttgttcattcgtaaataccattcataccatggggcctggctcaaaaacctccctggatcctttcctccacaccgtatggatcttgaagggttctgcctgcttcagacctcctccatcgtgcagtcccggctccttcatctttattgcccaccattgacaccctgtgagggggcctgaaaatagctgccacctccctgctggagttgtgaacagactgggacctcccacttgcttccaggggagctttcgcacccctgcccccacccccccacccccctaccaaactctcgctgtcactctcccaccagcctggaggggccctggccagccctgctcggcactgcaactcacttggcatttgagacagagtctcrctctgtcatccaagctgggatgcagtggtgcgatcgtggctcactgcagcctggacttcctgggctcaagtgatcctcccacctcagcctcccaggtagctgggaccatgggcacaggccaccatgccttgctaattttttttattatttatacagacagggtctcactcggttgcccaggctgcagttgatatgtttctattcagtcaccttgccaactcctttgagcaccaggaatgtctcatacttgtgaccctgtgtacgcagtcagggtttataacttacttttaagatattgaaaagactctccaaaacgagtcactgggagtsgtaagacacggccctgccgttctgcccctctgtggctcccagccctcgtctgcccagtgcagggcggygtgtgtcggctgcggcccacacttgctgtttctcggtttctccttccccaggtggatgatttgaaagccaagttggcgattcaggaggctgagctcaagcagaagaatgagagcgcagaccaactgatccaggtggtcggcatcgaggccgagaaggtcagcaaagagaaggccattgctgaccaggaagaagtcaagrtcgaggtcatcaataaggtaggtgaaggcagcccagcgtgccttcaggaaggctgctgcactggccaggcctcctgggcttccmcgtgtggtcaggtgccaccgacaggcgtgggaaaggctgagacttacatagaaggacaaggttcctaaaccagtgggacccccgaaggagtctctcccaggggagggcccccgctcagaagcaggctttccttagaaaactcccatcccgtggccgagctcctccatgttcagcccccagcctacagcggcagcctcaccagaagcttgtgagaaatgcaggctctcgggctccagctcagctctgctcaatggggcctgcatggtaacgaaatgcccgcgatccgtgagcatgggaggggttgagaagacctcactggagcctggtcctcagacgtgcggctccgggccccccccgagagggtaggacgttactggcctgggggtgggctccttgctggttgggggtggctgaggttgagaaccacggcttagcgggagcgtcttcatcatctttggagcctgaaggttacagcatcattggagcagcttctcatgayccctccctgggtgctttttttgtcatcagtcctacatctgtgtaattattgaagagcgttcyagtcatggcccactgtctcctgagtgaatgaatgagtatgtrcatgaatgaaggaggtgctactttcttagaggggtgtgagctatacactctgagacgttccattttggatggattatgaaacagccccagaaacaataagactgcaaagtcaaggcggtctcagtggcccccggatttcccctccagtcttggaagctcaagccgatagaaggaacagttcccattccagaatcccacccaactgtcgaggcattgctcattctgacctgagcgttgtggggcagagtagaggcgtcagggaggaaggtgggctccagacaggggccaagcacacacacagggatgtcggcaaaggagcacattcagcaaatacagcaaatgagtggtggccggaggggcagcctctcttatggagctcagacctgctggggcctgggccgcccctcaccactgctgcctacacatgcacatatgcmcatggatgcacatacacatacatgcacacacatacactcatgcacatatatgcacacatacactcatgcacgtgcatacatgcacacacatgcacacacatgcacacacatgcacaccgtacacgcccccacaggcacatggacaggcctgcagtaacctctcctgtccrtcttccttccagaacgtcactgagaagcaaaaggcctgtgaaacagacctggccaaagcagaaccggccctgctggcagcccaggaggctctggacactctgaataaggtaaagggggagggaaagaaaggggacccctggcctggttggagaggaagctgccttcgctgttggcgtgggtggtgacacactcatggcggcttcttcggggcatcaycgaggacccggtccaaactcccatcggacccatcccgyctgtcatttgcagaacaacctgacagagctgaagtcctttgggtcyccgccggatgctgtggtcaacgtcaccgccgccstcatgattctgaccgcacctgggggcaagatccccaaggayaagagctggaaggcggccaagatcatgatgggcaaggtggacaccttcctagactccctgaagaagttcgacaaggagcacatccctgaggcctgcctgaaggccttcaagtgagtcggggctgggcctcgtagccggggcttccctccgattctccatcaggccaaggcacgatgctgaggtgaagcatggcctcaggctcttggggcctgtggctcaaaatctaggcagccccttccccatacagcaccccaagaacacagctgacaagctcagcagcgggaaccttcaggctacaggtctgagagagaggccagccaggccccacagaggtcagcagcacctgtgagagcagctgaccacacgagcacatgcattgcacacacgaataccgtccccaaaatgtaacacctgccacgtcatctcgtctgcatctcatccctctaaccttatagtttcagtctcctggtgcccgacttggaaaactgggcaatgccactgtggggtaatgggagtgggagagcagagccggtggggggtggcctctagggccagcctgactgtgtgaatcccagcrctgcccctccagagctgtgccaccctgggcaagacactcagcttctctgggcccgttttgccagagcaggacagggtgacgactccggccctctggttccctcgctaggccctaccaaggcaacccgacgttcgaccccgagttcatccgctccaagtccacggcygccgccggcctgtgytcctggtgcatcaacatcgtccgcttctacgaggtctactgcgacgtggcgcccaagaggcaggcactggaggaggctaatgcagagctggcagaggcacaagagaagctgtcccggatcaaaaacaagattgccgtaagtgccggctcgctcccgtcccygcgaaacaccagagcygcttgctcgcgctgccagtcaatacctctgttgaaaatgggttggcacrgcccgccgtcatgaattattcagcagtgcaagaggatgcaggcagaggcaggggccagatggtgccgggagccgcttggtgtccttagcctccatgctccagagggctctcagcctttgtgggagcctcttccacgctcagcgctcacagggcccagccctgctgccgctgcagggggctagagatgcctcgtggggttttccagcagctttccaacttggttttgcaggaacttaacgccaacctgagcaacctaacctcagcgtttgaaaaagcaacagctgagaaaatcaagtgtcagcaagaggcygatgccacgaacagggtgatcttactggcgaacaggtatcagctcctccccgagaccaccctcctgctctcagaccccytgaaagggacaagcccacacaactgccttgggaggaagaggagggagcccaggtggaagcagccaggttgccactttcacttcttgagctcaaagtaattaggataaaacttggcctcttgcatagtcagtggcctccacaaaatatgccctgtcgcgtggttccaagtaacccacactggcctgggacactgggtcccacggggcttgatccggggcatkactcggtcataacccactttcagccaccacgtggcttccaggatcctttcgcagccagtggacagtcatttcacggattacatcatggtttggggctccagagtagcgtcgtccactagggatataatgccaggtgccagatgtggatgtgtcaccttaacttttccagcagccacatttaaaaagtacagaggctggctgggcacagtggctcacgcctgtaatcccagcagtttgggaggccgaggcaggcggatcactggaggtcaggagttcgagaccagcctggccaatatgacgaaaccccatcttactaaaaatacaaaaattagccagactagctgggcgcagtggctcacgcctgtaatcccagcactttgggaggccaaggtgggtggatcacctgagaacaggggttcgagagcagcctggccaacatggtaaaaccctgtctctactaaaaatacaaaaattagctgggtgtggtggcagtcgcctgttatcccagctatttgggaggctgagggaggagaatcacctgaacccaggaggcggaggttgcagtgagccgagatcgcgccattgtactccagcctgggtgacaagagtaaaactgtctaaaaaaaaaaaaaaaaaaaaaagccaggcacggctgtgcgcacctgtagtcccagcacttggagggctgaggtgggagtttgaaaccagcctgagcaacatagtgacaccccatctctacaaaaaaattttttaagtacaaagaaacagttataattttatttaaccccaaatatccaaaatattatttcaacaygtaactaatataaaaattatcaatgaggtatttcctgtgcttgttttcatcctgagccctgacaccctgcatgtctttttttgtttttttgttttgttttgttttgttttggagacaggggagtctcactccgtcacccaggctgcagtacagtggcacgatcttggctcactgcaacctccatctcccgggttcaagtagttcttctgcctcagtctcccaagtagatgggaccacagatgcgtgccaccacacccggctaatttttgtatttttagtagagacagggtttcaccatgttggccggggtggtctcgaactcctgacctcaggtgatccacctgcctcggcctcccaaagtgctgggattayaggcgtgagccaccacgcccggccccttcatgccttttaacacagagcacatctcagagcagacctgccgtggtcccagtgtttgggagccccagggctggcagctgcctgctgaacaacaggggagtgtgcctttcctgttctcacaggggagcacccggagcctcagcagagcctggggctgagtctgttccaggccygcaagctgtgttttctcctcccaagtgggtggctgccactgatgggccagttgtcagctgtgagtgccccaggctgcatgaggctggtcttcagggtggtgccccgggtatgagggatttaacctcacctgccaaatcgaaatggtctctaggtcactgggaagtaagggctgctcagatggtgccacagacagaccctcagtggctctaacaggcaacctggacttgcaacaaacatgccaacactttcagacccgtggtgtgcctctgagggttagggaccagtcctcaagatggtggcccgagaagcacgaggcgcatcgtggagtccccattccatgcagggccaggtgccttctggatgccacattgttctgtggccaccgtggtcctcacccgggctctgtcaccagctggtcgagacagtgctctgtggtatctggcagcatcttcagcacaggagagaggcaatcaaatggcatcagccatagccgggtgtcaatgtgggcaacttgggtgtcaatgcgggtgacttgggaagaggaaacacagcattcctaagggctgccaaggagttttttgtttgttttattttttgtttttgtttttgttttgagatgaagtcttgctctgttacccaggctggaatgcagtggcccaatctcggctccctgcaacctccgcctcccgggttcaagcaattctcccgcctcggcttcttgaatagctgggattacaggcatgggccaccacgcctggctaatttttgtatttttartagagacggggtttcaccatattggccaggctggtctcgaccccctgacctcaagtgatccacccgcctcagcctcccaaagtgctgggattgcaggcatgaccaccacgcccggccacaaagcatgattcgggcttctctaaagcatttcctcccaaaagcattttcatcattgagccactgagccaggtgcagacgggaaactctgaagattcacagaggtgcagaggtggaggcttgtctggtccagtcccctcacttgtgcaaatatgttttattctctctcatcccacttyaggctggtcgggggattagcatcggaaaacatccgctgggctgagtctgtggagaacttcaggagccagggggtcacgctgtgtggggacgtcctgctcatctctgccttcgtgtcctacgtgggctacttcaccaagaaataccggaatgagctgatggagaaattctggatcccttacatacataacttaaaggtaaggagtggagtcctggccaggcgcggtggctcacgcctgtaatgccagcactttgggaggccgaggcgggcggattacttgaggccaggagttcatgagcagcctggccaacatggtgaaaccccatctctattaaattwaaaaaaaaattagccaggcttggtggggggcgccttaatcccagctactggggaggctgaggcaggagaatcacttgaaccttggaggcggaggttgcagtgagcagagatcacactactgcattccaacctggacgacacagcgagaccccatcttaaaaaaaaaaaaatggagtcctactcatcactcgggaaatgtggggaggtcccagcagggcagaaccagccacatggcaccttgacttccgtgatgaggctcaggcccctttggggatgagaatgtggcccagtggcattgcatggtggctcacgcctgtaatcccagcactttgggaggctgaggcaggcagatcacctgaggtcaggagttcaaaaccaacctggccaacatggtgaaacctcgtctctactaaaactacgaaaattagctgggcatggtggcgggcacctgtaatcccaactacccagaaggccaaggcaggagaatctcttgaactcgagagacagaggttacggtgggccaagatcacaccactgcactccagcctgggtgacagagtgagactctgtcaggggaaaaaaaaaacgtggcccggtgttgctgtgctgacatcgtttctggccgagttacaaagctgctctgtccagagtgatggaaatggctggcttctcccaggtcgtcctgctggtccacccctaaccgcagcaccagacagagcattatttggagagctattttctagtaagtaataaggtcgcattaccccctctaagaaagtgtgcctccctgggcaggtccccatcccgatcacgaatggcctggatcccttgagcctgctgacagatgacgcggacgtggccacctggaacaaccagggcctccccagcgaccgcatgtccaccgagaatgccaccatcctgggcaacaccgagcggtggccgctgatcgtggacgcccagctccaaggaatcaagtggatcaaaaacaaatacaggagtgaactgaaagccatccgcctgggacagaagaggtgtgtgcgggcgcaggacctgggccgaagcccggctctgcttggaagcacgccttaggcattccatattggttcaatggatgggtgggtctttcaatacaagtactagcccacaggttttaaatctggcctggggaacagcagcagtagtaaagaatgaaatgaggagctcttttcccttcccctgtccccatcacctgctgctcctgcagggaaaggagagtgagacggaggctcaggcctggggttgcctcccgcttggccatttgctggctgggaggtttgaggctggtcatgttcctgggtctcgtggtctgtattctcatcacagttgagaaacaatggctataacgacacaggtacagtgatgccctgcttcctagcggtgctggaaaatccaatggcgggtggatatgaaaacatttgtctctgtggccataaagctactcaaagctgcttccagcccgggtgtggtggctcgtacctgtaatctcagcactctgggaggctgaggaaggaggatcgcttgagctcaggagtttgagcccagcctgtgcaacatagtgagaccttgtctctccaacaaaaaacaaaaaacaaacaaacaaaaaaaacctagttgggtgtggtggcatgagcctgtagtcccagctactcaggaggctgcgatgggaggatcacttgagcctgggaggtcaaggttgcagtgaaccctgctcatgccactgcactccagcctgggccagagaatgagaccctgtctcaaaaagcaaaactgtttccattttcatctccactcccataagagcacgggggcagtttacaaagaagcccctcggctcctttcaggaaagggcgagctgttgggaacaagttgtgggctcctaggtcacccctcgcttggcgctgtctcgctcagagggcaggggctgctggtcgragcgtgcgcaccgttccatcacgrggccctctgccatgaaccagcttccgtgttgtgcccgcagctacctggatgtcatcgagcaggccatctcggaagggracacsttgctcattgagaacatcggcgaaacygtggaccccgtgctggaccctctactgggcaggaacacgattaaaaagggaaagtgagttgtttccgcctccgtggcttgagccaggtaaacatcttcaggcccgaggcctgggcgtgtgcatgtagagaaaacgcccggaatttcctttgcttccctggtaagcagcaagggctttgacaaagtgcctgctggtgggaaggaacccccagctcctgaggaaagactggaaagaggggccacttcccaattaggaatatctccgccaacattttatcagtgatggcctccagatggggaggcttgaaggtgatgtctgtcttcattctgttcttaggcattttgcaaatcttgggactgcattacctttaaaaattcacataacgtaaaattaaccacattaaaatacayaattgaagagcatttggtacactcacgatgttgtacaaacacatctgtccagttgcacattttcaccaccccgaaaggaagccctgtacccactcttcttcattcccctccctcctgagccctaacatccactactctgctctctgtgtctgtggatttgcctattctggacatttcctctgaagagaatcaagcaacatgtgtctttttgtgtctggctctttttactcagcattttttgtttgttttttgagatggagtctcgctctgtcgtccaggctggagtccagtggtacgatctctgctcactgcagcctctgcctcctgggttcaagtgattctcctgcctcagcctcccaagtagctgggattacaggaacacaccaacgtgcccagctaatttttgtatttttagtagagacggggtttccccatgttggccaggatgatctcgaactcctgacctcaggtgatccacctgcctcggcctccccaagtgctgggattacaggcgggagccaccgcgcccggcctttacttagcatgttttttggggtcatgcacgtggtcgcatgtgtcagtccttcattcctcttgatggcagaatcattttccacgtgtggccgggcgcattgtgtttgtccactcatcagctgatgcgtggagcttgcattattcattttacaattttaaaaaattaaatctactttaaaaatgtaaatgtcagagctgacaggagccacctttaaatgcagagatgcatgcagaaacccagaacccaggaggtggcaaatcaatatgcagaggtcctagactctgggaggggcctggtgtgagtgctgaggggtgaagctagccagaggcccctcaaagtgagcccagctacaaagaggggacagcagggtgtagagccggagagaagcgccccccacagtggatgagcagacccagggttgcagtcctgggagcttccagaatggacgaatgttgtaaatgagtctgggtggaggccaagcagaaggtttcggtcagggctcccaggggaggacagagtatcgccagaggggtgtaaaccctgctgcaaagatgagcctgatcacccaaggaaagagcaggtgcatctcccagaagggcccacgtcacaggccagggaggaggaacagacaaggagaggtgcagtgctcttccagggaccagaagggagggttcaaggtggcggcctggcctggggctggrgtgaaaggtggtctgtacttgtgttcctctcccctggtcactgggaggcccactaacyctttcctccaccaaccgccaggtacattaagatcggtgacaaggaggtggagtaccaccccaagttccgcctgatcctacacaccaagtacttcaacccacactacaagccagagatgcaggctcagtgcaccctcatcaacttcctggtcaccagggayggactcgaggaccaactcttggccgctgtggtggccaaagagcgcccagatctggaacagctgaaggtaatggcctgaagtttggtcacacgggaggaggtgccgtcccacacagagggggccaggtcactgtgagggtccccgaccagggctgccagtccagtgtgtgtcgttgcttctctctgaaggtgcctcagtgtgtcccacggcatcacagcttctcatacgacaggatggctcatttccttccccagctgtcccctcttcctgctcccaaatttaattctaagtcacatgacctctttgcttaaagaacatgagtcacagcggtcctcgggggctctaagctccaaagcgctgccctgcaagaatggcctggctgccagcccttgcacctgccacatttctggctgttatagccacttgcatgggctcaggaggcccaggcccgcctgtccccgttctgccycctacagtctccgtgacaggaagcctcaaggctgggagcagggccagggcctctctgaggttccaggggctctgcttctgcagccccttccaggacctgagctcgttcctcccgctcaaagcctgggccttggctcagctacatggccacctgagggaggcccgggtgcccggtggacagagccaggcaatgcagtgactcctgcacctccccttgcaggcaaacctcaccaagtctcaaaacgaatttaagattgttctgaaagagctggaagaytcgctcctggcccgtctgtcggctgcgtcggggaactttctgggagacacggccttggtggagaatctggagaccaccaagyacacagccagcgagatcgaggagaaggtcagagctgcctcggtgacgtgccctggcagccagggcttgggaggctgggccacgggcgatcggcgcctcccyaccatgagaaaggagaaaagcagcttcggtcatacgtgcccgagtgggcccagggcaggagaaggggtctgggctcccatcctgcacccagctgctgctgagagcccttgggtggcttcccagggagcgaggctggtggctgggaatgagcccacctgctcatggcactgcccatctgctgtgtcattcacaccccttttgtttgtgtcgaggtggtggaggcaaaaatcacagaagttaaaatcaacgaagcragagagaactaccgcccggctgcggagagggcatctctgctctacttcatactgaacratctcaacaaaatcaaccccgtctaccagttctccctcaaggtgcgccctgmagctggggctgggtgcctccctcaaggtggggctgcatctgggctccacagccaggcctgttgcccacacagccatcgggcagtgccagggccaccstcagagggcagacctggtccagcctgcagatggagctggaagagggggagccaggggcccccatcagtcctacacccattctccccaggagagggtatgagctgctccctcctccctgctcttcccctggtgcctccaggcactcacaacccaatcaaaacaaactggatggcctggcatggtggctcatgcctgtcatctcagcactatgggggrccgaggcgggtggatcacctgaggtcaggagttcaagaccagcctgaccaacatggtgaaaccctgtctgtactaaaaataaaaaaaaattagccaggtgtggtggtgtgygccttgggaggctgaggcaggagaatcgcttgaacactgcaacctccctcactgcagagggtgcagtgagccaagatcacgccactgcactccagcctgggcgacagagcaagactctgtctcaaagaaacaaaacaaactggaggccaccacaggtggcggggagtggtgaagggctccatctctgcacgcctccatggctctcggtggcggatccccaggccttcaacgtggtgtttgagaaagccatccagaggaccaccccygccaacgaggtgaagcagcgggtgatcaacctgacggacgagatcacctwctccgtctacatgtacacggcccggggactcttcgagagggacaaactcattttcctggcacaagttacrtttcaggtaatgtctagcctcactgttcctagtgtggtccgtggaccagcggtgtcactgacccctgggagctttgtggaaaggcagattgttgggcccccacccaaacctggtgatttcaaacccgcattttagcaatatacccaggtgattataaagtctgagatgcctgacgtggaacaggcctggggctctcctagttgatatttgggaagctggcacagtattccaatgggagctagtgaaggggtggtgttttaaggagaatttcacaaggaaattcattttacatgtaagttgtgctgagtaaatagtcctgcattagtgcttagcccactgtggggtgactgatgtttcttaagaaataagtgtatgaataaacaaatattcctcctgtttatacagccctgctaaaatatttaaagatctgcattctctgaaattgattaaacagcctgtcttaatttgttttktgckgctataacagaatacccaaggctgagtaatctataaacaatagaaatttatttctcatggtcctggggtctgggaagttccatatgaaagtgctggcatctggcaagggccttcttgctgtgtcatcccatggtggaaggctagagggcragagagagcacaaaacrggccaaactccttgtgtaacaaacccactcccttgatcatgacattaagccattcrctctgctgtcacggcccaactgcctctcagaccccacctcccaacactgttgcactgaggattcagtttccaacatatgctttttggggaacacattcaaaccatagtacagcccctctgcaatttcctttacactgtgccataagtatggttggaaacactagtttttgttgttgttgctactgctgctattttgagacaawctcactctgtcacccaggctagagtgcagtggtgcaatcatagttcactgtagccttgaattcctggactcaagcaatcctcccacttcagccgcctcagtagctgggactacaggcatgtgccaccatgctaggctaattcttcagttttttaattttttatttatttatttattttttagtagagacaaagtctcgctctgttgcccaggccggtcttgaactcctgggctcaagtgatccttctgcctcaacctccctgtagctgggaatacaagtgtacactgctgtgcctagctaatttttttttttttctgttctggtttttttgtttgtttgttttttagacggagttttcctcttgttgcccgggctggggtgcaatggtgcaatctcagcccaccacaacctccacctcccgggttcaagcagttcccctacctcagtcttccgagtagctgggattacaggcatgcaccaccatgcctggctaatttttgtatttttagttgagacggggtttctccatgttggtcaggctggtctcgaactcccgatcttaggtgatccactagcctcggcctcccaaagtgctgggattacaggcatgagccaccgcacccggccctaattttttaaaatgtttttaaagaaacagggtcttgctacattgcccaggctgggcaacactaattgtataaacaggttgggcatcagtgtaagcctggctttcaattcaaactcaaactttgaaccaatggggtccatattatgaaggttccttttacatgtgaatctctgaatcataggttcactatgagattttctcctggctgagaggtcatcaggataagagttcctcagtgctccccctaattttccagggtagaaagcattctctttggtcccaaagaacgttttgtttgaccaaaagaaagagtccagctcaggaagaaactctctatgggatctgaaaaacagaccgtttgggcacttgactgaggagatggcagtggccattgcccctgctcccagccacctgctgcccatctgagacagagggtgccaggttagctgcccaatacaccacttcaaaatgacccagaccctgcccacaggaggtccagagggccggcatgcacaagcgacaagatggcatggaatatgacccaggcttccacttctgggcacacacccacaagacctgtaaacaggtgtccagcatctgtccacattcctgtacatcagcattcacaacagcattaatcgcagcagccaaaagccagatgaggccgggcactgaggctcatgcctagtatcccaacactttgggaggtcaaagcaagaggatcacttgaggcggtttgagactagcccagtcaatatagcaagaccccatctccacaaaaaaatagctaggtgaggtgatgtacacctgtagtcccagttacttgggaggctgagataggcgggtcacttgagcccaagagttcaaggctgcagtgagccatgatcacagcactacactccagccggggcaacagagcaacaccctgtctctcaaagacaacaaggccgggyacagtggctctcacctgtaatcctggtacgttgggaggccaaggtgggcagatcacttgaggccagtagttcaagaccagcctggccaacacggtgaaaccctgtctctacaaaaaatgcaaaaattagccgggcatggtggcacacacctgtaattccagctacttgggaggctgaggcaggaggattgcttgaacccaggaggtggaagttgcagtgagccgagattgcgctactgcgctccagcctgggtgacagagtgagactctgtctcaaaaaaataaataataataaataataaaataaatttaaaaaatcagcaaagctaatcaattcacaacagccaaaacgacccgctgtccatcagcaggtgaatggagaatgccagcgtggttatattcaagaatggagtattactcggccttacagaggaaggaggttctgacacatctacaatatggatgaacctcagaagcatcacgctaagtgaaagatgccagatgcaaacggggcatgtcgtgtgcttccatttatacaaagcatccacaacaggggcatccctaggcagaaggcagatgagcagctctcagaggcaaggggcgatggggagtggctgcttcaggggcgagggggtaacaaaaaagtcctggaactagagagtgctgatggttgcacgatgctgcgaatcatgtgaaatgccactgaattgcacactaaaatatggttacaattgtcaatttttttttttttttttttttttttgagacagagtctcactctgttgcccaggctagagcgcagtggcgtaatctcggcttactgtaacctctgcctcccaggttcaagtgattctcctgcctcagcatcccgagtagctaggactacaggcatgcaccaccacgcccggctaatttttttgtatttttagtagaaacagggtttcaccatgttggccaggctggtctcgaactcctgagctcaagtgatccaccccctcctcggcctcccaaagtgctgggattacaggcgtgagccactgtgcccggccaaaatggtcaattttatggtatgtgtatttcacaacttaaaaagcgagacgaggtgaagacaaaactttaccccaaaccaaaggggcaggacagggcgccccctgcaggccgggagtgtgaactcctcttcgagtccagcgcgcatcttcagggctgctgacgttttactggctgcgttaagtgtgtacacctcgatgttcccccaggtcctgtccatgaagaaggagctgaacccagtggagctggatttcctcctgcggttcccttttaaggccggagtggtctcaccagtggacttcctccagcatcaaggctggggcgggatcaaggttcgtctttagacgttgaacacgttgtgctttctccccgccgtggagccccctccagctgatgctgcggatgtttccaaggccagaataccaggctctgtggcccataaattcagtaaagcaaggaggccccgcacatagggatggagaccaagatgggctggctgccagctcacagatagctctgcgttcctatagggaatgtgacatgtgttaggtccctgagacctgcacacagcaagcagagagtgatatcctctgggggccagaagaggcctcagggcctcttaccatccctccctcaacctctcctcctccccccagcctcccctcctccccccagcctcccctcctcccagcgtaagggaagtggcaagtgaaaagtttgttcttcagattcctggacacagtcagggaccctcgagtctcaaggtctgttcaaaaagacctgaagaaggtcgtcccctgagctagaatggccccatttgcagagacccctagagaagcagcccctagcccatcccaggcctcatgtccgcaggttagaccctgccgaggaggctcccggcgctgtcctgggatgcctgagctgggcatggacagctcctgctttggtggccagcctctcgggcttccttatcccagagccccggtttcctcggagggtaatggcctctcctccttgaatgaactgtacaggaaggctctcgggacccgggtaagtgggaagagtcacagggcccgctgcctctgcccctaggccctctcggagatggatgagttcaaaaatctggacagtgacatcgaaggatctgccaagcgctggaaaaagctggtggagtcggaagcccccgagaaggagatcttccccaaggagtggaagaacaagacggccctgcagaagctgtgcatggtgcgctgcctgcggccagatcgcatgacctacgctatcaagtgagtgtcccgcygcgccgggggccccgccccygaggcccaggcctgatggaagcttgaccgagcggctgtgctagactctctgtggacttgagttgatcccctgaacttttttcttctccccattttacacagaaacgaaacagggcttagaggggtaaatcatttcacacaaagttcttcgaggacagaggcaggattccaccccaggctgcggactccagtcctgagttcttgttaatccttaatgtctcagagtatcattaggggaaccccttgtcccccgctaacctgactgaggaggggtgccctgcgatacatgataggaagaaaagactccccacatgagcctcctacattgaaagtaagatgtcaagtgtggacgtgaataagcactgaggccatacaaatggggtccttttargatgttttgagggagaaaacaatggcaaacccatcagcattcgaggactttgagtacctctgtggcaaaacgtaaagtcaatcgaggtatattagtatggctagtttgcaagagaactgttctgatttcaccaacaatttctccagacctgaaacccttccctgttggaaggatgggctgttgaaggaaggaggtgacgtttagcacagaaacgagcctggggtctgtcctcagagcacctgtggcctgtctggcttctccccttttcatttctccaagtarcctgaaagcagccaggtttcccaaaggacactcatgtccctaatagaattaccctctgatggccaggtgcagtggctsacacctgtaatcccagtactttggggaggatcacttgagcccaggagtttgagaccagcctgggcaacatagtgagaccccatctctacaaaaagtctaaaaattagcagggcgcggtggcgggctcctatagtcccagttactcagaaggctgaggtgggagaattggttgagcccgggaggtggaggctgcagtgggccgagattgtgccactgcgctccagcctgggtgacagagcgagaccctgcctcaaaataaaaataaaaagaattcccttctgacaaagcagaggcctaactcccaggactgagtttagttttgccttgttttcctccgataggagaggacagggaccgggagtggtggggaggagggggtggaatgaagccagaagtcactgtgatgcaggagagcagcgaggtccagggagaatgccagctgtgtcccagggtcagagctggaggaagcgggggtcagggtttgggaaaggccaaggtaaaggtccctcggccatcgcagcgggatcaccctctcctgtgggagtgtgcagcatgtttgggtcacaagacccagtgtgcatccgattcctcgtctagaggatgaggtgaggtgaccttccccatctcctgagagcttctgagaatcgcctaagttagcctgtgtgactgcactctggccacctaaaagaaggaaacagccacccactgcggaagcatttgcgtgctctgcggtggccttggaccatcccaaacacccatgagcgcagatcatccctcagcattgacrtgtttcacatttctatgacgtggagcaaagcagatttactgccctgattgtatagggagggggtcrcttaaaagcaaggagattgaaacagacgtgactaataacaaagccagcactggccaagggtgtctcgtgtcaggcactgttgcaagcactgacagccgcgggagcacttccacactcaggtcacaggcactgggagggcaggccaggccacccccacgtgcgcaacacaaaccctgacgcacagcatgtgccaatttccatggcgtaagtgcttcctctgtggccggttgcactagttgccggggtctgctgaaagctgtcaccagccggctccagcactcctttgtcaaagccaccatgtcagaggtggtgaggtctgassaacccagcctgcatgcttctgcatcattaattcatccacagccgatgaccatttggcctggccaagtaattagcaaaggtgatctagagtcattcctgcctaggggcaggacttcatatgttctggaagttccttcctagacaaggatcacagcatctagggtctgaggccattccagagttccaaaaagaattgggggccttcaggaggagcaactcctccccacccttgcctgaggctggccccagttcaggacaccagagacaagccagcaaaggccagtgcagggaaaggaatagcagatccaggtgtccccagaaagtcccaagggcatggacaggcaatagccggctgattgctggttgaaccagaggagstgaggtgtgctgggtggcatgagtgtgagcagagccttctgaaagtcgacccagactctcagagcactcgggcgttcacctgcccagggacgagcagttctcacccttcgggatgcggccatttgtcctcctttcagagaccagctggccactaaaatcttactaattttttttttttctgagatggagtctcgctctcttgcccaggctggagtgcaatggcgccatctcacctcactgcaacctctgcctcctgggttccagagattctcctgcctcagcctcctaagtggctggaattacaggcctgtgccaccacacctggctactttttgtatttttagtagagagggttttgtcatgttggtcaggctggtctcaaactcctaacctcaagtgatctgccctccttggcctcccaaagtgctgagattacaggcatgagccaccacactggcaagtttactaatcttagctcaggtgattcattctttatacattacagtaagctcagccctctgtgatcacagaagaaaggccaacacctgatccaaagacygccagaacatcactcggtcctccatgggaggattagccgagaccccgactgaccccagacttattggggtcatgttagaaagagttgggggcttttgtagagagaggtgtttatatcatctgaagttgcttttttctttgacktttttaggctcaccaaagctttgctctaatctgaacttccttccttctcagcgcccccaccccccgcagttgaccctgggtgccttccaaggctggcctctccctgcacctgcttaggctgctccaaggaggagcacagtgcggggcccctcgggaaagaaagggtgcccgaggcaaacaaggccaatccctcgcagaaaggaaagcccrgtaaagactctgctctcctgccacaggccttgtcccgctgaagaaagtccaccaaaaaatggcccccctgcctgggccacagcccacccygagcgccccgccctggcccagagcctcaggttccgctgcctctgatgcactccacccctaggaacttcgtggaggaaaagatgggcagcaagttcgtggaaggccggagtgttgagttttctaagtcctacgaggagagcagcccctccacgtcaatcttcttcatcctctccccgggggttgaccccttgaaagacgtggaagccctgggtaagtgtagcaggcaagtgatgttctcaaagacggagtattgtcagcatcaccaggcaccaggaaaatgcacaccaaaagcacatgagacaccacttcacacccaagacgcggcttcacgccggtaggatggcaatgatcaagaacaggaaaataacacgagttgtgaggcctgagaactgcgacccttgtaggttgctgagcggatgtaaaatggggccgctgctgtggaaaacagtctggtggtttctcagtaagttacatatagaattggcacaagagccagcaattccacgcctgagtatacacccaaaagaactggaaatttaaatctgtgttcaagcaagtactctacacagacgttcattcataatagccaaaaggcagaaacaacccaaatgtccattaactgacaaatggataagtggataaacagaatatggtggctctatatggtggaatagtatccctcgattaaaaaagagtgaagcaggccgggggcggtagctcacacctgtatcccagcactttgggaggccagggtgggcggatcgcttgatcacaggagttcaagaccagccttggcaacatggcaaaaccccgtctctacaaaacatacaagaaaacgtagccaggtatggtggtgtacgcctgtagtcccagttacctgtgaggctgaggtgggaggatcacttgagcccaaaaggttgaagctgtagtgagccgtgatcaagccacttcactccagcctgggcgaccgagtaagaccctgtctcaaaaaaaaaaaaaaaaaaaaaaaaaaggcatgaagtcggccaggtgcagtggctcacagctgtagtcccagaactttgggagtctgagacaggaggagcacctgagccctggagttcaagatcagcctggtcaacacagggagagcttgtctctacagataattttataaattagctgggcatagtggtgcatgcctgtggtcccagctactctggaggccaaggcagaaggatcacttgagcttggggagtggagttcaggctaggtgacagagttgagaccctgtctcaaaaaaaagtgaggccagccacagtggctcacacccataatcccagcactttgggaggccaaggcaggtggatcgcctgaggtcaggagtttgagaccagcctagccaacatgatgaaaccccatctctactaaaaatacaaacattagccaggtgtggtggcgggcgcctgtagtcccagctactcaggaggctgaggcaggagaatcacttgaacccgggaggtggaggttgcagtgagcagagatggcaccactgcactccagcctgggcgacagagtgagactccatctcaaaaaaaaaaaaaaaaaaaaaagtgaagtactgatacatgctacaacgtggatggacctcaaaaacactatgctcagtgacagaagccagacacaaaggccccatattgtgcagttcccttgatatgaaatatccagaatggataaatccatggagacacaaaggagactgtagacgagtggctcctggaggagattgggagcgactgcctaatgggtatggggaccacctcttgggccatgacaatgttctagaaccaaacggatgattgcacagcattgtgaatatactgaatgtcggtgcactgtacgctttaagatgagttttaaaacagcaagttttatgtcatgtgtatttcaccaccgaaactaaatgagggaggcatgtggaattcctggctgtagatcacagagcctgaacctgtgtcatttaattacgtggtgtttttttcctgtttttcttttctttaggaaaaaaactagggtttaccatagacaatggaaaactccataatgtgtccctggggcagggacaagaggtggtggctgagaackccctggacgtggctgcagagaaaggacactgggtcattctgcaggtacgagggggccagcactgcagggtaagggctccccgcactgaggtggccaatggggatgggccagaaggcccggaaggaagcaggatgtggagtttgcattcagaaatgtgggtggaaatcctaacaccactgaaggaggaggcatccccagtgtcggctctgctggggtcagctgggtggtgtggcacgccatgactgcccagaggaaagcgtggattcttcaacggtgagagggaagctgggctttatacgagagtaccccaaacagagattatttaaacaacagatggttgggcacggtggctcacacctgtaggcccagcactttgggaggccaaggcaggcggatcacctgaggtcaggagttcgagaccagcctgaccaacatggcgaaaccctgtctctactaaaaatacaaaaattagccaagtgtgctggcacatgcctgtaacctcaactacttgggaggctgaggcaggaaaatcgcttgaacccggggaggcagaggttgcagtgagccaagagtgcaccactgcactccagcccgggcgacagagtgagactccatctcaaaaaaataaaaaaaaaagatgacaagtgctgggttgacaaaagcatctcctcctcnnnnnnnnnnnnnnnnnnnnnnnnnnnnnnnnnnnnnnnnnnnnnnnnnnnnnnnnnnnnnnnnnnnnnnnnnnnnnnnnnnnnnnnnnnnnnnnnnnnnnnnnnnnnnnnnnnnnnnnnnnnnnnnnnnnnnnnnnnnnnnnnnnnnnnnnnnnnnnnnnnnnnnnnnnnnnnnnnnnnnnnnnnnnnnnnnnnnnnnnnnnnnnnnnnnnnnnnnnnnnnnnnnnnnnnnnnnnnnnnnnnnnnnnnnnnnnnnnnnnnnnnnnnnnnnnnnnnnnnnnnnnnnnnnnnnnnnnnnnnnnnnnnnnnnnnnnnnnnnnnnnnnnnnnnnnnnnnnnnnnnnnnnnnnnnnnnnnnnnnnnnnnnnnnnnnnnnnnnnnnnnnnnnnnnnnnnnnnnnnnnnnnnnnnnnnnnnnnnnnnnnnnnnnnnnnnnnnnnnnnnnnnnnnnnnnnnnnnnnnnnnnnnnnnnnnnnnnnnnnnnnnnnnnnnnnnnnnnnnnnnnnnnnnnnnnnnnnnnnnnnnnnnnnnnnnnnnnnnnnnnnnnnnnnnnnnnnnnnnnnnnnnnnnnnnnnnnnnnnnnnnnnnnnnnnnnnnnnnnnnnnnnnnnnnnnnnnnnnnnnnnnnnnnnnnnnnnnnnnnnnnnnnnnnnnnnnnnnnnnnnnnnnnnnnnnnnnnnnnnnnnnnnnnnnnnnnnnnnnnnnnnnnnnnnnnnnnnnnnnnnnnnnnnnnnnnnnnnnnnnnnnnnnnnnnnnnnnnnnnnnnnnnnnnnnnnnnnnnnnnnnnnnnnnnnnnnnnnnnnnnnnnnnnnnnnnnnnnnnnnnnnnnnnnnnnnnnnnnnnnnntgggaggtcgtgcgggagtgggagagctagtgaggctccttcgtgtttttcggccggaataggaagaggcggagtatacagttctggctggtgttaatagatggtgtgggcagaggagcgcgggcggtgtatgtggaggctaggcggcgcacgcgcaccctacagtgggggaggtggagtgggtgaaagaaggcggtgtagggaggggggggtggtcgtcgtccgtcgtcgtcttcctcgtcctcttcgttctgctctttttcgtctcttgtggtgggcattcaaagcccagagcgcccaggagatgctctctgcacatttggttcaacgttagcacgaccacccctcctcagccctggagcccatccaagaccccttctcactaccgcttgtcctcgagcgcctctgggcctgtcccagcttccacgggtcttacagtgtgtgtcgacctcaatccacagggctaagcctggccccggtgggaagccctcagcttcaagaggaggggtggggaccacagaatctcagccttatgccagggaggacacaaaggactcaccgtaaggctggaggtttgcaattcattgaacacaaaaatagattctggggcctcagttgcttcgccgaagacatcctggcatgcccagcacctggttagggtggacaggtgaggggtggggcagtgccagcaccaggcaagtgtggggtgctggcagaagagccctgccctcaccagggaacatagccacgtgccagtctctcctcgtgggccaggagctgggcaaagtgtgtaaccagcctctagtcttggctgcagaatatccacctggtggcccggtggctgggaacactggacaagaagctggagygctacagcacgggcagccatgaggactaccgggtgttcatcagcgcggagcctgcccccagccccgagacccacatcatcccccagggcattctggagaacgccatcaagatcaccaacgagccccccacgggcatgcacgccaacttgcacaaggccctggacctgttcacccaggtagggccacgcctgctcgggctgcctccccatcccaygccacggcctggcatccatcccttggggccccgaggaccactgaggaccgctctgaactctggggacacctcccctctgggcttcccctgtccacacacccctcgcagtcaaaatcaatgtatttctaaaagacggaaaaatgcaaataatttaaggtgctctggcactatttattacttaaagctgtagatgcagaaacacatagtttttaatcagttctatgaacctgcaaatgagggctggtagatgctgtccattgtgtttaaagagcatggaacacgtcatgactggtccttggaaatggggccaagctccgtggggtactccctggaggctggtcagctttcctgggagtacagagccccactgctggaggctatgggcaaccagggtagatggggttgctgtactcgctgaggctctggatctgtgaccaggtttccttgccttcagcccccctctgacccaccatcagcaggaacagctggcaaaacacagctagctagggagcccggtcctcctctgctaacagctgtagtggctgctggktgcctccaggacggagggtgagggcctgcctggcacctggggctcgaggaccctccttggctgggatcccacttctgcatctgcctggggtctgtcctcacctgactcttccctcacagacctcaaggcttcccccagatgcagccttctccacagccttcctggccacgtgtttgtttgtttgtttgtttgtttgtttggagatggagtctcactctgtcacccaggctggagtgcaatggtgtaatctcggctcactgcaacctctgcctcccgagttcaagcaattcttgtgcctcagactcccgagtagctgggattacaggcatgcaccaccacacccagctaatattttggatttttggtagagatgagatttcgctatgttggccaggctggtctcaaactcctgacctcaggtgatccacctgcctcaggctcccaaatcttggccactcttgtcctcgggggtgctcctgcctctgcaggtcctcatgtcgatatttctccttttggcacctcagcattttctctgtctagaactttttgtgtgcacaaacttgatctcccaagtggagcctagaacttttttgaggtttgacaccctatttttttggagatggagtttcgctcttattgcccaggctggagtgcaagggcacaacctcggctgactgccacctctgcctcctgggttcaagtgattctgctgcctcaggctcccaagtagctgggattacagacacccaccaccactcctggctagttttttgtatttttagtagagatggggtttcaccatgttggccacgctggccttaaactcctcacctcaggtgatccacccacctcggcctcccaaatagctgggattacaggcgtgagccaccacgcccggccaacaccctgtatcattctataacacttaacaaagatctacttatggggtgtatcggtccatgaatgtgtggcttccatgcctgatacatttttaaaaactacttatatggaaatatcagagtcacccattaacaattcccaaccagcttttaaaggacacacccttgtcaaagtgtgaaagtaaaagaaaaagcagaaaaacaaatgtttaaaataggtcccccgttctattaaccaatcaatcaataccacacgcctcctgccttggcctgcaccctgctgaggggcgcgaggatacgttctggaagcagcaccctagtgtgatgagtgcgtggggtacacacggtgctatggggccatgcagctcacagcagccctgaggtcagcaccagtcctggaacggtttctgccagtctgtatgagatcagcgcagaaatccaggaggcactcaacaaactctgcagcgacccgacacttgtgaatccaagcacaggggcagttcttcctttggtgtttcgttttattgtattttgcaaagtgtcagtcagcgacagacagggatcggggcactgaggcagggactgggccttcacttccagccagcgtggagccctgccagccagcacacgggagtggcacctcatcccatctctggttggggaggtgggtagccagggagtgacagctgagacctgtgggtaaggagacccttcacaagttcagggaccagttgcctcggaggggctgtgggcctctgaaaacaagggcccacaggaagaagcggtggtgggtggaacctgtatgtccacgatgccccagacctgagtgcgggtaggctggtgaaaagcaccggatcggatggactctggaggatggatggacggtgacacccgccaggccttcccttgtccttgggggctggtgagtctcccattggctggtgtcactctggctctccacgtgttcactgccagcgccctccccagggagctgaggtctgaaaaggactggccaggccagtctcctgggcccatcgtctctgtcccaggcagccaggaggggatactcgagtgatggaaccccagctgctcgccttcttgtccatgttgccagaggggcctgtgccaggctttccatgatgcccaggacagggccctgctcttgatccacccagtacacttcccctggcacttatctgtccctccccagcgggatcctcggccactgtgcctgaagccctccccccacacagagtgcctggccccagaggtgctccgtcagccgctgagtagagcaggtggagcacagcttggcttccagaagcctctgtgtgttcaggagtcactacgtagcaaaggttaatgagtaaaagctcacaaatccagagacgtaggagtcacaatttaggctcagttttcccttccctggagccagataaaaagaaagggtttgagaagcgaccccatcccatcccccatcctctatcccatcccccatcctctatcccatcccccatcctgatggaactttaccagttgtttttagagtttgggatactgtgcataagtgatgaggaatgttgataattacaaaggaacattatttcgtattaaagtagtcccgaaatgtccaggatttgggaagatattaggaagcagtatcaataattcaacttgtagttaagtacttaaaagggataaaattgcatttctgaaaggaacaagaagatcgtactcagccatgacagcccagctttccttgcagcgggtctgatagagacctgcacagcccacagctttgtaccccccaccgcccccaccctagcaaagcatctggcaagggctggacgctggtcaccctcaggggcatttctgtgtaaacttctccctctccctaatacctgaccggagcgtgtgccccacaggacaccctggagatgtgcaccaaggagatggagttcaagtgcatgctcttcgccctgtgctacttccacgctgtggtggcagagaggcgcaagttcggcgcccagggctggaaccggtcgtaccccttcaacaacggggacctcaccatctccatcaacgtgctctacaactacctggaggccaaccccaaggtgaggggctgtgtgtgccctgtacttggacatatccctccctctttccctccttccctccctccttccctccctccttccctccctccttccctccctccttccttccctccctttccttttggtctttgtcttaggcttaaaagacatcaagtaggtttcacaaaccaaagagaacttgaaaggcagcaccatctgtgatctctccagcctgctgtaattaagatggtccagtcctttgcccccacctcctgcaggagccrgcttttggacagctcttctgcttgttagcacactccacgccacctgcccctcttgcacctggatgaggattcccccagaatcctgscaccacagggtgtgagctgggactcagtggggaggacaagcagggcttcccgggctgcaggcctyaccacggctctgtcagtgtctggagagaacccaggtttggagcaggagggacaaaaaacctccccggatagaagggagtgctgtgtccattatgagaatgcataaaggcgcatgcagactgccacagaggactgagtagaaagccrcacrtcctccgtaaacggtctgcagcaggaggcacaggtcggggcacagagcaaggtgcacagcagagggcacaggtttgggaccagatggtagcgtatgaatcccagacctgctattcgctggagggggccctctgtaagcagcacgtaccctgctaggccctgcagccccatctatggtctcctaaggcttggccaccccawccataaactggagagagcggtagtgctcaccaygcacggttcttacgaagctttgactcaggctaagcctggcacaggcccagragcccctcgcccagaaggcagagggcggtgcacacccctataaaccctgggtcctcctcctcactctcggcctccaaatcaatagcgacatggaccctgsctcagagagagcaaggtccgggcamcctcttacagactgggagggggatgggaagaaagctgcactcagctgcccaggagggctgctgcctacgtggggcctcggggttggaggactcccagggcctggatgtgacrtggtgagaaacggtgctggcaccggggtcggggggggggggscacgtttgaagcctgctctgctactcattcactgagacctccagcaagtcactggaccgctaagcctgcttcctcatgggcctccacctcagggcctgggggttcaatgagggaagcctggcctggcaatgccagtctcaggaaccccctccttttttccatctccttgtaataaagctcaagacctgggccactaagccccaggcatgcacggcacacgtgctcccattgggtgtcctgagaaggcccccaggaggtgacctctgatgtcaagcacctggcctgggaggctgtgacagagcctcctcaccaagactggaggacaacgacctcccaggatcgctgctggcgaaggctgggcctggaacttggtatgcttagttccctgggaggcacatcagccctggagtagcagggagcagaactgggccgggacttggctccctgtgctccctggcaatgggccaccatgggccatagatgccactggtgaaaggcagcctctgtctgccggtcgatggggcagggtgccggccggacatttcacccagaacaagacccggatctgaaaacactcccagaggcacccaagatgttcaaagggactttcagcacggagagacggccaaaccacgcagagactagtttgggagaaacagtctggctagaattttttttttaatttttatttattttatttatttatttatttatttatttttgagacagggcctcactgttaactggggcaggagtgcagtggcacaatcacagctcactgcagccttaacctcctgggctcaggtgatcctcccaccccagcctctcaagtagctgggactacagcggccacaatgccaggttttttttgtttttgttttgttttgttctgtaaagacggggttttaccatgttgcctaagctggtctcaaactcctgggctcaagtcatccgcccacctcggcctcccaaagtgctaggattacaggcgtgagccaccgcacctggccaggttaggatttttaagacatttccttagcygttgcccaytgacacacrctgggcagcttctaagctgctgagaagccgcgcgagtaccatgtacatcagcggctgccacatcctgaggagctgtgtcctgatgtggcctgcgctggccaaccttccctctgtcctcaggcctccctccccctccacagactccccaccggctcccatattcccttcatggcacaggtcatgctacackctgagtgaccaccgggaatgatgtcatctgtgtccacggcctgtttagccgtctgggctctgaggaaatagatcagggattcccatgcgaacggaacacaaaagtctgatggaacgttgctttgaaacacagagcaacctgcagggactcccagggaggggcctgagagctacagctcccccaggagtctcggggtggggggttccctcagcaggtacgggaaatgcagacagcactcacccccaccccctgcgggaagcaaccctcctgaggagcgtgtggggccaggagggggagaggggcacaggtcttcctgcctctcgggagacacagacgctgcctccaaagctgctaagcaagatgcaggaaaagcagcccgcaaacagttgtgatgaccagacagagaaggttgtaagtcgctaatgataatgtggaaaacattaacrttttgagtaaaaagtcatgagactaagccgagtgcagtggcccaagcctgtaatcccagcactgtgggaggccgaggcaggaggactgcttgagcccaggagttcaagaccagcctggccaacacagcaagaccctgtctctacaaaaaataaaaaaattagtctggcatggtggtgtgactgtaggcccagctacttgggaggctgaagtgggagggtcgcttgaacccaggagatcaaggctgcagtgagccatgtttgtaccactgcactccagcctgggacatggaacaagatcctgtctaaaaaacatatacatatgggctgggcacagtggctcacaccagtaatcccagcactttgggaggctgaggcaggcagatcccctgaggtcaggagttcgagaccagcctggccaacacagtgaaatctcatctctactaaaaatccaaaatattagctggctatggtggtgtgcacctgtaatcccagctactcaggaggctgaggcaggagaattgcttgaacccrggaggcagaagtttcagtgagcagagactgcaccattgcactccagcctgggcaacagagcgagactccatctcaaaaataagcaacctaaaaaatatatacatatgtatataaattcatgagaccwaatcagatgattgattcatcaactgattcttattcaatgaactcccactggtatttgatgacagctcttccggccagcgcacagtggaagtgatgttatgaaaacatctgcctcrcccttcaggagctgcaaacttcagggaaagaacaggtgtgcggaagcrggaagaagctgactgtgagcggcaggatttcacatgctgggtaccaaaaaagaatcaattatcttatttttatcccaattacatgttggaatgatctcttttaaagtggctgccacaaaatttaaaatgacacatgtggcctcaatccgtggctcccaccgtccttctgctgaactgcgctgtgcaggagaaagaggctccaaaacgggcacatggaggcgggaagaacaagggcctggcttcatggygaggccgcccatgagccaggctttgtaggaagaagartrttccagagcaaaggtgtgacgtgagactgcaaggaagcatgaagggagtgggaacggcggcggggtgggaagcgtgtggtcgcctggcgtgtgctctggtccmcactgccgagtttggtcttcgttccctaaggccygggcagcctaggtcagataagtcacttgctcaaaccctctatgtgactgcaaagaccctggaggcacgggagctactggaaggatgagaaccaggaaggactctacttccacagggtggaagggagactcaccagatgcatctgaagacatgactaacgacttcgtggccaaaaggttgacggcactggagtcaatccttgagccacacagaatcaaaccacttgtgttgaaattggaccgtgaagggcagagtctcagatggtaacacagagtgggagaggcagagggagcgagttccgattcakccctgtggcctctgaggcacagtgaggcacagcagaaacacctgccccacgggaggtgcagagcatgccggctgtggaagcgctgtccaaggtggagggaggtgccacacagccccttgkgagagaagccaaaggggccggacattggcgtytggtggcgcggratggaaagaaaggtggccctggggcctggtgaccctgaaggtaaatggccaggaggctgacctggagggcgagaaggayrcagcaccaawggctgggttcccacgccctgcctgcctgagcctgaccctctcatggcagagaaggggcacaggggcactttcccctaccygctgtcatccttcctcaggtgccctgggacgatctccgctacctttttggtgaaatcatgtatggcggccacatcacagatgactgggaccgtcggctgtgcaggacctacctggctgaatacatccggacggagatgctggagggagacgtcctgctggcccccggctttcagatcccccscaacctggactacaaggtaaggatgacaagttaaacaggagytcaacrtaatgaaggctcgtgcctcccggtgagagcctgccagcacaaatggagtgtcaataattgagcaagaacccaggcagccaaaataagagaggatgagaaatgcgtctcacttggaagaagcacaaggctaatacaaacaacctttttttttttttttttttttttaaagaaagaaatgcagcctcagggaagggggaatggaattttcctttatgtcgctgggagcacrgggggcagcccacaaagggggctgggaaacaagtgggatctgtacagacagcaaggtgtgggtgaacgttctggcaaggaatgcttaaccaacaggacatgggtttcagcctgcacagctttgcctctgyttacaaactgccctctttttcagggttaccacgaatacatcgatgagaacctgccccctgagagtccctatctgtatggcctgcaccccaacgcagagattggctttctgacggtcacctcagagaagctgttccgcactgtcctggaaatgcagccaaaagagacggactcgggggcaggcacgggagtgtccckcgaggagaaggcaggatctttgaaactgctcccaagcgagaggaagggggaggatctagaactgaggagggggtcacagggactggcggcagtacaggggaacttgctggtgasgtacactctgccccagcctygggcttgggtatcagaaacactggggtatggcccgcaggctggtcagcaggtcctcagacgtggcagctgcaggcttcgggtgagcgtacgggcccagacmaaagggatccttgggggtgtggatgcggctccragagcatcccagccctccaccctgcagtcttccagcttcccyagctgagcgccaggaagggcaccgaccattccccaccctggcctggccagcacaacagcagtagcagctcgcaccgggcagccggatgtgcaggcaggtactccagagccgctcagtggccacaatggcaggtcctgttactgctcaaaggattagaagagttcaggggatgccagtgttctgaacaaattctcgcttgtctgggtggctctgtgctgcctcctgggtacctcyacttttttttttttttttttttgagacggagttttgctctcgttgcccaggctggagtgcaatggcacgatctcggctcactgcaacctccgcctcccaggttcaagcgattctcctggctcagcctcccaggctgggattacaggcgcctgccaccacacctggctaattttgtatttgtggtagagacagtttcaccatgttggccaggctggttttgaactcctgatctcaggtgaccatcccgcctcggcctcctaaagtgctggggttacaggcgtgagccactgtacctggcctgtacttcttaatagaatgtggaaaggctctattacgtactagctaagtacaggacttcccggtaaagactgaattcttgatgtgagacccttattcctattaggtccaggactttctcttagtctaatgactgaaatcaggaattggctgacagacggtggtgcaggtgaccactgcactgtgtgggccactccttaacagggtgtgaccagcatggtccctacagaaagcccacgtaaaggacaaagtcgcaatccctcaaccgctggctacatttgaccagaggctggtgcgtgggaatgaacaaatgaggcaccgagccaggtggcctgatgcgctcatggccgcggctgcagggacttgtagtgagatcagaatgctcggagccgctggccaaggctccctctcctcatcaaatgtgtggctgcacccatgaccctgcatttctggcaactcyacttgcctcttccctcctctccaggacttggggctgggaacattttgggcaggctccctgaccctgcagtgggtggggtgggctctttgcagtgacaggggctgtccggggactggcttccaggtgaaggccgtgctggacgacatcctggagaagattccrgagactttcaacatggctgagatcayggcaaaggcagcggaaaagaccccctaygtggtagtcgcctttcaagaatgtgaaagaatgaacatyctgaccaacgaaatgygccgttcgctcaaggagctgaacctggggctgaaggtaaacatgggtcagcccggccccagggmcgtggctggatggtgaaaccagcagaaacccaggcctctggcaacccaggcctagcacaggccccggatcagcatggtactgctccctctccagagctctggcagttccagaacaagccccgggagctcatctagaccgttccttagcaggaagcgcttgcgtggccctgatgcagggcgtctccagaggcgcagcacaaagccacactgtgttgacaactcatgacacgcactggggctggtgctctcccaggccccagctcagggctccccacacccatctgtgtgtctcctagggagaactgaccatcacgaccgacgtggaagatctgtccacggctctcttctatgacaccgtgcctgatacgtgggtggcccrggcctacccctccatgatgggcctggcggcctggtacgcagacctgctgctccgcatcagggtaagtkccgttttctctgagaggcttcctaagactcggggaccgagtgcccagagctcggcacrccccacaccctagagcctgcaggagcatggccaggaggctcctgggggcctgtcctctgtcagatcagggccagaagggcctagcccatgcccctcccacaccctgacagtgcagccatttcctcccaaaggaggaaaacaagccaggccgcagagcagcttccatcagctcctcctcaagcgaccctcaaagggtaagccgtcctctataaggagcgaggcaatgaaggcaagagcctctttgggctcctaaattatccacaaacaggaagccattttcttcctgacccttctctacctgttcccttgtttaaaatggagcaaacagcagctggacacggtggttcacacctgtaatcccagcactttgggagaccaaggcaggcagatcacttgaagccaggagttcgagaccagcctggccaacatggcgaaaccccatctctaaaaatacaaaaataagctgggcatggtggcctgcacctgtaatcccagctactctggaagctgaggcaggagaattgcttgaacccgggaggcggaggttgcgttgagccaagattgcaccactgcactccagcctgggtgacagagcgatacttcatctcaaaaaaaaaaaaaaagcagacaccaaagttgcgtcatggtaggtggctgggctccatggcccctactctgtccagcacttctagctcgctgagtggcccgtggaaggttctggcgtgacccctgctcagaacggccaaggccckgtcgttcccatgtcattctatgtcctctcctcctagcggctcgtgtgtccttgcaggaactcgaggcctggacgacagactttgccctgcccaccaccgtgtggctggccggcttcttcaacccccagtcgttcctcacggccatcatgcagtccatggccaggaagaacgagtggcccctggacaagatgtgtctgtctgtcgaggtgaccaagaaaaaccgagaggacatgaccgctccyccrcgagagggctcctacgtgtayggactcttcatggaaggtaaggagggctcttgtctgtctgcagaagcttccagagccagtgctacttgccaagacaagataaaactagctcttggcaaagacaggctgttcaagagctgtggggacaggcaggagagaggtgctctcagggggcatcagcctgcaggtcagagccacgctgaccctagagagggttgagaggattcagggaatgtgcagggtctggaggagaccaaaaacaccccagtcacctggcctctgctttaatgaaaacagcagagcttgtgagagagcagctccgacgtgatgaaaagcgctgaaaagcccaggctttccctgccacggagcagtcagcccagggcagaagtgcgttttgtggctgcactgagactccaggtcatgctggctggcccagtctcacccactccccagctgctgccactcctggaacacagggttcaagggaaaagaggctggggcacctgttagaagtccgcccccacatcacccctgtcctgctacacagaagaggtcagccaggacaccgaggccggccatcttctcagcccgcctctgagttgagcagcaatgccaccaccacatacctgtccccttcaacagctgacgtcaccccattacctgtggggtggcagggttgggccagcaacggctcaggcaccccatttcccacacaaccaaagataagctctccatgtttgtttattttgagatttcagacaggaaataaaaacaccattaaatagggcgagtagaaataatagcagtctggttaaaggcaatatttatatgcacagatgtataattatattgtgtatgtacacatagggcagacattacacattaagaatcagggaactttactctgtaatttttagctggagttatgacttcctgccactgacattaaggctgacagatgaggctctgaaaatgccacagatttaaacggatggaacccgagggctttagctgagctgttccttgagcccagcgggacggggtagttacaacatgcaggccatcacctacgaaggcctctgcttccagctgtggcagctggcctgaagccttttggggtagagcccagctctgcagagggcggggagtgtgaggaccccacccttcctgccagcccctccctcacttactggcagcacacctgaccctcagccatactgtccctgcaggggctcgctgggacacccagactggagtcatcgctgaagcgcggctgaaagagctgaccccggccatgcctgtcatcttcatcaaggccattcctgtggaccgcatggagaccaagaacatctatgagtgtcccgtgtacaaaacacgcatccgcggccccacctatgtctggacctttaacttgaagaccaaagagaaggcagcgaagtggatcctggcagccgtggcgctgctcctacaggtttagctcgctcctgcctcacagsccacactccctggggctggaccacaactmagcccttcacctgtgcacctgtgacttattctttacaggaactggtggtggtttttygttctcttaaataatcaggtgctttgtaaccaagcacatcggaaccagagggtggaggttggtgtggaagaggtggggcagattaaagccagtggagccactcagctgtgcccatccattctgtgcctgatggccactgtgaggcctggttcaggctttggggaaaggccccaattcccagcagccagaggcaagcattccaggaagtaaatcccaaatcctgacttcccgggggggtcagtggagtttgcttttaacaggagcagcatgtggggtgagggcttggcactcacaccctctggcctgatgcttcatgcaaaccacctgccaatgaggggacagggcgttaccccataccaggagctgccgcctccacacagcgtctcatccgccattactccctgctcccaaaaacaacaggaccttttacaagtaaggaaacacacccaagcccccgcccccagagtctagaagaacaagccgttcccacaagcaagccccggacctgtaggactctgtggctggcctgatgcaggacacggcagtgaggtggccaggctagctagggcagcagggtgcaggcacgaggggagagaattaactagcaacctgggggatgaggggagacagcggcaaacgtcagaaaagacggatcccagggggaccaagacaggatcaacattttttttttttttcgagggagagtgagagtttcactcttgtcgcccaggctggagtgcaatgacgcaatctcggctcacgttgcaacctccacctcctgggctcaagcgattctcctgcctcaacctcccaagtagctggggttacaggcacccaccaccacacgcagctaatttttttatttttagtagagatggggtttcaccatgttggccaggctggtctcaaacttctaacctcaggtgattcaccaacctcggcctcccaaagcgccaggattacaggtgtcaaccactgtgcccggccctcaacatttctcaggcttcaaagaaaagcaggccgctgcagcagctcacgcctctaatcccaggacggcaatcttacttgagcccaggagtttaagaccagcctgggcaacgtggcaaaaccatctctatcaatcaaaaatacaaaaaattagctgggaatgttgtatgtgcctgtggtcccagctactcaggaggctgaggcaggagggtcgcttgagcccatgaggtcaagtacgcagcgaggcatgatcatgccactcactccagcctgggtgacagagtgagaccctgtctcaaaagggggaaaaaaggcaaacacacccattaggaatatcgttctacgttcagcttgatcatcaagttttgcaaaaacatttttccaagtttactcacctaaatcatgggttaagaagcatctagaaagtccaaattctgagggtaatgattcacaacaatcttagcgcccagtagggctatcggagggaaaagaaaaatcctcccctcctggcgcccaaggaatccagccctttgtggctgcagagaagggaagcagtttcagcctcccccagcctggctgggccaatacctctgctggccaggaggggtcactgcagcccttcaggtgaccaggggagctaaagccaccaggggccaccgggcaactcacttcagtccctggtaataaccacaaaatgtgacgtttttccattttgcctttagatcctgaaataagaaagtaatctagtccacacatacatattgtgggtagttgacaaaattatctctaaactttccaagaaatgattcgcacttaagctgcactccagcgacggggaacacggactggaacacgacagccccgcgcacctagaaagccgggaggactgcggcggccgcccgcccgctgctctctgttgctccggctgctttgcagagttagggaggcttggtgtggggagctcctcagggagaacctgcctaggacagcctcgaaggtcatcggcagagacagagggagcagtgtgcgctgcgggaacggcactgcagatagattgcttaagcctggctgtggcataatgatatttactctggtcccacagaatctggaggaatgcgaactctgtttaccgagagcctctctccaaacagaaacccagtgcccctgcacattcctttggctcctccagtctaattgtcccacaggacaccgtaataactagttggaaggcaaacagtgttaactgatgtgatgtgctgctgtccagggcactgtggccaggccgccgctccacctatccccagccactcaaactgcaggtctgcctggtgcggaagctgcaactgtccttgtctaagaccaggtgagcccatgcaacctttcagaccccatgaagggtgactgacagtgactcctgccagccctcgggagggaaaggcgagaagctgcttctagagaggcaaagtgcagggactaaatctaatctcactccccgaaaggacaggctgccatgccctgtagcccaggaagcttctctctgtgcaagggtcaagcacctgaagatgataaagagatcaggcagtgaggtcacaaaagcagctcctggagacactgggggatatggagagctggctttataaacacacatgacatgtattcaaaatcccctgctactaggtgacacaaaaatgttttaagtagatccaataaaaataaagttcattcttcaaaaaataaattgctagggaaaaaacaatcacaaggtgtagtccttaattggacttcaagtcaaataatcgaaaaaattaattttaaggcaagtggaattgtgaacaccatttaggtatttgatgatactaagacattcttggtaatttttgtttcaggagtgacactggtgctgttttggttaagtacacattttgggggaagacagcaggatatgcacgttatttagaaatacggacacgtgtgcacatcagaagaaacaagccaagagtggctgcctgggggaagggagggcaggaaatggccgcagtattgttttactctctacatttgcacacactattcaaataaaatgaaaagtaattaaaataactaggaaaagctgcagataaactacacatttttaaacaatgagacttagcagagcactaaggtgccaggcactaagggagcccacgctgcacacatgagatgccggcactagcgcatgtgccggccacatgggtcctggctcatctttgactcctcaccgtcccttccccacaagccaccatccaaaggcccagccatccaaagcaacagaactacccacaacatccagaaccagagagcaggggcctcgggagcctgaccccacccggagtgcagtccaggccctgagggatccaggacacaaaaggtcactcagcaaagaccccacctttaatggcagccaccccctgcccggacctctaggcgtcaagacagtccaggggtacctcaggtgactgtgggaccccactggtgcctctggtgaagcggcaggcccctcctgggtgggcagagcaggtcctgttactcaacttccagagtctagaagggcgcagctctgtaaccgcagcacagggatgtcagcgaggcgtccaggcagcagcccacggtctggctctaccgacgccccaccctgtgcactacagccggccagggcagcaagccagagccactctcacgagcaaacgtgctcccctcctcccacgtctacatctcctgcaccagtgtgctcagcttggaggggctcaatctgcctttctgccccctcatccctgagcccttgccccagggcttcttcaggaccccctgggaagggagagcagaaggggactacaggctgccactgccgaccccagcacaggcgccttgggacttagtggagtgggtaccagatggaaagtgaacagactgcctaatttagcatccagcttctaactttgaggacagctgccatacccctgaagatgctgctctgtgtttaactgagaaagggatcaaagagccctctggaagctctggttgagtcagaacaaccacctgccccacctgtgaactctcgggaaaatcgtgctgagaggtgatgctagagacagcacctgtctgtcctcagaagaagttcttgatcagtggagtcaccatcttcacccacagcttcacctggcgactcggctgctcgaaggtggcagaggacaccacacctgacctcaggtagagctgctcttgctcctgaggaagaggaacagacaggaatagtgaggagtcccctccagcaccacaccacatggccggctggccccagcccagcccctcaggccagcccagaaaaccctgacttcccatgtctacctggcccagagattcccagggtgctctggtggcaggcaaggccaggccctacaagttgccactgtcaaacattccttagaaaagctaagaagccgtgttcctaaagacttttaagggctgggcacagtggctaaagcctataatcccaacacttttggaggctgagacaggaggatcgcttgagctcaggagtctgaggccaccctgggcaacacagggaagacatcatctctatgaaaaaattctaaaaattagccgggtatggtggtgtgtgcctgtagccccagcaacttgggaggctgaggtaggcaagggtttcagcccgggaggtcaaagctgcatgagctgtgatgctgccactgcaatccagcctgggtggcaaagtgagaccttgtctcaaaaaaaaaacccaaaaggcttttaagaccaagacatgtaaaggactctaaatttcttcaatttagagttgaagaaatataactggtggaaaaaatattttaaatgttcaccctcactaaacgaggtaatgcatattaaaatgaggtattttttaaatgagacacagtttttcttctatcaaattggcacaaagccaatttgtgccaatgacatctgtgatgtcattatcccccacactgatgaacgcttagtgctgagggcaagggggacaagtcatcctctagagtgagctctggcaacaggtatcaagaaccttataaagctccctttgcaagagcttaccccaagaaaatcactatgcgctaagatttttatatacagatatttatcacaatatttataacaaggaaaaactggaaaccacctaaatgtccaacagtcaacttattaacaactcatatgacaaaccagcattcaccacgaacttattaacaactcatatgacaaaccagttttcgccatgagaagagtgttgacctaatcatatgggaaagtgcccagaaatcggcaggcaaaggaagctggacacgaaatacacacacacgacagaatcgtcatctgatgcttaaagctgtgcctccgtgcgctgtacacagaaggcaggcagccaatcatcacaatggcttcagtggttttccctacagaaagggttagtttctttctgtttttcttaatttttatagtgaacacatgttaatttcatatttaaaaacaggtttaaaaacatttatatatgcggccgggcgcggtggctcacacctgtaatcccagcactttgggaggccaaggtgggaggatcacttgaggtcaggagttcgagaccagcctggccaacgtgattaaaccccatctctaccaaaaatacaaacattagccgggcgtgatggcatgcacccataatcccagctactcaggaggctgaggcaggagaatcgcttgaacccgggaggcagaggttacagtgagccgagatcgtgccactgcactccagcctgggcgacagaacaagactccattaaaaaaaaaaaaaaaaaaaatttatatatgctttgtccgaaatggtgtttgggatctttgaaaagcttctcttgtaagagtctgccctccaagtgctctctcctcagtgtcctcagtggggcgcctggcagcgctcacacagttgcaccgcgactctagccctctctcctccactgagtctccagcgctctccaccgtaatgtccgggccatacctacatccacaccgccgtgaggaccacaggtgatgaccacagaa

SEQ ID NO: 96729 - DNA, 22779 bp, Homo sapiens
taacacagtgaaacccgtctttactaaaaatacaaaaaaattagccgggcatggtggcaggcatctgtagtaccagctactcaggaggctgaggcagaagaatggcatcgaacccaggaggcggaggttgcaatgagccgagattgtgccactgaactccagcctgggtgacagagcaagactctgtctcaaaaaaaaaaaaaaaaaaaaaaaaaagccacaatgagataccatctcacaccatcaggatggctattattaaaaagtccaaaaaataacagatagtagcaaggttatggagtaaagagaatacttatgctgatgggagtgtaaattagttcagcgtctgtggaaagcagtttggagatttctcaaagaacttaaaacagaattacaatttgacccagcaatcccattactgggtatacacccaaagaaatataaattgttctaccataaagacacatgcatgcatatgttcatcacagcactatttacagtagcaaagacacagaatcaacctaaatgcccatgaactggataatgaaaatgtggtacatgtacaccatggaatactacacagccataaataagaatgaaatcatgtccccagaagtaacatgaatggagctggaggccattatcctaagtgaattaaggcaggagcagaaaatcaaatactgcaggttctcacttataagtgggagctaaacactgagtacacatggacactaagaaggaaacaacagacaccagggcctacttgagggtagagggtgggaggagagagaatcaaaaaactatgtatcaggtaccatgcttattacctgggtgacaaaataatctgtacaccaaacccccacagcacgtaatttacccatgtaacaaacctgcacatgtacccccaaacctaaaataaaatttagaaagaaaaaaataaataaaataagaattatactggataatgtttaaaaagttaaacatatatcacagcaatttcactcctaagaatgtgcccaagataaatgaatgaatatatccatgaaagcttctacaacgtcatagtgaaactaccattgcaaaattataactgtgacagcgaaagagatctgacctaaccaactccatcttgcttctaacctccaagctgtccttgttcattcctgggcatagggcaaactaactttgcgaggaacttaatttagagtttaaaacaaagatgatgtaatcccagcactttgggaggccgaggcgggcggatcacgaggtcaggagatcgagaccatcctggctaacatggtgaaacgccgtctctactaaaaatacaaaaaaaaaaaaaaaaaaaaattagccaggtgtggtggcaggcacctgtagtcccagctacttggcaggctgaggcgggaaaaatggtgtgaacctgggaggtggagcttgcagagccaagatcgcgccactgtactccagcctgggcaacagaacgagactctgtctcaaaaaataaataaataaataaataaaaataaggagacctccttcttgcctagggactagattgcctttgtaggactaacaaattatccaaaagattagaaattatggtttaggagtcacacagctggaggctacaggattctgacctctctaaactgctcccaagagatattttgcacaccctgcacttgatggatcagctggcaccacccagatacatcaactggctcatctgatcttgtagcccccacacaaaaattgactcaacccaagaagacagcttcaactccctatgatttcatctctgaaccaaccaattagtactcccaactcgctggtccccctacccaccaaataatccttaaaaactctgacccccaaatgctctgggagactgatttgagtaataaaaaacctctggtctcctgcacagctggctctgtgtaaattactctttctctattgcaattcccctgtcttgataaattggctctgtgtaggcagcaggcaaggtaaacccaatgggcaattacaataggaactcttttcatcacagcccctaattagaagcaacccagatgtcgatcagttggtgaataaacaaattgtgatatatcttttaaaaaagaaaatgttctacaattgatggtggcaatggttgcacagctctgtgaatatacttaaaaccattgaattgtacaccttaaatgggtgaattctgttatgtaaattctatcgcaataaaattattaaaaagaaaacaaaacaaggcgcattcaacaaagtacctgaccagtactgatataggaagtaaaaagaaattacttaggtagatagtgagggtaaggaagtcctcggtaaggttttccttttaatgaaaagctgtcacaaaacaaagaatagcctgtaaaaatcaagctgcagacacagataagcaagctggaagcttgcatgggtgaatgctggcagctgtaccaataggaaaaggctatgtgggggttaggcatgttcaacatggcagctccatcttccctcttctttgccaaccatgtgtacagtaaggagcagacaacatggagccagccaggtagaaaacacatttgcataataaaaagattagggtgggtggacagcttctttgtgtgctatgtaaacatcacacctggtccaaccaatctttgggtcctatagacactgcctcctcaagccagtctataaaatcttgtgcactcagctgcggaccagaagtcccactcaggcacccccctctctgcaggagggagagctatactcctttctcttacttttgcctattgaacctctgctcctaaaaccactccttgtgtgtctaagtcttcaatttccttggcatgagacaaccaacctcaggtatttacccagacaaatgatgtccacaccacttcagtactaaacaaaactgtcaaggtcattataaacaagtcttagaaattgttacagacaaggggagactgaagagacatgaaaattaaatgtaatgtagtgtcctggatgggatcctagaacagaaaaaggacattaggaaaaatctagtgaactattaataaaatgtgcctggttactaatgcacaaatatgagttccttaactgttataaatgtaccacacagtaatgcacccaggcctgtctgactctacagttcgttcttttagccaccaaagcacactgcctctctataaccctaattatggaagctgagcctgccctcatgttggaggcttatctctgtctcatccaggcccgctactgagatcccaggaggcctcatcaaaaagctgcatgagttaataaaggaaacatcactccctccatagctctgtctaaagcagaatcaaagtatctgagaacttcattatgactctcttctgtttcagtataatgaggtgactgaagcacggagtgggaattcaaatgttggttaaataagtaaatgaattagcttctgaaggcattaaattgctcttttcttcaaacacttaaaaagttagaataagaacactttaaaagttctaaaactctttttagaactctgctttctaaaagacctctaagtttgaaaaatcagtccctatgatctgatacagattagcttgaagggggaagaaaaactttttcaggtgatgtttgtctgctaaaaggacgctggtctttctaagaaagaagcagaatgagtttatttttaaagtgaacttgatggggggaaggagaagcaaaggcatataaacaatatagcaatgacccaagacatagacaagactgaccaatggaaaaaggtatttgctctcaaatgtgctaggagggggctgggggaagtctaccctgaccattaggatcctcagggcaggccagcaggcagtctaatatggtggtaagtgctcccaggcaggagtcccaagacgggagttttctttgcagctccagctttaaccagagtgcaatctttccactgctggaaacttagttgccctatgggataaaactaaacgcttttcctgggtccttaccaattcccatgttttagaaatctgaaagaactagagataagcctcaaataaccttgaggccgatagtgtatttcctcccccactcacactatgtctgggctgaagttatcaagaaataaaactaggccgggcgcggtggctcacgcctgtaatcccagcactttgcgaggccaaggcgggcggatcacgaggtcaggagatcaagaccacggtgaaaccccgcctctaccaaaaatacaaaaaattagccaggggcagtggcgggcgcctgtagtcccacctactcgggtggctgaggcaggagaatggcgtgaacccgggaggcggagcttgcagtgagctgagatcgcgccactgcactccagcctggacgacggagcgagactccatctcaaaaaaaaaaaaaaaaggaaataaaactatagtcaacccttgtgtatgtaaggttccaggactcccgtgtattccaaaatccacgcatactcaggtcctccagtaagccctgaagaatctgggtatatgaaaagccaatcctccctccataggtttcatatcctgaaaatgctgtttctccatccacatttggttgaaaaaaatccggggatatgtgaacccacgcagttcacacccatgctgttcaagaatcaactatagcttgtgttttcatgcctttccttctcagtgacaaaggagtagttcaatagctaggcagtaagaagacagagggcacggggcataattaggcctgcatagctttcagatggatagataccaaaacgcactttaaacttataattggaccaagtcatactatgctagcttcaacagcttgcacttcaccaattcatataccctatttttgtttttcctaggaaaccacaaagatctaaaagaatacaaaaaaaaaaaaaaaaaaaaagaaagaaagaaagaaaacaaaaacacgaaacctgacttcacttattttcccccagatattggtgctgcaaatttattttaaatggaggcaggctggctttttactaaaagatgaagaaaaggaaccaattaaaatagaaacttcttcccaggtagaatcagaaataaagcaggtaaggttttgtgcctcactagagcaagggggtcggggagggtgtgggggaggggtgcactggaggaggtggagatttgggaggtgtttaactcttgtgctaagagaactcaggtaaaccttaacattatttcttaactattaaaccaggatgatgagtttgattatcctaaactgcaaaactgaactcagattttttccttctgtcacgcacattttcaacacttgcagcctcatttaacgtcaacttacattccttcatctgtggatcctttgctctctggcttggttcttttggataataatgccaagttcctacccatcacaggaatcgtgattggaatccaccagcccagcaccctgtactctggtgccccaagtgattacatgtgagcctcccagaaagaacaaatattgctcttgccactcctctccaatgctgacaggactgagtcctggggcaagtggatccgggaattgcattgcagacaatttcgcagtaattccctgtctggagaagcacaccagttaacactagactgtcacagccctaggagaggtaagaacaacaaagcccacattaccacgatgtcttctggtggcaagaaatctttctcccaccaccatccccttcctcccggaatcccttgccccttcctatgtatctcttctgctctcacttgaccaccttaccctgcttactcataacctcaccttgcacagtgccaacacggcctctcaagactcactctgatttttttagttctcatgcccctatataactcagtgtttcagaatcccctagtttatttttatttattttttaagacagggtcttgctgtcgcccaagctggagtatagtggtgtgaacaggcttactgtagcctcaatctcccaggcttaagtgatccttccacctcagcctccgaagtagctgggaccacagrtgcgcataaccatgcctggatattttaatttttgtacacacaaaaggactcactatgttgtccaggttggtctcgarttcctggccccaagcaatccttctgtctcggccttacaaagtgctgggattacagatgtcrgccactatgccaagcccaagctaaactaaastaaacatttttcaagtcaaggtcagtaatttacttgtctttgaactctcagagcctggttcataaaatgtaaaaactgaataaatgaacaaccttatttacagtgaggtattagtgatcaaatctatgatctctttaaggagtttctgctttttacttttatgtattttttcttttcttttcttttttttttgagacagtcacccaggctggagtgctgtggcacaatcccagctcattgcaacctctgcctcccaggttcaagcaattctaatgactcagcttcccgagtagctgggattacaggcacacgccaccatgcctggctaattttttatatttttagtagagatggggtttcctcatgttgctcaggctggtctccatctcctgaactcaggcaatccgtccgcctcagcctcccaaagtgctaggattacaggcatgagccactgcacctggcagtttctgctttttaagagacctgcaagaagagggcaaggtttacatcaaaggaataaatgtctaatagtagaattccaagtattagacacctaagtgaagaagctgaacgtgggcaggacttagcctgcatccttggcttcacacttcacatcaccaaaaaggaaacccacttatattttttccctatgtatagcttcagccttttctgttacagccctaagtgcaatgctgttttgtttgtttgttttcagaactctacatagacaatctgtgccttggcagattctgtttgaattgtaaattaaaatatgatagcatggagaatagcatgcaaggttggagattaggagacaggagtctgtgtactgttctgttagggttaatatcatgtggcatacatttcataatgatgcaagtataagccccatatagttcaaagcaagtgaccccacagcatcttcaaaatctgggactctgtcatagtctaaatttatcggatttgccccaactaattgagcacaatgagattattaatcctacagcactcgtttcatctgcactgccatgttttaaatgagattacgcttattttatacataaagcatattctcatacatatttttatacttaatatactggtaaatcaattccttacacattctttcacttgacccacagaggcagtattattcctacattacatgagtgacatggtgccaaggagattgttgccttacccagggttacaaggctacatggagtcagtcagaaataagatactggattttaggccaatgttttaccaacagatttagacctatatgttgtgagtgaatattccaacacactagaacaaatattagataaaayagattcccaagattatacctaactcaactaggaatcttacttttatgtcactgatactctgaagatgcctcattcctatttctcagagatcaaatttttacattttctataatggtcttctgaaattcagggtaaagaaatcacacaaagatgaaaatataaagatagttacacttctttagtaagcttttgaagttcaacttatttccaaactaatgtgagcaatgctgattccctctctgccttactgaacgacatctctaaacttaaacatatccaaaggatggccattattgtttacttaacaggaaaaatttaaaaatacatgtggtgaccatttccccttactttacaaagggaaaccaatatagtaacacaactgtaaatagcatatctggccttttctaaatccagtatattagaatattcacttctatcataatggtctaaaaggtatgagatagttttaaatctctgtagtaataccagttacctgacaaagctagctccaaagtgaatttaagtaggctttaaatgtggatctagggacattctatacatgtctactttaagaaatatatgggatgtctgtacctctacgccacgaagatgcaataagattcttaagtatctatatttttgtaaaatattccaactcttaaatgtcaaaacagaaaagacaacactttcaatattaaggagatatatatatatattttgagacaaggtctcgttctctcacccgggctggagtgcagttgacacgatcacagctcactgcagctgtgacatcctgggctcaagtgattctcccgcctcggtctcccaagtagctgggactagaggtgcacacctggctaatatttgtgtttttttgtagagatggggtttcgccatgttgcccaggctggtcttgaattcctgtgctcaaacgatctacctgctttagcctcccaaagtgctgggactacagtaggcatgagccactgcagccasccaaggacacatatatattttaagatatatcctttaaagttaagaaaaattgagaaaagaaaaaaaatcacaataatcagacaccacggttctcaaaccgtgcaccaaggcaactccaagccactgtaacaaactcacatagacacaaagtgaactattagcttgtggtcagttttcaacacagcatcatgctacattccatttaatgatgtcatgtttacaaagctggctgggttttcagtggctgtgattaaaaacatgtatggtgcaaaaatcagcatgaaacaaaacaaagatggcagtgatttgataagctatacagtgctcaacagaygcatatatcccattcatagtttaagaatgaaaagaatgaattttttcatttacatataatattttttcaaatggctatgttgttagcayatttttaagttgtttcataactattaataaatggaactgttacttattttggcctagggacactactaaaattactaagggaactgtcaaaggagaaagtttgggaacctctatactaaattcacatcaggtactctagcagcctgaccagaaaaagaaaacacaagtaaaaaatgccattcaaaatgtatcttattcaatgatgaatctttaagtttctctttaagcaaaatctaacagaaaataggccaggacagcagcataagcattaaattaagtaaatgaattatctaagccatctcatttctttaagaaaatctctgggtactggccaggcacagtggctcatgcctgtaatcccagcactttggaaggctgagacaggtagatcacttgagaccaggagtttgagaccagcttggccaacatggcgaaaccccatctctaccaaaaatacaaaaattagcctggagtggtggcgtgcacctgtagttccagctacttgggagactgaggcaggagaatcgcttgaacctgggaggtggaggctgcagtgagccaggatcacaccactgcactccagcctgggcaacagagcaagactccatctgaaaaaaaccaaaaatcctggggtacttattgccaacttttcggaaatctcaaccgtgtgctatatggcgaattcagtcactaagaaatcatgttattctaattcttgagtctgagtaataggaatattggggtgtgctaattgcattattctacttttgtgtatgcttgagcattttcttttttttttttttttaagatggagtctcgttctgtcgcccaggctggagtgcagtggcgcgatctcggctcactgcaggctctgccccctggggttcacgccattctcctgcctcagcctcccaagtagctgggactacaggcgcccgccaccacgcccggctaatattttgtatttttagtagagacggggtttcaccgggttagccaggatggtctcgatctcctgacctcgtgatccacccacctcggcctcccaaagtgctgggattacaggtgtgagccaccttgcccagcctgcttgagcattttcacaataattttaaaaaggtcgttgaacacctaatagtaatgatatacataattcttggtactctcccataaacaaaataagcactataaataagcagttcaatctattatatcctcactactactcatgataaaatagaagttgttttccaaaagaatcaaaagatgagattttcttacttagccagatacatttttagtccactgaaactttcttcttattcagagtatcaatcatcctaatgcaattagataaagacatcttgacaaaaggttcgtgttttccacaccatttatgtagccaaattaagtgggaattttaaaaagttttctctaataatgttattttttaaaaaagaatgttttggcaggtttcatattacctaaaagaacagtaatatatacatatggaatggcattctgaaatataaaaaaaggaattaatggttagaatttgacacactacttgaaaagtgaggttaacataagattcctagctgcttttcttataatctatataaattcattagaataactcactaataatctaccaaaaaaacaaaaagcaaaaacaaaaacagctgtgtggtgyttaatatagcttttgataaaaggagtattaagagacagaatgtcagttttgaaatataggagttcgagattagaaacctaatacttttgttatgaattatgctaaaacggtaaaaaaattttcaaaatatagttgtctcaaatacactcttctcagayarcagaaggccaggcaagggcactgacttgaagggaaacaaaccacagtaatatgactgcctgaaagtaactatggaattcagtttctcaaagtgattacttcttctaatcttcatattgatgactcactagtacatttactttgatgggtttaatcaactctgataacatagttccaaacamttaaaaggacctgatttatgtattaaataaaggttaatttgttcttgagaaattgacaaaagatttggtcaaaygtaaatgaatatgcaataagtcacataagtctgtgtgtatatacatatatgactttaattttataagtgcatgtgtatacgcacacctttagctcatttaaataaaaagctatccaatgttttatgtccattatgtcccccgttaacattgagcaaaatgttaacccctactatatatgcaagggaaataaattaagttgttatatagaaacccttgacactatatgcaatttcttatgtcccatattctgataatatctgtcctcttgrctcttacttcttggamtttctcataaacacggaagcttcatgacaaattgtgtaaatcatcatttcctcctttatgaagtatattgaagacaaaagggattaaagtcatttcacatttagcaaagctattttatggcaacattgttacaacacaaaatagacattgcagtttacaattaacaattacacagtgatttcataacaatactacttactccaattaacaaaatatttctttataaaaaatatgttcaaaaggaggtttacattcacttcttcgtttaatatcaaggttgttaacaatggtcttaggagatgcaaagacgaaaaactacttaccttaaaaatctgtattcttgaagatayatactccacttgaataagatactgctcaaggtttaggcttcctggagaactcagaggattttgtagttgtacttaatatactcaatagccaaatttcctaaactttcataattttgctaaccaagggcccttaacaaagttaaaagacaccacagggttcaaaagtgaacaaatatgttgtttttgttttaagacggagtctcattcttgtcacctaggctggagtgcagtggcgcaatctctgctcactgcaacctccatctcccgggtttaagtgattctcacacctcagccttccgagtagctgggattacaggcgcgcgccaccaagcccagctaatttttacatttttagtagaaatggggtttcaccatgttggccacgctggtctcaaactcctgacctcaagagatccgcccgcctcggcctcccaaagtgctgggattacaggcatgcgccactgtgcctggtcacaaatatgttaatgagccaattaagatggtgctgctcaaatgattctaattcaggaaacttaggttgcagctaggtaatctctagttctctaaagaataatacccaaatgacaggatttatgtgttgatgcaataatagctcagtctgtttcatgacctasctagagtcagaattggagcggtggctatagcacaggggtggctttctcctctctgaaggaaaagtaaagaagtaagaagaaagaggttgaaagaacagcctacacagttgttgcccagatctcaaaattagcaacaagtatgtcagctgtcctaattattaccaaacaggtcctgggagtgtctgacacacaacataatataggtgcaatcagttccagaatctggttcctggatctgaactaatttagctataagaccttcagcaagaccatctctatggcctgcatctctctcctataggtttgacaaagattcacctatgagtttgatgaagacaggctaggtatggccctcaataagaatttattctgactgggagatttaaaactgtaaatgcttgccgggcgtggtggctcacgcctgtaatcccagcactctgagaggccgaggcgggcggatcatgaggtcgggagatcgagaccatcctgtataacacagtgaaaccctgtctctactaaaaagtacaaaaaaattagccgggcgtagtggcgggcgcctgtagtcccagctactcgggagactgaggcaggagaatggcgtgaacccacgaagcggagcttgcagtgagccgagattgtgccactgcacttggggacagagcgagactctgtcttaaaaaaaaaacaaaacaaaactgtaaatgcttgagttctacctcctccagattctaattttatttaattggacatctggttattgtattttttaactcctcaggttatgtaataatacgcatccagtgttgaggaacactgacaaaaaggttagagttcagtgagacactgaggcctcttcagtacataaaaatagggttggaagttagcatcttgacactctttgggggattctatatctcttcacttgccattaagtgaaacgttcagaaatttaagagtcaacaatgccaccattactgctgtcaaagtccttcagtgattaaaaagataccagaaagataccctgatcccttgatcatctggtggtgttaaactacttcagtaagaacaaaagatgtgctttccaagggtggagacatccaacttgtattcagttccccattacattctggatttgggtcaatgaaagaagcatccattggggtgatagctaaggcgtgtcctcgccacatatcaatgagatttctggaggggagtagtgtgggaaagtggttataacattgcgcaagcagatgtcagagaatttctgaaagacagggctatctctagaaactcactgtaagtaaggagacaattaacacttttgaagcccatttatccctgatggtcaattacacactaagaacttccttttttttttttttttgagactgagtctcgctctttcaccaggccggagtgcagtggcactatctcagctcactgcaagctccgcctcctgggttcaggccattctcctgcctcagcctcccgagtagctgggactacaggcacccgccaccgcgcccagctaatttgttgtatttttagtagagatggggtttcaccgtgttagccaagatggtctcgatctcctgatctcgtgatccacccacctcggcctcccaaagtgctgggattacaggcatgagccaccgcgcccggccaagaacttccttttaagatttgccctgaagggccctagagcatttcctcttccatgcagagaatcagaaagcttggattctagctctagctcccaacaattagctgtatgtaattgatgatgggtgacttcattagtgtcaaagccaaagcatattctctgtcagcttttcaaaaaaacacgcagtaaagagagattcctaccaggaaaactttgatgggtgtttttcaagtgtcatctcacagcagaagatgccccaagtggtcaaaccttgccaacagcttcaaaaaaaggtaactaggatttaactttacggtgcattttgatgtttccctttgtgtcatatctgatgataaaagaaccttaaaaaaaaaaaaaaaaaacactatccagcttctccattctgtctcctgctttactttctcttgtttacaaaatacaaatttatagctggatttgatgctgaaaatttaatacagttacctcatgtcacagataaagaacagaaatgacttgaccaagttcacattgttgtttaacggcaggaaaagcactaaagatggatagtcctgccttcctaatttgaatgctcttattctctacaggttagggtcaagttattcagtaaaacaggctatcaggaggttaagcccaaacagtraggaaacaaattttatgatgcttgtttgactaaatgcatgcagtttacctcaagattaagggatttaaaaaaggttagaaaacagtgtaaccctatctcctggatatatctacagacttgtatttaggaattatgccaggctgttatttctaacagagctgatgatcatagatgtggcctttaaggcaggactgggtatttggttcttaaaaatgattctgtgcctgccaatcttaggaataaataatgctttcaatgatctacattctctgtctacctaaaaagtacaaagaaaaagaatatatttaatcaaagagagatgtgtcccaggtagatggtaagcaacgggaataaagtcatgatatgcccagaataaccaatgatgaatgttattagccaggtagccaccattctagtcttagtaaaataagcatcccataaatgtttatataattttaggtgtcagaatacacatmaggacaatctggactaaggaaacctgaaatttaattctgaaattaattaagtaaccatgcctaaggtgagcttgttttcttaactgtaaaatggaagtgcaacctttaactttcctcagtggctcagatgaaatactgtgaaggtacagagtaatgctatatggcacaaagcaaaaagtgctgtgcaaaagaagacagtrtgctaaatattaggaaatttctgagttccagaaaatttggatttttaagaaactatgtcatgtcaagatgtgctttggagtaacaattttcccaatattatattaagtatatactaagtatatattagaagggattatataaaaggtgttcaaaaaacaaatatcaggaaaacactaatttaagcagaatttaacaattgtttttaacttcagaatttctcagagctttgaatattatataccatgaatctccaggaaaggacaagtgagcttatgttccccaaacttatatgaccacctaatcctttttacatggaccttctcagtggagcagtgttccatagaacacacattcttactmtctatttttccaaaattcctactgtttgcttcaatacaaaatcataagacactgtggctagaaattttttttcatataaacataaacgtgtactgacacatgttggtaagcattttataggttgtctattctagctttcaaataacatgactctaaatctgtaaagaccagatcactaacatagcctctttccagaaggccataatgagtacctcctcatcagatagagaatgtaccctttaagttttgtaggagtcaagtacccctttgtcttggggacagatttctgttaagacagacagaaactcttcccttgctggtccagcagcagttttcttgttccctggaccagccagaataaaaagatgacttctgccacgcatcattttgttgtttgtctaacactgaatcccaaataaaatttcattcctgattaatagatctgaccttttaaactagacaagcagcagcaacctgagatggaattgttaagagaaaaatatggtaacattcttagctaaaatactgagagaaacggagagtttaagtctactactgtctacagtacttatgtgaatgttataaaagatctgttagaaactggtggtgatggcaacaagtcctacaccagttcttaaatcctctcttatagctagtagaaaggattacaaagtttggcaaacatcttgcatgtatcaagactgttcacaggtgtctgagcaatgaataatatgtgctatagattagatttaaaagctcattttacaactgtttactagatgatataaacatttttcctctcccttttgtaagctgtaggtatgcatcatagcttctgtgatctcagaaccgtttctctgaccagcaaaagaagagatgaaaatgctcctcttgacctctatctgcactacaccagaaacgtcattgagccagtttcttctaaggagataacagaaactttctatgcaaggctgtggggggctggtaatataaggctaggaggataaagctccttactaataaacaagctgacattgaataacatggcatctatgtggaacatggtttgaaaacattttaagaccattcatagacatctgagaccactcatagtttcttcctcccaaggctgtgaaataaaattcaaaagtacatcaacaaattcctggtgcttttccatcttatggtagcttacattttataccctcagtgtccttcaaaagtggctggaatagcccacctatacctttatctgatatgttcatctctttttcaccctttggagaaataagattacttataagaaaactgattctccaaaaagtatatataagtagtaagtaacactggtaaataatgggcgtttctaacagttcttagaaactggtaaggagacagaagcccataattacccccaaattcacccaccttcatacatattcacagagacatcaacagtgaatttatacataaagaataagtgaggcaaaggcaaaagcagtatcaatctgtctgagtgtaggcaatggtgctttgattatttacccgtacaaactcttcagtcccttttggttatccccaactcagctcttaagccgtagatttttgctgtggagaactcagatgtgatgtagctgctccagtaactcttttcacagtactgcatgtcaataatgggaatgatttctaatcaatttaaactgcacacggtactttaatagaacaagaagtttattactcccactcagtagttcctgggggctttgatgttaagtcatacataattcgagaaataccaggaatcttcttaatctcagtgaccatctttaataccacctattaaaaaaaattatagagaaaagtcagcatccactgcatgtccagcagtcctagagggcttacatttgtaatttgaaattaaaatttgactattttcactattgtcctccatgtatatgggatggtttctgattaatcttatataatgaacctattcccctctgcagggataggtgtaagttattaaggtttaaaatattagtgacttaaactcagtactactcaaagtgtgatccacaaacaggtgctagtctgcaagttgtgtttgtgactgagccacaagtgcttaagaacatatagcgatttgacattgctgtggcatccaagcatgtgattttatgtgtttcagccaatgctctgcaaattatctgcagcttaaacatacaactctaagggccaccaaggtggcacagagtacactgtaataatcattatcaagtatacaggagaggatagcctgctcacttgtcaaatttgacaaatttgagcctaagagaaaaatgactctaagccacgttccgaaccaacccatctacctagctatcacgacagcctcgtgttagtgcactggaggcagtggcccaactaatagagtctcactttgattttcacttgctattatgcaagtagctcctttggaatgttctggtgaagacaaagaaggatcaaaaattgagttggaattggtagtagggagaacatttaggcaattcttgggtgtctggccataaagctatcaaattgcatccttatttctaacaaactcttcttcactcctagagttttcttttttatttggggaatactgtttgtaaagtagaaattggcaggattagataaaattataatcaattactttttatacagtaatcacacaattggagagcatatataatttaaagcctttttctgccccagtgtattaatcaaatatgtgaaaattttaaaaaaaaagcctatcttatgaacagaaaaccaacataagaaatacagcactggcatagcctattccattcaccatattataaaatgtaagaggtactgagaacgtgcattagaaaaaaatatataaattacctctacagggatctcattgccaggtgttgcaggtataccagtcatgaagtcactagtaataaaggttcgaataaccacagatctctggcatgaaggctgcttttgaagtgggtcccgatcaaaatgtaatggtgtcaaaatcaccggcatctggctgattttcccagcataccctagagaaaggtatatgtagaaccaatcaccacaccatagaaaagcactctaactcagttcaattaaatcctcccaggcaatatctgaaatcacatatacacacacagcgtagttaagactgtcatcatgcattgatttcagctactcgcagagcattttaaatggacttaatcacaaatgcaaaaaacagaatttgatcacatcagtgatgtttcactgatgtgctgtaaacagaaacagtccagtctcattattctctattataatttgcagtatagttatattctacactgcaaacaacgaattagcgaatactgaaccatttctcccaggggaaatggagggttaggttcctgcaagcctctggttgtaatattttcatcaactgattaatatataaccttgttttatgtgtttctgatttaagacactgtatttaatatttattatagattcattaacactgaactgacaatcagtagctctttaactcatgcctgaatgaagtttatctaacacacagattttctctgtaaggtacatcacagcattcctgtgcttaggaacccagacagcacttcaacactatagttgagatccattttaaacagcaaaatcaccaacaaaagacataaaaatgcaaaagatatagcatcaaggagaccatgaaaaagacttgttcacattatgagagctgaaaacaagaaggcatagcgtcaccttgttcaaactcagctgggaacatctaagtctggaaattcaaattttctgctgctctgtgcatgtccacaaatggccacaaaggggaatatattttatttagaagcaacattataggccaggtgcagtggctcacgcctgtaatcccaacactctgggaggccaaggctggcctgacctgactcctgacctgatcacatgaggttaggagttcgagatcagctggccaaaatggcaaaaccctatctctactaaaaatacaaaaaactagccaggtgtggtggcgggtgcctgtaatcccagctactcgggaggctgaggcaggagaatcacttgtaacaggaggcagaggctgaagtgaaccaagattgtgccactgcactccagcctgggcgacagagcaagacagactccgtctcaagaaaaaaaagcaacatcatagaacattcaaagatttaaataataaaaacaaaagcatctaaaaagcaaaagccacatcctcctactcttaatatcaagcttccaaaaactagtttcagagggtagtaatcaaaaacatgagcaacttaccagactccctgagaatgttatgggcctcaaaatcagcttggcgtaaagtactgagcacccctgttgtcaagaaagtgggagtaacatctgtaggaggttctttaactggtgggccaaatatataaacaactctggaaacaaagaggtaaaaataatacagcaattacatttcaaatgtagaaattacattttagtatgagaagcaaggcacttagaacagtaacattctttccatttcccacttagtttcaggcccttctcctgcccacttcaactccccagatggataggacaagatataagattataggaaggtctgtgttctacgtgttttcctcaaagtgtgttctctggaatattctgtatctcagaatgtgcaaagatataagtgattattacaactctcttttcacttaatgtactgggtcgaagagtatccccaaaacttcatgcccacccagaatctctggggagaaaaagggtctttgcaaatgtaatcaagttaaaatgaagtaatactggattaggatgggctctaatccaatgactggtatccttccaagtgctgggaaatttggatacacagatacccacaggggaatgagggtcatgtgaacacaaagacagactggactatgctgccaccactcgatagtaggaagaagcaaggaaggatcctcccctagagtcttcagagagaatatgaccctgccaacactgaattcagacttctggcctcctaaactgtgagagaataaatgtctgttgttttaagcctcctagtttgtggtgatttgttatgggtagtcctaggaaacaaatacacaattaaaatttaaaaataggtgtctttatgacaagacttcagaaactattaatatactatgctaacatgcactggaaatctccaagaggaaactacagtgaatttcccaaaattagtaaactcatctttttttctctacttgagaaacaatcattctagagagattctcatttgcacttcattaaaaaggccattgaaataggacttagtatcctactacttccttccaaaaaaatgattcattagtgttttatataaatgtctgtttgaaagacatgaagatacaccacaaatatcttgagttaatgagagtacagtttggaacataacttgaggaaattagaatcagacaattttaacaacttgaagtgtagctggccactggtttgaagggatctgtttcacaatcttcacccagaaaacaagagggaatcagggtagagatatgagtgccacttagctagttctccctattcacttttcgttagtcctgtttttagcaaagaaaataaatctccccggaaactatcatggtaaagtttaatgttttttcttcttttcttaatatgtacttaggtaaaatacacaatagaaaaccatattagcacaaaaccaccggtatcaccaactactttattgtctccttccaaacatactacaacagaagcaaggtttttgtcccacgtatagacagtaagttataatttttctaaacaatacagttcctaaagttcataaaagatctttacaggagaaagttaagagaatgccatgaacctgctcttttcaccttctcatttcttacaaacaaaagtaatcactagagtgtactgggacaggtatttatccacactatatatgacagtaaaactggaacagtccctccctgtacaaagattcccttatccaaattaggaaaaaaaccggcaaacagggaagaatatttttaaactccaattcatcaaaaagaccccagcaaataaatctaaagttcaccaagattcttttttttttctttttcctttttttgagatgaagtctcgctctgtcgcccaggcttgagtgcagtggtgcaatctcagctcactgcaagctctgtctcccgggttcacaccattcttctgcctcagcctcccgagtagctgggactacaggcacacaccaccatgcctggctaatttttgtattttttgtagagatggagtttcaccatgttgcccaggctggtctcaaactcctgggctcaagtgatccactcgccttggcctctcaaagtggtgggattacaggcgtgagccaccatgcctggcccccattattgaagatagtaataattctatttttcagcattttaaagatgcttctgtatttgacggttttcagttcatttgagtaagcctttgaatgagcatgttcccatcggtaaaaacatggcttccctgtaactccttatctcgaactatacagactctgctagcttaacattaaaaggtaagcttctgatttctgcagcaatttgagtaaaatgaaacctcaagtaattctttttggttgttaactgcctaacacccatgaagaaaactgaacagagagaataactgtgaagtaagaacatttaattagcaatctagtacaaaataagtgaatttttgaactatatatggtacgatgaaattgaggattagaaatagattataaatcagctgttgatatatccaatgtaagaagttaatatgcaaattaaagggaaattaatctaaatgtaaattatatatttaaatgtaactattttaatgctatctggcacatgcctatttcttttctttgatttttttc
